United States Patent Application Publication US 2008/0114160 A1 - sequence listing, part 39

SEQ ID NO: 9712 - DNA, 61470 bp, Oryza sativa
  unsure (1)..(61470): unsure at all n locations
aaaaagtcaacggcgccatctattaaaaaacggagggagtagtagtttaaaatgttatatttcatctaaatattatcagtataactttaaaggttgtatattgctagcaggatataaaggtgatgtcacgctttctagtatcattaaatcatcatcgtacttcactgagaacttgcccaaaaccaaaactaagaaaaagtacagactaaacagaaagaattagtaatgtgtatacaccacaagtacaaaatacaccacgatcaaataaaagtataattgatgctttagaatattaaactggtaaaattagtttgcataaaatacacaatttcttgaagatttaaactgatggaatatctttagtttgaaatggaaatcttggagctttgtctactcaataaagagagaatcaaggataaagcagagtaaaatcaaccattccatgcagattcagtcatttgaatataaattaaatttgaaccggctcaaagctgagttcatcagttttatcccaacttaactaccaaacctaactcccatcagaatcccaatttattttctataaacacaagaaatcaaacatagtgagacttgtattgatgtggtagaaactaactcatgattaataaaaatatttggtggattatacataagcttgagactgaagactatcaaaggctactgacttgtattgacattgaaaaacaaattggcagttcagccctgtcagggttatggataccacatacctaatagtagttgactaaatctcggcaggacccaccacataccatgtcctatacggaaacaacctacggatataggagggagttccggataaggaaagacaaccagagttctacatggaaacgacaaggactacttgaattgtatccatattggtttccctagttctacttggacaaggggacacctatgggtataaatacaagcccccctaggaggacagggggacacacacccaccatggaggatcaacacgatcgacccccaccatgagatgatcaacaccaatcatgagacgatcaacacccaccacgagacaatcaactcccaacacaatcaacatagaagcctacatacgccaagacaagccgccggatatcgacatcagagatacgcttggatcgaccctatccggtaccttcagaggctggccgtagggatctagcactgtctctgattccgtcgggcgcgagctcgaggaggaaggctaccctgttgtcgactacgagtcagaccttcagaccgccatatcgacaacagttagataggctacccacatattgtactggtgtgattatggtgaataagagcaataccagcttcggccaacaggatgtagggttattacctgacaactcaggggctcgaacctgtataaaaatccatgtctccatctcttttacctcagtctcgcgtatatcctagcaccaacgatccccatactgtccaaataccgtagtcgtgacatcaaacgtcgacagtggcgcgccaggtagggggattttggtgctttaggatttcgacgagatgggtttaagagatggactctccgacaacaagctactcgacgacttcggctgtggggagatccaacctaaccagatcggaaccatcatcgtcatcgacaacttggtctatcgagatcatccaagcctcaagatacgcggcgtaccaaaagatgtcagatcatatgatgtcgaacgagtacgcaataaggtaattggtagattggtttttcaaattgatctactaatttcgtagatacatccagcatgtatctacaaaggtacgcaatattttatctacaatttatcgtacctattctgatcatacaacattgtcagatctataatttattatgtttacctagagcatgttctttatacaataatatctgttgcgcgggtgtccccgatgttaaatcgactacgatctaacgctgggggctcgctctgtcttcttctgtataaatcatgcttgtttatggtttacataatgcctgatatttacatctgctcgttatatcctgataatactagaagacccatgcagtttttcgaatacatattcgatattatctgctatatatcttgccttctagaaaatatttttcaggaacagttgagcactcgagtaggtgatggtcgagtacactccattaccgagaacattctcgacaaatgcggagttatcgcacccaacctaccaacgaagaccgacgacctatctcatagcaccggccatcgctggactactcgagaaaaggttgttaacggataattcctcgtgaacgtcgtcggcttgatcacccgacatgattgcgagcggacatccgaatatgctataagttgggtatgtacgtcatgctggccacatgatatgcacatgtaataaaccaactttagcgcccctttaggtgattaagagattcctactcctggttcttgaaccagtaaaacgtagtgatctctctcgccccactttaagtggtcgagttacgactactgcctggtcctcgaccagcgatgtagcgtttctcccactacttctactttcagtggtcgagttacgactactgcctggtcctcgaccaacgatgtagcgtctctcccactacttccacttcaagtggtcaagttatgactactgcctggtcctcgaccagcgatgtagcgtttctcccactattttcacttcaagtggtcgagttacgactactccctggtcctcgaccagcggtgtaacgattctcccactatttccactttaagtggtcgagttacgactactgcctggttctcgaccagcgatgtagcgtttctcccactacttccattttaagtggtcgagttacgactactgcctggtcctcgactagcgatgtagcgtttctcccactatttccacttcaagtggtcaagttacgactactgcctggtcctcgaccagcgatgtagcgtttctcccactatttccacttcaagtggtcgagttacgactactccctggtcctcgaccagcggtgtagcgattctcccactatttccactttaagtggtcgagttacgactactacctggtcctcgaccagcggtgtagcgatttctcctactacctctacttcaacaaagttgatagtaggtacacaatatcgccaagtgttttacccagagatcccttaccacgacgacacctagcattgaaacctatcctactgtccctttacgccgtcttgacaaggcctccgaggaacctaagggatcttcggctggggacgcccagagccgataaggccttgtcggatcctgtagagacaaaaggccatgtaagatctggccgtgtaatcagaaattgacttttccaacttcacggctgggggctaggatcagtgcttattcaaccaaggcaggtcaagggtccaagagccttatcctccgagaacgattctccgacgacaaggctgggggctagggagagtgtatgactctacaaactgactgatcgaagtcggtaagagagaagaccctcatacacaaaacattggtcggtaaatttaattcattttcaatttaccatacatattataacattgtcaccttttgagcgttcgctcgggggctatttctatctaatattcttttctgagtattgatttcaggaaaattctattcgacattgttgaagactccatgtctctgtggttctacaccaagatcgactaaggcgagtacgacaaatgtcgacaaagctccgtcgcagactctacgccttcttgatcgctcgagaacggttgctggatctcgacaaggaatacggaataaagacatggtgtacccgccgagataaaatttcttgacttcaattcaaattctcgattacagcaagacgggagacttagttgtacgctatgtactttctcggtcgacatcaaagattgacttagacaaaccctttcggtgcccgcacgaggctgacaaaggaagtctaacgttatctctgaactcaccgaaaacgttcacatgagctcgataatagttactccaaagtctgcgcgcgattgataatatgaattcgttcatttgcattgaagtcggggactactgtcagggttatggacgatcaacaccgatcatgagacgatcaacacccaccacgagacaatcaactcccaacacaatcaacatagaagcctacatatgccaagacaagccgccggatatcgacatcagagatacacctggatcgaccctatccggtaccttcagaggccggccgtagggatctagcactgtctctgattccgtcgggcgcgagctcgaggaggaaggctaccctgttgtcgactacgagtcagaccttcagaccgccatgtcgacaacagttagataggctacccacatattgtactggtgtgattatggtgaataagagcaataccggcttcggccaacaggatgtagggttattacctgacaactcaggggctcgaacctgtataaaaatccatgtctccatctcttttacctcagtctcgcgtatatcctagcaccaacgatccccatactgtccaaataccgtagtcgtgacatcaaacgtcgacagtggcgcgccaggtagggggattttggtgctttaggatttcgacgagatgggtttaagagatggactctccgacaaccagctactcgacgacttcggctgtggggagatccaacctaaccagatcggaaccatcatcgtcatcgacaacttggtctatcgagatcatccaagcctcaagatacgcggcgtaccaaaagatgtcagatcatatgatgtcgaacgagtacgcaataaggtaattggtagattggtttttcaaattgatctactaatttcgtagatacatccagcatgtatctacaaaggtacgcaatattttatctataatttatcatacctattcagatcatacaacattgtcagatctataatttattatgtttacctagaacatgttctttatacaataatatctgttgcgcgggtgtccccgatgttaaatcgactacgatctaacgctgggggctcgctctgtcttcttctgtataaatcatgcttgtttatggtttacataatgcctgatatttacatctgctcgttatatcctgataatactagaagacccatgcagtttttcgaatacatattcaatttgatatttaatttttttccaacgatagagctattgtggagccatctgatgctttaaagttgatgccaacaacttaaaaatttgcatccaaaatagcagagctatattcggctactccacccaaggaacaattagaaatacacaattcgctcatatttcagatgtgtcaaactatcatcatgagtaaaggacccaaatttaaatactttattaatacaacacatatcaaattatcaatgtattgtctacctcacatttctccagtgatacaccgtatagtcaggataatcgactgttggtatcattcccaaagtgaagaaaactatatctttaagcgctttgtgctcattaaaatgagtttgaatcattttggacagttgttaatcctctatcaacaaacataatagataagtaaccatggcgaataaaaagttcagatgcctaaatattttcatcataccatcaccatatgttataggaattaatatagccttatgaatttgcaatatgctaattgtgagcatataacaaaacatagtgttagaatatataatgattccataccgttaaatctttaacaatttttatcagaaccacctaattgttccaaccactatgatttagctgcactgcatcccaacaagctaatttcaattttagacaattattaatggatagacatctccaacggacatcaagctagttgagtagattctgattcttggtgattctaattctaattcaccctaaaatcagaaactaaaaaaatcaggatcaattagataatgtgtttggtgagaaaagtttgattgactcaaaatacaattaaaattacaataattttataaacaatctctcttgcaagaaaacaatcaacaagatcttatataaatgtacttccaatgcagtaacacaaattactgaagaactaaagatgacttgatcgtaatcattaaaccatagaaagtcgctacaaggcagtcaaataatattattacctctccattacatatgtttcgtgttctagaattaagcaatgatgcattagaggtacagtttactctctatttgtttgaagcgatgcatttctagtaagactggttatattgggccttaggtaaggatcaacattgtaagtactaaatgcaccacaccaactagcatatttttggcatcctttgcatacagtgaaaaggagaaaagataagaagataggggatgcaaatacactaatatagagtactctattcatcacagcccaacagtagtccattcaagcacttagctagcctagcctagcaggcagcagtgtaaccctacttcaatcacacacaacataaactatatgcaaatatctataatgtttacttctatcatctagtagcaagtaggcaggaaacaatattgtcgtgaccttaggtcacggacaagatttgggatagaggggaaagtgtatattctccgtctatcctgaatatgagctcgaatgtaaatgccaagaattgaagtttgtattcctcttcctcctcctctgttacaaggttagggttgggttatatagccctcaactatacatatgagattacaaatttgccctcaaatgcttacaaggagttactataatacccctataaagcttataaccctaagggtatattggtacatttttgtggttcctaaagatttttggcgccaacttgcaagagtagttgaagtggtccgcatggaatcttctatgcttgagagcattttccttgatcttctattgccttgggtgaaagacatttcccatgcgaggactcgaacacactcctccgttggctagctccttgggtgtctgtctgctataagtaaaaaatctccccgactgtatataatagctcgaatgtgatttgccatgaccaaacgcctcattggctatgtaaaatagctcgaatacagttttccatgaccaaacacctcatcagctatgtaaaatagcttgaatgaagtttaccatgactagagaccgccttgatcaggctcattgagtcgaaaagtatttgccaagagtaaaagatcactttgacttgttcgccaagggtgtttagactgaatagggggatggagtttaccctgcctcaatacctcatggacctcatttctttttatcccaaaatcacaatattacatagcaaaccaaagtaaaagaaaatatctgttaccaacatgatgcatacaaaataaaatgcaatcattgctcatctccttaaccaaaataaagaaaaggtggcaaaaagaactatttatccatgaagcaaatttaccattctttcacgctgtagttggtatgcaggatggaaggaaagatgtgaaccgagggaaagcggctttggtggctcttgtcgagacgaagtaggatggtcccagtggcacttggggatgaaaagggatgattagcggctaacgagatagcggaaagcggcggcgggcacgggtgagatcgagataggggtgggacggcggtggacgcatcaactgcgtgctcgtttgcacgcgcacgcccccatgccgacgtgtggatgataggaaaaggaataactctactttacctccctcaactcatgccattagttgaatagcatccctcaaccgcaaaaccggatataacccatcctccaactcacaaaaccatcacaaattgactcctcgggtggtttgggaggcggtttcgtctgacgtggtatctttgaccccttgactagctgagtcaacacatgggcccaatatgtcagtgtcttgtagtacaaaaagtctactttacctctcccagattcttcctcctccagccgatctcttgttcgtgcccatgcactgtagcgtaacctcaccttccaagtctggcctccccatcacctctctttccaaattacttgcagaaacggattcttctcgatctcctctccttttctctccaagaaagcctcatcaatatcatgttaaatcccgcgaattttggccatattcttatcccgacgaactcaggatgaaccctagttttccacactgaatccatctgtttctagaccggtcttcctctcctccgcctatatatatataaccctggtttgaactcatgccctagccgcctccccgagcgctttatctctatgttcgcccaaggccaccgctctagccgagccgcaccgccgcaaccgtcgtcgcctgaggtggctgtcgccactgtcgggttcgcaagacgaaggagaagctcggcctcacctctgcttcacttggacatcatcggagcgctgtcgtcgacatcaacccgaggtcgtcgccttttgaagctcgccgccggccactcccgtcgcctctcgttgtcgtaattgcgtcggtaaggtccatcgtgttcccctcttcttgcctatgcccttggtttccaccgccacacctttgttcgccgtcatgccatggccaccgccgtgcaccactaccaggcaccgccaccgcctctgcaagacactgacatatgtggtccgatccacatgctgacgcagctagtcaacggggttgcagatgccacgtcggacgaaaccacctcccaaatcgtctgaagagttgatttgcaacgattttgtgagttggaggacgggttatagccggttttgcggttgagggatacgattcaactagggtatgagttgagggaggcaaagtagacttatttccttcctatactttattgggtgaaaactgtgtgcaaaacaatacggttagttttactatagcccacttgaagctacatgggtttgggccttgaggcccgttccaaaatgggctggatttctcaaagcccaacaaggcaacagctggtctccacaactcagccgtttcgtttcgacaagatgtctccagtatttcacatttcgaaaaccactttcgtcaaaatcacccgctcaaaccaaaaaaaaaaaaaatccccaattcgaaacgcgattcgtcagccgtcgccatggtcgccgccgccgtcggcgaggcgacccctccgccgggcgggccaccctcccgcgtgtccgtgtcctcttcttcgtccaccccgcggcgccggtgcgccgccctcacgagccgcttccgcgagccggcgagcccgcggcggcacgcgtgggtgtcgctgcagggccgcctcgtcggcgccgaggaggcgacgtccgccgcctcggccgcgccggggctccctccggatgaggcggtggcgtgggagctcttcagcccgctccaccgcgtgctcctggtcgccaccgtcgcggctgcctcctcccgctcccacgaggcccgccgcgtcgagcaactccagcgatcgattcatattagggtttggttttactgatctcatatatttcgccttatcccagatttattagtcacatagctaatacttaatagattgaagtgttgaacccctttgttgattttagtgatctcatatatactgaagcctgtgtgttcttgtcatttcggccaagtgctatgcgtatatgacttttattatagtacctcgtaggtgattaggttccacttgaatgttgcatattctaatgtttgcggtaatgtgctatatgcacgatatctcggcttttacatgctgttcttgcagccttaagtaatcgtatgaagaaatgtttatggtatgcaggatgaggtgcttcaaagcatgcagcagaagcttgatgatctgtttgacgagatgaactccctgcaacagcagtatgtcaagtgcaacaccttcatttcctcggagcagggaaaatctgagttggtgggtagcaagaaggtaggagattatgacggagctagatgctgtgcgtgtgcaaagccagagattgctgctactcctcacaagacaaaggtattatgtctttacagagagcttgttccatgaggtattttcatctcacttccttttcatatggtggacgagtgcaggatatctgtggaatggacgatgcaaaatctgatgttgttgataggtccagcgtgagtcatatggaccatgaagagcgccgaatgtcagacctctcagacttttgctggagtgttgtgtcatcggtggataatcatgtaaatggggacaatcaggtaaatcctactccattctgtggtgaaagcatcttatttatgcgcaacgtcatcattgttaattgttcatgtacagtttttttttcaatgtacgaattattgatcaacatttcagtattaccttcattatggagcggagtgctttgataaaatctgaacatttctcgtgctttaaatgttgctgactggtgacactctggtcaattgcatccagctaagttccctggcggcagaacaggaattgtacaaccttcagaaagaatgcgaagagaaggatgcaatcataaaggaactggctgcaactgcacatacatctagcactgctgatgccaaggtacaaattgtcgtggtggtatgccaaccatgtgaattatatatacttatgttatccatctgtctatatgcagagaatagcagagctgcaagaaattcttaaaagaaaaaacatggtgatatctaaactgaagaaggacatgtcagctttaaagcagatggtatgtggtccattgctacttacatcttgtgatttttctttgtgtgttctggtaaagttgtaacatgtcttgtttcaatgtttcatactcaaggttgttgaattaacaagggctaaaagaacatcttctgtcaatttaagtactagctgctctgaactgccagtgatgtcaagtaatgttctttatgatatgagcagcactagcccatcatcatcggattctgagtctcctgtagcaccaagagaataccttgatgatcatcttaaggttgatgatggcattgctggagactctgaatacaagggtagttctagattctcaatggaaagcgcatgttttcccacaaaaaactcatcagctggcaagcttcggtcgactagtccattaaaagagaaccgtatagatccgaatgttgaaacaagtttggtcggtagacagaagcaacgtatatccaccaatggagactttaaaaggactagacggcaaagccagcaagactcaaggaacagagctacaaagagatggatgtagagtttagactgcagttattaccaattacaggtacactgaatacatgactaaattcagttccacagcttttgttaaatttattctactatcaaatatgtgactttattcagtgcacctttcttccatgtatattctttttctttgtactgtgtacttttgtcttcctcttccatcatctttgctgttgctagtcctcagaaccgtagccaatattagtgcaatactccctccgtcccaaaaaaaaaagacaaaccctggacatgttcagattcatagccagggtttgcctttttttaggatggagggagtacatctctaggtgataggctgacagcctttgccagatcagcagatacagcaaattgatattctatatttcattttgatttgtgtattaactgtaattcagtattctgttaccagatacactgtagatatctgtttattctctagatctttatttctttttgttagttgtttctttattactgaaagacttttggacgttaaattacatctgagaacacatcggctgcaacttttcagtttgtccgctttttagggatcaaatacagtcagcttctttgatactatatatccatagtatttcttttaagatgcacatcgtgtaaaacgtcagttaacttcatgtccccttttctttaaccgggtgcagcagctctttttttttcttttaaaaacttggttgatacgctgaccaatccattgtttcggcatttcagagcaggaagagacgaaattggtagcttcatcctggctcctgctgtttctgtaaacaaaaaatatcgatgcaagttgctacatactttatttatgtctatgatgaaaccgaccaattcaagctgttcatcttcgtcattggtatctgctccgatgtataatatgccatttggatctgcacagtcagcgtctctctgctcttgaatctatcgctcttttttaattagtggcttaatttatcaaacggaatccagcagttcatacgtgcacatttttcctatattacttgtttaccaggtacacaaaaaattcttcatacgagttgccagatggttagatatatatactcctggattctgtccatcaggagctcctgattctttttcttccagtagtacaacttatgtgcctatgtatttgcaatttgtcgcacaatttgatacctggattgcttgccgctggcgggctctgcatatgccattgcttccaagcttcatcatcgtttatacatatagccattgggttgggaagtccacaggggcaatctgatgaagttgactccatttgggagctctccaatcgcatctaaccaacaaagtcttagcttggaaatttggaacatatgtgatcaataggaaatagtagtcaaatttacaaaggaatcagctctgaatcgattatggattatctggtttttgagataatattcaagggtgtacaaatgaataaattagctaccccaattacgtagaactaattagacatcatatggtacttcgaattatctagatttatagtaccggattaagtgttcaatctagtattaggcttctatattttagaacgtagagtactttaaaattgaaattttgtttcgttaagaaaaaaaaggtattataagaaacttagtttttgcagaactcgcaacgtttaagaagcttgcaagcatacacgtaatagtttgcaagcattactcttaaatcggtaagaggaaaagaacaggagtcaaaatcaactcgtgaccataaaaaaacggagtaatcaaaacacgccctgcactgtacgaacaacctgaacaagtgaacaggaattcaccgaatcgcattcaattcggaggtggacacatcaaatccaaaggccagataatccaacgaggcggccgccgatcccatcaatccatcaaaattccaactgtactccatctaaaagtttaaattataagagtactgtatttcttttattactaaaagtagaaaggaattcactcgtggatcatatgaaaaaaccaagaaactaataatatacatacatgtaaccaataagtattaaaataatttcttaagttatgatcaataatttaatctaattatctagaacatagatgttgtaaatatattaatctcatttgaaaaaaactaaaaaaataaaatatgcacgaagtgagcgtaacttaactgtggtggtggaatcagcctacccaggtagcaagacgtctgtggtaatagggctattgtatacgtgttgtgtgagactgcgtttatactatgtatttttaaaaatagaaaaaaaattgaaatatgcagtgacattttggatagagagagtactatgcaatacccccctctccctctgacatgtgggccacgcagcaacggatcgagcggccctcgcgcgcgcgagaggtgagaaacgaaacgaaacgtgacgcggcgcgattggtcgtcgtcgtcaaccacctcgacggcgacttgcccccttctcctctcctcttctttaacccctcccccctctcgccgcgcgcgccgccgcggccgcgcggggcgcaaagtctgcgaggagcacgaggccgcgcagagtattctagagaaagtcgccgccccacttggcccacgcgatcgttgcagaggttgatcactcgaggtcgagggcgatcgatgatggagcaggaggacgcgaggaggaagatggcggcggcggcgggggagcgggggcaggtggtggtgctggagtgcgtggcggggagctccaaggcggaggagtggggcggcggcggaggggtggtgcaggaaggggacgtggtggaggcggtccgggtggggcgcggcggcggccccggccccggcgccgcggtgctggaggcgccgttcaagggggggcgcgccgcgctgcacaaggcgatgcacgccgcgttcaagcgcggggacacctccgtcgaggtgcgcgtccgcggaggcagcgagctgcaggcctgcatcctccctcactccggcggcggcggcggcggcggaggcggtggcggaggcggaggaggaggcggcggcggaggtgggaataagcagtacgtgctgcgttccctgcacgaccccaactacgttcttggcttcgtcgaccgcctcgaaagcgagtgcctcttgttgcaaggtaaactacttcgctcactgctcatcgctctgaaatctgaatagttcatccgttttgccgcgcattttgcaattttgctgttccagacgaattcaaccaaaaaatatattactgtttcaagttgattcaagtatagaaatgttctgccgcttcagctcatccttggtgttatgaactgaacctttttgctgatcaaatcgatttcagagaagttcggtgtgttcatttcattacgagaattttttcttgtgtgtgttcattcaatgtgttggtaaaatataaacaagagtgaaacgaacgaaacaggagtatcaacaagacagatgcggcatttaatcttgttttcattttgtgcctttcttggcctctacatgtgtttttacacctgttgtgaaaaagacaagtttgctgtcaactctttgaggttcaaaacccccaccaagaatattctgataagctgatctttcagcgcgttgttgcaggcctaatttccttgcataagtgtgtgtctttctctcacggagagaaaactaatctgcctgtagttatcaatgataagaacgatagctacatgacaaaagataatggaagcaaagtggaaagaaaatagtgataaagtatgggagaatatggaagacgtttcggaaacaatgtcaggccaattgctttggtagagattggtcgtttgtctagatggtgatcaatttctagatacctcgtaatgttcactcgttttctcaattctcatatccccggggaagatggaatttctatggtggactagactttgtagtcgttataaacagtcatcgtttgtggcctcctgattagttggttcattactgttgggacataactaccgcactcttatctgattaggctggtctggacatatatggcttttgatctacctggctagaagttataactgttagtgccctggtgcaacttttctttgtcaagcatgtgcgttttcctgtagaattcagcgcttctgaacaactggtagatgcttccatccctgactttaagttttaagtaagaaacagataatctatttcgttgtgaacttttgggtaatgaaacatataatctcttttgttgtggttttttggattatctttctatggaaagtatgtgactttcccttgattcatgaaggcactaggagcacaagagtggcatcagccctgagcagggcacaacttcaggatggttatgttgcatacccatgggagaagaagatgcgtgactcgttgcgcatgcccaactccagcagctacctctcgatgctcgtcctccccaaagctctggacctgaattcatgtcgatacgagtcctttgaggacacccttgcccgtgccaacgcgtggatctactcctcgcaggtctcaggaatccccatcgagttcatgaatgtgcagagtgaggctcttctcaccaaggtgcagatacaatctccctgcttcaggctttttgcagcctaaatttcctgttgcttaactgaaccttcagtagattgaacctgagtatgaacataaaaccccagataagagttgatttggttaactctacttattaagatgtgatctttgcacttcaaaatgtacagatatctggagagacagcgtctgcaactgttaactcaggttctttgtctgatctgtctaacgtcacgaatgcgaccctgtatggttttgaggattaccatggggtagatattggggtggtgaaagcagcccgactttggtacagctccatagcagaagagatgccgctggagattccacttgaagaaggtgacacgaggctaggattcgccatcagccgtactgaagaggtactttgtcacttgacactgtacacaatgccgacaatagtgtacctgaacaattagaactacacatggaacacactgtgacacatttctttctggcagggttttatcttcatatcttcagtggttgacaatgacaaggacaatgaggcgccatcgacacggtcagggctccgcgatctgttcaaccaggcaagggaggcatcaaaactgctagttatctcaagggtgtccaatgagaaggtccttccctggatgatctccagctcaggagcgatccgctgcttcgacaccatctccctcagccaaaagctttccttgcaccgccttgcggtgcgccccatccagctccacctgctcatgtgggagaaacctagtggtcctgtagaaaggatcattcgctctccgaaacttcccccacaatctgagctacctcaagtaccctggaatctaattgagagcattgaacctagagtagatgttgatgaggactatgtgggggatttgtcatttcggattgatgatctttcagtgggaaccagctgggtgtgatcctttcatgctgcaagcttctaatgtgcatatgtatgtcttcatttacatagttctcttgggcagtatgctcagttttgttccatttaagtgtagaagcctggctagaaatgtccagagccttactaggtttctggatataccaagggcgaggctttcataacatctgaaacattatgttgtgatgcaatgtttttgttgatcatagcataccattggaggaatacataagcatttcaataattatctaaggattatcccaattatgggcctgttaagttactcccaaacatattgttcaacactgacatttctgtactttgtactgaacataaagtttgttacacttaaaccacacaagctattggtcaatgagagctaagccatgaatctcaattatgctacttatcaagttgtgagcactctacacttgagcactcgatattggacatagaaccccggcattaccatgatctttacctgacaaggattgtgcagctgctgcttgtcaggtaggatgtcctccatgtacatctgatcgaatacgcggctctcttcgacccgcatgatcgtcagcgcgggggtgaaggagaaggccaggaggtggagcagccagacgcacttggcagcgacgaagaagcactgcagcagctgctccggccatggccgggaccaattcttcagggtggacacaatgcagctcatcttctggtcgcagaaccggctgaagtcctcgctgtagtacttggtgcccttcctgagcacctcgttccagctcaggttgcgcagtgcgacgaaggaggcgaagctctcctgggatccttgcttgggatcgaggcaccgtggcgagccgttcttctggaacgtgcagttctcgaagtcctggtacattgcctggttcatcagagcttccagatggtacagcaccagcttggagcaatgcttgttgtcagtgatcatgagctggtaaggttggagaagaatgtttagtttttctatcaaaccattgtcaggttcttcgacctgctggatcaatgccttgcagaattgcttcaccgaaagccgcgcctcggaggcgatctgcaagaagccttccaccatggcttcatggctgaccggccccgggagctcctggcttgctccgatcgatcgcgttgatctcctcgacatggaggatgatgatggttgagcgttgctggttgagctcgtcgctagtcgcagtgccttcttgagctccgagcagtaggcctcgaggccggcgagcttggtggtgagctctcccagggacgacctcatctcggcggcttcctgcagcgcggcgtcgcggtgcgcgttcgcgtcggcgagctctcgccggagcgagtcgagcgacagcaacccccactccttgagcagctgcgacatgttctcccgctcgatggcgctcggcgacatcggcttcgccttcttcttcgccctcgggaagagccacgagaggatctgcgcccttctgtgcttcgccggccggggctgcgccgccgccgccgccgccgagagcggcgcgccgctgctggcgaggaacttgagggccccgacgtcgatgccgtggtcccggccgatcgtcgccggccggaacgcgctgccgcacgtcgacggcgccttgagcagctccgccgtgccggccatggtcgccctccccgccgacgcgaggaaacggtcggccgacggcgcggagtgcaagaacgccgggtggaccttgtgccgccggtgatggtcggtggacgacgggaagcggagctcgctgttcgaggacgagaaggcgttgaggttgtcgtagtcggagaaggccgcgtcgtcgtcgtcgtcgccgctgccgccgccgcccaacgcgatgccgctccagttctccgaccggctccggttgtcctggcaaatgtggctgagtccggccatttgctcctcatcgtaagcctgaccaatttaacaagaaattcaagccaaaaattagccaaaaaaatcttgcaaaagaacagaacaaattcagggacagtgagattgaaaaaaaaaagtgaagaaatccaaacagaatggcacattgcaacccacatttctgcaatctgcatggagttgctactgaaagtttccaatttttaccatttaccaaggcaaagtacaggttgctgctataggttaaagcacagcaagagattactccacagatgtgtcatcaagcttctttcagaaaaaggtgagaatgtgacatcaaaagaatctgagataacgcaacttttactgttgcttaactgcattacatgtcctattaattgcagagtaatagtaggagcatctgggattagctgtcaagaagaggaagaacatgctagcagcaagaagagcatgcaagttaaggagaactaatgaatggctcaagttcatcaccaacgaatgacccttgaaaacgagaagagatgaaccaagaaggcacatcgccatggcagcatcaaagatagcagtgacagggtgactgtacgcaagaaaagctcgctcaccggagtaaacaccgggtagtcctcgtcgacggtggccaccgccgccgccgccgcccccgccctggagagcgcgggggacgcggccggcgggaggcggatgatggccgggctgcggctggcgctggcgccgccgcctacgccgccgccgccgcgctgcagcagcgcggcgtggagcgcccgcagctcgaccgccttggcgatggcggcctgcacgtcctgccgcgtcgcctgcaccggcggcgtcgacgtcgccgccgccgtgccgaacgcctcggctgcggcggccgccatggccatgtcaggcgagtcaaaggctgcttcgccttcgcttgccccaaggattcttggaacgcagagcgaggcaagcgagcacgggtgaggagaagcaatggagggggaaatgaacagtagattcttgagagagagagagtggttgttgcagaggagagtgacagattgagagagagattgaggaggtggagggaactgcacatttgaagagatttgccagtgcttgctgcaagcaaggccctcttttcttttgagcttttttttggctttcttttcttttcttttctttttgcttttagctgcattatgtagattcgctgctgctttgtgtatactttgcttgattggtaggagtaccacctcaaattcgggcctcctttgccaaaaatcttgtaaaggtgtattacatgctaccgaccaatgttaaagaaacagccgacaagttggtgattaaggttacgtttttttctgtttattcatcggcttcttgggacaaagattatcagaatctcgatccatatgctagtaccttacaatactactacgattctaccaaatcaaagcggtaccgatccacctagtatttgcattatgctttaaaaaaaatgttttctcgaaaactttcttctactgcagtgctgagtagtgaaatacacttgaaatagagttttatatttgcacaaatttccctccgaaatttttctacacatacaaacttctaacttttccatcacatcgttttaatttcaaccaaacttttaattttgaccgtgaactaaacacacctctatatctgcacaaatttcgagccattgtcactatttttcacctgtttatggctggtagttggaggtaggtcaaaaatctcaatgccaacactacctctatctgcaacaacccggccattaatggacatctctgttgcgatgccctgcaggctttcttgcttgcttgcttgccccgcggtggcggatttgctgtccaaccgaggcggcgacggcgcattaaattcccggccgtcgctctcctctccggcggcggcggccaccgcgatcgccgccggtgacacacgctgccgtgtcaggctaagctcgtgacaacattctggttggagctcggactgaacattttcttttctttttttatggttagctcagacacgagacagacattctgcttagctcagctagctatcacgcgcgacgcggacggaatactgataagcttttttttatcttttgaaagataaactattaaaaggttggacctttcgtcaggaatgcaacctggctttaactaccatttctaaaaagaatgaagcgtataagatgcagttgttgttgttattggtatttttttgggtagatgcagttgttgctgatgatccatttcctcaaaacttaaaatgtactctgaaatctctccatgtcagtataccataaagaattttacaaacattaaggtactatttttcttagtgtaaaatttagtatctttacataccttcttaagcgaatatacaacaaccagacaaatttgctaacatgatatagatgagagtagagagaaatgttgttataagattaatatgggcttaacaatgatttttattgtttataaaagaaaattgtgctgtgtaagagtagggaagaggaaagaatgtaataaaaaaatccgtatactaatagttagagcatttgttatctcaatcgttatatgatgataatctctaactgagttgtgctttaagagccacatcaggttctacatttgatcatgccctaatgggctgtgtacatccttttttgggtgtagaggccggtttaatccattatctaaaaaatttgatcatgccctaatggctttaaaaatcatagtatcctctggaacttatgaactgctgaagcagagacagagatttagatgttcctttttccttgattgtttttttaaggggaggatctcaaggagtctgtcattcttcgcattgttttgagcttagtgcaggattggtcaaaagttagctgtaaaaaggtttacaagatccaagttatacacctatcttgaatcttaaattaaaccctcagggaagtgtcaagcagagagcatactagatgtaaagctcaaggtcctagctgtacatatgtccaatccaaaaggcccaagaatcttatgccaggactcaagatatgttaagggggtaggttgatcattcttaactttatccatggaaatttctcaacaagtgatctgtgaaaggttttttgcaagagacaacacaaccaacaaaaaggtgatctatccattccttttctcctctttacacctttactgaattttcctttgtatcggagtgcttttccaatggcatctagctagatggatctttgcacattgagctcaccatggccatgcatacatgcatggaaggaacaagattggacgtctcattgtcaagttaaccacaggggctgcgtgctactaaagcctaaaaaggcactaaaccaaacactttgagcgtatcttatcttaaccttttacaaccccattgattgagtaagagctgattataaacttatcaacataataaaattatttgtgagtaaaccttctctatatatgtgttcttagcaattttaaagccaatgctggaaaaataaactacaatgaaaaaaaaaacttaaaatcaacttcaaaattattttcttttggcagtggcatatataaccttttatgtgaacccttctattgtcttgcatgcatctgatctgcaaatttttaaaaggagttttcagagcaagaaaacgaaaccaggcaggcaatacccccaaagaggcctttgtcttggcacaaagcaaggaacaaaatactccagctagggggcagtatgcgaagccaagggtagctgcagattgttgcagattgtatacctggaagggatggatgtctgtgtccatgatggtgtttgtttaatccaaaatggcatccagtgatgcccatccattatactagggatgtgtgagtccattttgtttgagggttattaatttattaatccattgtgattgattttacaaatcacaacaaaatagccttagaatccatttttgtccgggctgttgttcaggacaaggtggtgttaaggtcatttggaattcaccccttagtttaagtatgacaggtgcatgtgagctcctagtcctttctggctttctgtccactcttggttaggttaggttaattatctcttccctcttatccttcaatcatcggtcgttttgctaaaataaaagaaaaacatagtaacctttcctaatagcttatatgagcctgaatgcaataagaaaaatacaagtgcagaaactgatttagggcatatttggtttgctactatcttcaaccttaccaaattttaatactcctattgccaaattttttaccctgtttgaaacatattattcactggataattgccatgggttatctacatgtagagataaattaaacatttttataaacaaacttaacaaatagtttagaacaagtagtgtaagcaatgaaataaaatttatgagaaaacatactttagagatgcataattttcccttaacttattcacataactctgcacaaaaatctgataatgtatcaaaccaaactaacagagttattaagggggtgtttggnactctcaaaaacataagtccctcccaaacaccccctaattttggcatcaaactgaacacgcctttaatcgaacagaaaagcagtgtatctttcaggccagaagagtacagggaagcacaacttgtgagtgtttgctgctgcaaaagattgcagcgtgcacagtactaggggtgaaaacggagcggatattatccgatccgatccgctccgaatccgtccgaagtgaggatatggtaagggtctgtagatatccgtccggatgcggatgcggatgcggatagatgcatgcggatgcggatgcggatatggtatcggtaatatccggcggatacggattatccgctattttaaacggattatccgataaacgttttggcggataatccgaatttcacagcccatataaccactcaatttggcccatttgacatgagcattttcatcgtgtaaagattcagcccatccatgtccaccttatccatcaatctatccaggagttcagtccgtgactcaaacgacgtcgcgtcaaccaatttttttatcgagacttctcttctttcagtcctcccacgccgccacctgacgccctgacttacgtgtggaacttctatgtcttatgtgatactgttttttctaacaattgtgaaacttttatgtcttgcgtgttatgtgaatgcgatatatcgtgatgtcaatactgtatgtgtcgattacatgcttttggacagaagacaaatcaatgttaacaacttgacattatattatgatgtgattggtgctttcatgagtcatgtgaattgtgatattggtacctcattgttgctcattgcacagatgataagatgttatatcgattgtatatacatatcacatccgattattttcatccgtttccgagccgagtccgcaccgagtccgcatcatttccgacacccgaaataatccgttccgcatccgcatccgcacattatccgtaccgcctccgaatccgattaaaaaatatggtataggatatggtatgactactatccatccgaatccgatccgttttcacctctacacagtacaatggttgcatatataggactgacaaaagctacagccgcgagtgcgaagccaaagcaggtccaggagacagatataactgcattctgtgagaggcggacaagatcagcggcggtggcaccactgcacgacccggtcggtggccatgcaattgcagatgcaggtcaggtgcatttgcaattgcaacgcaaagaggtgtgtttggttggtgcagcttcttttccgcggcgcctttcgccgcctggtccagagagagagagactcccattgtttcccccattcagcatttgttgttaaattttgaatttagaagttaaaatttaaagttgatttttgattttttttttcatcaaattttattttttatcattagtatttaagtcgttaagaacacatatatgacagttttatctataaattattattattttgttaatacgtcgtatggtgtattatccgtattcggccaaacaatggtggcctaggaggatctgcacgagagcttctaacggttgttgtttcttttaaattaaaagctcacttaaatggtttaatttgtcactctagattttaacaagttgtagttatgggataaaaaataaactaaaaacaagaagttagttttttttcccttgcttctcctgattctccttctcgaaacctaaaattcctcacagacattatagatcatgtttaagtagctgaagattttgataagcaactagtaagaataccaaaataattttttttagcctcttccttttagtttataacctttagtatctgaatcaaaaccagactcttcgaaagagtagagagatttaggaagagttgtagctgtcaaaaactcttctaaacagggccacatgtgtgcagtggttcagggacagagatatcaggatgctgccgaaagacaaggtgccaaaagaattaatgctaatggctgtcttgacagtcctactgtccactgtggttaagctattacgcatggcagggcaggctttgaggctactgttactaatgggccctattatattgtttttttcttgttcatcttttcttcctctttctttgcaactgtagtaggagtacagtactccatttgtgcgtctcaagagaatggatgcccagtcagtgtcgttcttgggagttggaaacagtaagataagtgtactaggggctggtttggttttgctaccatgccaaaatattggcaatgccaaatcataggcaaaatttgatagtgccaaatgttttggcaacttatgtaccttataggcacattttgttagcaaaccaaacactagccaaactactatttaaaatgccaacaatttgatagggcacattttggcatcaaaccaaaatggccctagattagtaggagtataccagaacgtctttgcaatccttccaagggaatgaattggaatagtaagataatatgtgttgtgtaattagccggtaggttaggtccgagcttccaggatggtggtgtggtgtgagcacatcgtgctagcatgctaacagctaatgccactcattatgcaaggcccacaagtttaacctgagtaatactccctccgtcccaaaatataacaacttttaacccctagaatttatcttaaaatataatacttcatccctttcacaatgtaagttattctagcatttcccatattcatattgatgttaatgaatttagatagatatatatgtctagattcattaacatcaatatgaatgtggaaaatgatagaatgacttacattgtgaaaaggagagagtaacttctccaccaacattctcttcccaaccaatcgcaactctccaccattcatttttcccatctaccttcactactcatctaatcacaaccctttacaatttacatctacctactttcttaataaccgtgtccaactctaaaacttattatattctgatacgggggagtagatcattatgctcgagggtttttttcccctctgaatagatatgtcaatatctaataagtttcagacttcagacgacttattcattattggaagtaaaatctttgctgctgctcaacacagtagtctactgcttatgtagctcactactgtttgcagttgaacaatctgatacatgaaaataatgtcaaatctgacaggcagccataggggtgggcagaaaaaaaccgaaccgaaaagactgagaccgagaccgagaaattcggtcctaggtagtgaaagaccggattttgttcggtcaattcggttagtcccctcgggtaaccgaatagaccgaaaagaccgaattaccaaaaaaaatatctaaatgcaacatacaatccactatatttaataggattaatctctaattttcacatcctacttcttctaggcatgcaacctattaagagtctttactcataagtgcttacgaatttttttttgatttttgtgttgaaaatttctattgtttctttgcatatatgaaaatattgttgaatttcggtcaggactgagaccgagaccgagaccgaatttgtcggtcctgacattttttactgaaattcggtcttcacttttcaaagaccgaaaagaccgaagaccgagaccgaaattttcggttagaccgaatacccacccctagacagccataccccaagaccacaaaaaaggggggaaatgtactcactggcagacatacattgtacgctcaatttatgcataatagcatcgatggcattgccggtgtgtatacatgatgcagaggacagggatgtgacccccttctgtctaaaacagcattgatcacctcatgtagagaaacactgaaaataaccttactgataattgttgggaaaatgggaccccatctgcaaatgggttgtaataagcccacaggaattgaacatgaatcttgcaggagcaataaatccaaccctccaagctcaatgctcaagcatcagaggttaccagaaggtacatcgtcattgttacatttggtatagtagcaactacatgtttagtcataacaggggaagtaacaatgtacatctgcaatagtatggccacatccatgcaatagtggatgctaaatcaaaaggttctgtcaggttttccaaggtcccgtggtccggttctgctgtacaaagaccagaatgtgacgctatgaaccctttgaaggtacaacagttgaacgccaccaaaagctaacagagaaactaatagaaagagatctgacgtaatgccaccattttggtggaatgtaaagcaagtcaccctcctccaatatacagtccaagaaatcaagattttctacccgtgggaactccttcagatcaacgttgtcaagatctacctgcacaaacatttgagctgtgttgataaatgggcagttaggagaaactataggcagtgctaaaattatcatggggctagaacactctgtatcctcacatcgcacacaacagaattggacataatgcttttaaccaaataatctgagaaatggttatgactagcaggtaactgaaaaggttgacctagaaaatggaagtcaagcatatttattgtttcctaatttagctctttaaaatgctctgataagtagatccagcttgcaatttcatgcttaagagtaatcaagaagaggatactaacgctgagttcttttcagcaactcattggcaacttactcattttccgttagcacgcatccaaactgctaaacggtgtgtttcgtgcaaaagttttttatataaaagtttctttagaaaaatcaaacaaatccattttttaagtttgtaataattaatactcagtcaatcatgcgctaatcgcttgtctcatttcgggtcacatccaaaatttccgccaaactgcccaattgaatggcccaagaatgcaaatctttggctcacgatccatatatattaaatggtgatgacctgcaaatatatattttttccaaatatgtaaccaatcgaacggagttatgtacctgactggtgttacttagcatagtttctgtgtgtgggtacaagtcctcagatatggaagcaggatatagtctaatatacttccttcccaatacctatcaaggagaaagcaaagatattattaaccaataactgttgataaaagttaccaaaagaaactgctgagtactgatagttatgaactatgatagtactatgcaaacatctcaaatgggtcagccgtccaccatcaatggattaatgatgtgcagaaaggcatttgaatttgtcagctaaactcttaaatatgtatcagatcgctatttttttttggaaaaggagtatcagatggatttgaatgtttggacactcgaatcctttgcaccgcaaagtttcatttacaaagattgattcgctaatattagctttttcttgactgctccaatcaattaaacttatcagatgatcattgttgccaattttgaagaaccgtttcaattatttcaatcaattaaacttatcagattatcattgttgccaagtttgaagaactgtttcaattatatctacctggtagctgactacggaattctgagtagatttatgcatttagacattacatagatgacatgtcaatcagcacctaatcataacgtgatgagtaacatgatagcataaacagtgtgaacagttgaacttgctcatagaaaaaagagtatttactctagaaaaaattattgacaacagatccaaacggggaaaaaatatgaaaaggagtactcacactatacctgagctaaaatgttgtgatgtggatcatggtgcaatggtgtcactgtcccgtgtggaccaaaccatgcattaagtgactgaagctcccctccaccagcataacagtagtcaggaaccattatatcttcatggagctcttttatctgcaaatggcacaaaaaaaaaactgacaattgggcttatacttactagagaatccacaatgatagcatggttacctgttcaaacaagggatgctgagccagatatgtcaagtttgaaggacagccagctgaccacatcctctcaaggaactgagagaaagtgattagctcctgcttccactcactgcacacataattttttccaacctgacagatattcaattacattagtgctatataagtattcagaggtaggtcaatacaggaggaactttcatcataaaatgtcttcgagcaagcataattactcgatgcatgaaaaaggtaactacgggagaataaatgctgcatactaattggattagccatgtaattcagttgaataaatagcatttttgagacactaaattaatgggtaaatatgttacgacacaactattctactgtgatcaaatttcaggaaaatgttccatcacatagaagtcttgtgaataataataataatctatgtatgaaaagattgttcatgcaagagcgccgtagagttaatctagctgtacatgttaaacaatcacacaatcatataaaccaaatctttcggcaaaataagttcatacagaaagagcattgaacataatatgagtaagttaaaatactgaaccaaataccatggcaatatggcatcaaactgaaaccaacaaatatgaacggaacagcttaaaataggttcaatctacctactgttctgatcaccaaggcaaaagattagtgttccaacttgcaaccggaagaatacattgtaacacatttctcaaaattgcacctttgtacaagcaagttgagtcagagacaaatacaagatacaaaaataatctactgtaacttaatgttacttgcagacagctggccaagttcactaaatatcatattttgatgtatataggttgtttgttacaaataagtaataaaacttagcaccaaatttagatgcacttgtttattttacttcaattgaaaagggcataatattggcgctcgaatttgttactatgatcattaatgcactataaaaactataagcatcgaatagtttaaacaaagttaactaaacagaaatggcttgtttccatataatagtcttccagatctagtgtaaagagcaaaaggcatttacttcaacaggaacagttcgatctccagcaatcttcttcaggtattggatgtctttccactttgtccttgcaggccaatgatcgatgcttccactgattataacaggggactcgcgtaaaaagtaatcacatataaattcctccaaagaaatgcatgatcgcctctcaaccttcttacaagataaagactttgccggaagaatattaagtgcctggaaaaagtactgtcagtagtaatacaagatgagcagaaggtaatgattatgaatgcccttatccatacaacaaattcagaaaatgagtaagcgaagtggtaactagaatgaacggtacaaaccataaggagtaatctacaaatcttcactgatcattccagaaaaaaagatattcctacaatttatgagttgatatacggcagttcacccctaacagtttttcgccaccagtttgttccttagccggatctaactatatatgaaattatatagttgcagccatagttaattacgcatactgcaatgagctcctaaaaaattaagctaagttggaacccgcattgccgcagaaaagcgcgcaaaacaaacacggaatcctacaaaggcaacagcgatctcacatcggcgacgtctcgattcctctcgagcccttccctccacctccgggtctcctcgtcgacggcctccgcgtcgccgccgccgccggggtcggcgacgatgcgcgctatggcggcctcgaggtcggcgcggaggaggttcccccccatgatgaggcccatgtcgagcgccctgagcgcggcgcggcggtcggcggcggccgcccccagccgccggagccgcgcgacgtggaggcaggcgagcgcgtaggcgtccctccacgcggcgcccacctcgctccacggccccgagtggagctgctcccacgccatctcccgcgccgcctccgcggcgcggaggtcgccgcacgccgccttctccgccgacgccacgaacgcgaacccgccctcctcggttatctcccgcagcagcgccgccctccgcccctcctccgcctccgtcgccggcgccggcggctcgccgccggccatcggggtggaaagagaaaaaaaaaagcgcaaaaagcggaggagatatttttctggtcgtcgttgcttttgctccggatgcttcctcaacggggatatttgcttactccgtttggtatgctaatatcacgaaatgactttctaatttgggacagataatggttgggttcggcccatatgctttgggcccactagtagacaacatagcaatatatttgggccctgctgataggcctatgtttttggccccaatatatggtagggccatgtcagctggtaccaacagatcgttaatgggctaaaaaattgggccagtaatatatcgatcataatcggcccagaaaatttagattaaggcccaatttcaaacgcacacttgaatttcacattatttttcttatgagcttcacataattcagaacaaaaaaaaaatcaatgtttcttgcattcttttcagcttatggcccatgagttatatgcggataatttgtgtcgtgtttcaaaaaaaatacaatttattcaagaaccttttacattagcattaacaacatcattgtttcatttattcatttgcttatttgaatcacttattagcaaataaaagatccatttgtcagtaaaagttttatatacatatccttatcgactcaaaagcaaatacactaaagtaaactagggtgaaaaaacaaaaaaaaattcaaaattaaattctaaaatgcaaattttagcttataagcaagcaccaagcaatgagatcctaattgtttagataacttattctaaccaaaatatgttatatacttttataatcggttcaaatcatccatttcaaaatgcccccgactgctggatattcgtcggatcgaaggtttcaaaaacgaaaattaatcttgaaaaacctcacgttgcaaacgcggtttgatcgagggagcatgcacactcctacagattaaacgaattaacaacgactgcaggttgcgttttcatcaggaaaaagtttgattgagctgcatcaacacttgatgaaccagctgctgaggtaagatccgctaattcaagatcctatcgacagagatctcgatcgatcgaccaagcagtcaaacacgcctactttgtttacatcaaagggttaatgcccaaacacagtacacatcggttcatccatccatccatccatccattccatggggggtttcacagtcgtcgtcctctctcgatcgatcgcttaatttctgatctctcgatatctctaagctgctagctaagagctacggtgtttgcatgcgttgccggcggcggtgatctcaggtgtggggggcggcggagtgcggcggcggctggtggtcgtgaggcgggtgcctggggcgggtgacccagagggagctgagggtgcggaggcggtggaagtagtcggagacggcgagcagcgaccgcgccatctgcctcgtcgtcagcacctgctgcagccggtgcagcgtctgctgcctcaggttctcagcctgcatatatccagttaattaattacattagaattaaatctactaatcatgcacgagctatttagagtaagtataatagagcgctataagaagactgaatgctgagatagatgagagaggaaaggagagagagagatgagaaacgggactgtaagcttacagccgacttaggcaaaaaaaactaaaaaaatctatgagacagacaggtggactatatatctatagtgaagagctaaccactttataagtaagctgagatatagaccataaagatctatacagtaaacaactaaataactggttgtcttattagccttgctcttagcttgtcggaatgtctgatgctttgccaccgtcatgccaaaatcagcagctaatcatccagaagcacagttagttgaagactttggagtggagttggagttatatatggtaaaactattatatattcgtgcaatccacgatataaaagtaaaaataaatattggacgtttgtaaatttgtcactggttttttctaattttaaaaggatgccactcgaatgatagttttgcaaattcaactctaagattatattttagacgcggatgataagaaaacaaatagacgataagagactataggctggaactaaatcatttctattttcaaaaacaaaacatatattaattcatacttgcatctcaaatggatataagaagttatcctcctatatattttaattgtaaaaaaaaagcaacaactagttacacgcattgtaggaatattactttacacatacgtggacatcattaattagttggctgattaattatactaagcacaaacagtaaccaattaagcaagttgcaaagtgtgatatgaaatgaaatgtgtggtcgatctgtttgtggcatccatgagcaggtgaagggcggcctataaaaaccgagcagccaggcacatctacccaacatggaaagaccgatgaacaaactaacaattagtcaagcaataaaccctcataaattatacatgtttgtggtgtttgttacacagccttttcagggtttttatatcaaatccaacctctgctctctcccgtttctgggatggagacagtcgggtgcttttcaaaagctgaaaaacctaatccacatatgcttctctgtcgatcgatcgacacaacacctagctaggcgacagcaattatctaatttaatcatgaacatattcagtattgcagtgtcgatttcaattaggtgaactatccattgaaccttctcaactactaacaaatatatgtgatcttctcccattggctccagctctaactaatccatcgaagtgacaggagattaactaacaaataaactataataaagtcataaacatgtagtacaacccagttttattgttccgaataattaaatgaacagatggtatattatctgactattcttgagatactcgacgtacaaacgaatgaattaactattataaagttaaaatgtggcttttattaaaaaaaaattctaggcaatctatatataatttcttgaaaaaaaaatcgtattgttcagcagcttggaaagtgtagtgcgataatcaatactccctccgtcccacaatataagggattttgagtttttgtttgcaacgtttgaccactcgtcttattcaaattttttttgcaaatataaaaaacgaaaagttgtgcttaaagtactgtagataataaagtaagtcacaaataaaataaataataattccaaaaaaatttgaataagacgagtggtcaaacgttgcaagcaaaaacttaaaatccattatattataggacggagggagtaattaatctgtaagaggaggaagtacaaatgggcctacaactgatggaactgaagagaaaccaactaactgatgatgaagagtgcatgcaatgcatgactgaactgattgcaagaagggttggtaatttggtatggtttggttactgagctcgatcaaatcatgagagaagaagatgcagacagtgtgtgagaatcacgcaaggtagggtacctggcggacgaagccctcgagggtggagagcttgttgatggcgacggccatctggcccatgtagttggcgacgttggaagggcagctgagggcgtcggagacgacggtgtcggagagcgactggtagagcgcgtcgaggccctgcgtcagcgcctcctccgtctccagcgccgactgctgcagcccgtacacccccacgatctgctgctccgtcagcggctccacgtgcgccaccagcatctgcatcccctccaatccacattgatcacaattactacttattaatcaatccaatcacattaatcacatcacgaattcagtcatgcaatcgagcaaaaaagaagagaacaaatgcacacaaactgttgctctgtcagctagtgatcagatattcagatattcattcaggagttatagtatatgtcaatgcaggtactgtgatagcagctgatataacagttcagtatacgcgatcgatggagcagtttaattacactgaaaaacccagcacaattaatcgtaacagattcgaaacgaatgtaggtaaatcctgaatccgtaatggtttttgttggtttatcagtactgctacgtacgtacgtacagttctacaacatttggttggattcagttgtggcccggcttgaaaagctgaaatcccagtttcctgatctgattatgatcagatcgatcattcaatgcgtcgatatatcgatcgattcgatcgacgcatgcgcccacgcggtcgcgaagatggcggggaatgctcgcacgcgcgcgagcgcgacagatcgatgaagctagctatccatccactactcgttgtcgtcgtccagctctctccatggagggagagggtatgatgagcttgccgagcaagtgcacaacttctcctacccattgctggaaacgacaataacaaggtgtgtgttttggcttttgtcacatgaatattattcactgcctccgcgacccatataattaaggtgccaatgctgctaatactctctccgtttcgtattataaacaagtactaaactaaaatagggtttactatcgacattgtttttttttttaaaaaaaaagacattttcctttacagacggctaggatgcatttgcaaaagacggaatcgcccccctaacagaaggccaatgaaaattttcacatgtagaaaattatcacattccacaagcagttggcttaactcaaccacgtgtgcggccaccttaagtcagccatatatgaaactacgttttcgtatgcgatcaatgacacgacccttatggattgtcaatgcagtcggagggggcatcaatagaaatcattttttatatagtgaggctaagtattatatattttcaattttcttatcgaaattgttttcgataagttacttttttcatgttgatcaaaattagaaatgcgcaaacttttttcatgcgacatttttcttcatcactctgaagacccgagctagttaaggttgtttatgtaaattcttttattttcttttgagggactaatacgcaatataaaaatattcgaggggtttcaaagcataatccaaattattttttccccactttgttccgtttgtcttctacctcccgacgaagccattgtcaatcgctacgagcatctagggttagggttaatccaatccaagccaatccatggcggggggagtgcatagtagcgtaccttgatgacctcggaggggcggaagccgccgagccagaggaagcagcgctcggctgggctcatccagacgccggagatgaggtggaagacgtcgcccctgatggcgccgtccttgatggcggcgacctcgtcgtggtgcgccaggcagctctccacgtacacctgcagctccccctccggcagctgctgctgcagcgccgcccgcagctcgtacatcagccggtggtgctcctcctgccacctcccgtactccacgtcgaacatcgccgcctccgagctcagccccccgccgccgccgccgccgacgccatcgatcccgcccagcaggacccccttcccgctgcctccctcgccgatcagcccgccgctgccggggaagaacaccccctgcaccatgtatagatccgtacacattttcatccataatacataatccgaattggttgtgtttgatttgatttgggtgcagtttgaattttgctcgaatttgaaattatgaaattcgcctacctgggctctcgcggtgtgcagttcctgttcgagctgagcaagcctgatcctgctggactccagctgctggatgtaagcctgtcgtttcagtcaaaatttcagtaaagtaattaatccacagtggctgaattgaagaagagtggtagtaattaactagcaaaattaatttggtttaatttgatcaaatttgggtgattgcttttgttctgaatatattgaatatatatagcctgtcattttcttctttttctttctgtgtttaattactgtttaattttgcttcactcaccttcttccttagcctgcttttccttgctgcctccctgttctgggctagcctcctcagcgtctgcatatatttacattaatcacaaaatgatacgcaaaaaagtaagcatgatcagaccaaatcatttttagtattgtccttaactcaactgatatgcacaaaaagagaacaacaactaatctctaattatttcttgagaatatcactagtatagtacctttgggtcgcgttcaccagtagatacacccctcctgtgatccttctgcaataataaaaaaaaacataaacaatatgcacattaatgtaagctaaaacataaaaacaatcaaggacagtgttctgaatagattaatcagggtgttttctttagctagcagggttagatattagttggttaattaagtggttaagtgatgatgctgaccttggctgtcaccggcttcacatccctgttgatccctgcaggctcagcagcgaaaggttggtgctgcaggtggtggtgatcctgtctcctgctccctgtcgccaactcctccatggctgctgctgcttgctgctgatggtggtggtgatgatcaggtgacctcgccatcttggttcccacagctgctggggacagcactaaactaatctctccctgccaaatcaatcaatcaatcatcacatccacaaacattaaaccaatctttgatttcatatatactacacacgagtgctacattgaaaagacaaatgacataaccaatgtgagattcagatgaaagtaagtaaaattaattaaataccttgggtgatggctccacatgcatgggctgggaagggaagatgttgagggtctctgcatcatccatgagcacaacacaaatcaagagatcgatcgagcaaaagcagaagaccagctaaccctggagactcacacaccacaactcacaaactgatcgaattgctactgaaaactctactgaagaagagagctaggctgtatatatgcaggcatgcagctggaacaagacactactgtgctactgctgctgctgctcaaattcatcatgctttgcatggcagagagtagtgtgtactatatatgcatgctaggtacgtccaaagctagctatagctgcagtactgcaggcacacaggcaacacgagaaagctgggggctacgagagatacgggagccaaggacagatatcacacagctgcacagctagctgctgctacactgcaacactgatcactgtaacctgaagctggaaacaacagaagtggatagcatcgatcgggtcaaactcgaacaaatgtgcacatcttgctactactcctagctagtagcagcaacaagaacgatcagtagcatggggattgatcgatcatctcttcggcgtgtgtgtgtacgtccctctttctctgcaccaggccacatgcagatgcagctcgatctcggcgaaatcattgagcagtttgttacatgtcacagtccaaaccagccggccagatcttagcagtcagagatagagagagagagagagagggaagagagaggtatagctagagagattgttggtttcatatgcatggactttgggttgctgattccctggtcctgagatgtgtgatctccacaggagtgcagtggtagtagtagcagtagtagtactgcagagatttgttgcagctagcagatatcctggtcaaaatggagtacctgagaatctgctgcatgcaggccggccggccgtataccatgatcgtttctgatgaccccagaaaaaggatgcaactttctgcaaccataggaatatatccctcctcctcctatactacagcctactgctactccctgtgtatgcttggcacatttgtttctgtgcctaagctatatatactgctgttattatgctattattactactaatgctaaatgccaaaagaagaacaactgaaaactgttactactgatctcatcacctgcattaatactctttgaaaaaaaaaatctgaactttttgcaaggaaatatatatggtgaatgcatgtttgagaaaatttgtggtgatttttcggttggcgaattaaaatttacgggtttttttcgtatacgtacgcctttgttcttggtgcgacgccgcatggctgccatgatccaggtacatgaacaaggcctggtccagctcccccagatgatcataagctcctgcagatgcctccttgctgctcctggtggtgcaacacaagaagcaaaattaggagcagcacaagaagcaaaattgttggtgatgaggtatagctatatgtatgtgtgagatagatgcaggtagtatagtagcatgcatgcacaaggttgaggaagtagtgaaggcatcacacatcatcatgaaatcatgcttctataagccaattatgtatgatgctatattaattatttgtctggtccaacctctgcaagactgcaagagtaggagcagaagaataatatgaatctactctacctttgtagcatttattttggcacagcccagaaaataagcatggccatgtactctccaaatttcatgtgtgcaagtcatgctcactgtaaattaaatgtaaaaacttgggcagatatgtatgatcagttggtcataaatatgtcttaggtaatgctcttgtacttatgcggaaatgaatcgctgacctcccaaaatttgaaagaaagactagcgagttgttgcaacaattcaactatatctggctccagatattaaatcacaagtactgaatttttaaatctgaacttgtttgatcatcgtctaactttttttttcttggggggagaggaagaaggaagagaaaaggaccgatctgtttgcatccgctcaaacaatcactgaattcccaaccaggaagcaaaaaggcaaaatcgtctgcatgtaaaatgcaaaattctagcaaaaaaagaagcaaaatcttcaacatgtagaacagtagaatgcaaaattcagtccacaagaagattattggtaacctagtttctccatggctagtgttttgttaaaagaggaggaggaggagaagaggaaattaaagcagtttccataaaaagaagaaggagaagaagaagaggaaaccatggcaaaaaagagatcagaagaaccagcagaaacaaagagagcaagcaagaaaaaagaaccaaaccaaaacaaaccatgcatgatcatgactaacaaatcagagatcaaaatcaaactccaagacacggcccaaatcaagaacaagaaagagacacacatatatatgcatcaaacaaatcagagagagagagagagagggagagagattcagtaaacaaagccgtacatgaagcttgcggcagcggcatgcatggaggaagaggaagacgatgacggaggcggatgatgatggtgctgctgctgatgctgtccgtagtgatggtggccatggttcatcatcatcccaaaggagatgttcatctcctgctgctgacgatgctccctctcctgctggctctcgctcccgctcatcatcgatcgatcaaatcaaagctaacctcttcagaatcgagaggaggaagaagagaagaagaagaacacacgccgaaacatacacagagaaggcaaggtagcaagctatatacgtatgcgtatgtgcctctatctatctatagccatagctgcaaggtcctaaatactctttgactctatgaggctagcagccaaggcgccacctctctctctctcactcactttctctcttcctcttccacaccagcaactaccccatgcatgacctctagctctatctaggactctagttcgtgatggcgccttggacactagcaccacttgcaaactaccctctcttactgctttgatgatgctgttcctgggctgctactgctttgatttcctcttaattcactaatatggttgctgatgatgatgatcttggctatgtgtttctagagagagaggtgagtgggagagccattaatggcgaaacagactttctgtttggctccatgctccctctgcatctaatggtatactgctacaaacagccgacttcttctcttctctcctctcctctcaattttctctctctagattgagagagaagtagagagagagatggaggggcaggtgaagcagaagacgtcgccacctttaatttttctgccacttttgcaccgaagcactcgtggtttctcttattctcgtttcaattcaaaccccggccggtgacaaattgcattagccattaatttagccactgtattttgttaactaaaaactgaactgttattacgatttgagatgccggtagagttgtgcagttgtgcatgcatgcaccaattaacgatttgagatgtgatcctttcaacttgtctttgtctctgttttgactttcggtagaaaccgatattgatgtgttcactcccaacagcaaagtcagtagtacgtactaccatgaaaaaagttggtcagagccacccaaagattgcgagagagaatttttctatgagagtgagctagaaaaagtaagcaatgccttgtgccaaaaagcccaggcctcttctaaaagtaaagtgagttcaaactgcccgtttgtctcacggcctcgatcgtgtcgatatgatgttgtagagattaattgatactatctttgatttttaaatataagtcgttttagccttatgataagaattgagaaaacaatacaaacgactttattgtgcttcatttatactgcggggaaaaaatagcgtgtttatttgtgagcgaggtaggtagcatttatttagcaatgacgggtagggaagaaagaccgaaaaagtgtcttgaagttccaaaaggacttgtatttaataatacattgagaagtttaaaatgatttagaatcagagagagtattaacttgaaaatttgcaaaatgtcatgtgaatcagtttaattcccatagaactccatgaaactttgtacccatgatttcaaagaggagaagaactagataggtgtggtgtaaaaaggtaacgtaggtagcatgatcgaacagaagcatgcgacgaacaaagaaccacccgccttcctagccatggtccccaaaaaaatatacatatagtttaattctaaacggaagaaagatctaagaaaacaacacaaatgattttatcgtgcttcatttatacatggaaaatgattcatttacttacgagtgaggtagcatttatttagcaatgacaaccagggaagaaataccaaaatagtgactataaattccaaaataactcatatttaagaaaacattgagaagtctagaatgatttagaatatgagggaatattgacgtaaaaattttacaaaactaagtgtgtgaatcagttcaattctcgttgaattccactacccataattccaaagaggagaagatcagctagacagctagacaggtgtggtgtaaaaaggtaatgtaggtagcacgatcaaactagagtaggagaggacaaataaccgtccacatgcctagctatggaaaaaaatatttctagtttaattctgaacggaagaagtgaatcgttttagccttgtgcggaacaagtaaaaaaacaacatgaatgacattattgcacttcatttatactacatggaggaaataactcaattatttacaagttaggtagtaagcgtttgtttagcaatatcaaacaggaaaaaagaagaccgcaaaaatgactagaggttttaggacgacttagatttaggaaaatattaaaaatgctataaaataacttgaaaatctgacaaaagcctataacattaaagaaagtacaaaatgtcacgtggatcagctcaactcccgtaaaacttcctacatatgacaaattgggaaggaaaacgttgagcaagcatgctataacttgaaatcagagggagtataacataaaaactttacaggatatctaggttttaattctcctgaaaattctgcaaaattatactttccgcctatgattagtgtggtgtaaaaaggtaagagtttggtttggtagtataggtaggttggtcgagcgaagtggaggatcgcgcgggcgacgacaaaagaaccgcccgctcgctcgcgctggctgtgggcatggtccaagattgagagccgcgcctgggatcagacgcacaagagacgcagaagaattattcgccgagtatgtgaatgctcctgttgctgccctcgaggcacgtataccgtccccaactcccaaaatcatcagtctgttgaatgaatgaaaatgaatgaatggccatcgccttacgtggccgctatctccccatcctccgatccaatgcatctttgcttaatttgcgttgcattatcccccgaattctcggcaaatttctcttcatcatctccagtttctgtttgttttattatctcgatcatcataatacaggtagtagtagtttgttatagtacatctatcatcttgaaatcacaacacttgtagtcctactagcaattatttttacgtgaaaaacataattaaaaaaaaccacctgcgccgataaacaatgatcattgagttgtctggcttaacaaaaatatataaagagacaagatagaatcctaaagtcctactagcaaactaacctgaatatattgcatgttaaaattcaaatcacatttatatttaacagtacgtttgttgaaattggttcaattctcgttgaattcctttgttgcaacggacccaattgaattggtgcacacgttacaaaaaaactggcctgaattcttggaggaacaggggagaaaagtttcgactgaccgacttaaattgttcgttcactggacgcattaactttgaagtgaatgtgctagcgagtgactggcaggaggatcgtcgatcggaccaggaggaccggaccgagggagttctgacatcttggaaattgcagtctcgagatggtaactcgatcagttcagcagcctcatggcttgtaaaaattcttcgtcttctcgtgtactagaaaaaaaagattgttccttttgagactttgaaaatacagttgctgctgctcatgtcatctggagacttgcagcctgtggtaggacgctcctggaaattgcagcatgagttgtgacccagtttagcgaagccgtcaacctttgcctgatgacgacgaaacaggaactccgtcagctcctagctaaagaaaacacagggtcagattatctcacgagattattaatttattatcattcgtttatgacaattcatattctaggaaaaaactcagcatatattattatgtacaaacggccggaagcagattcttttctattatataacgctcgtttcagctacaaaatatggtcaagacgacagtgaaaataaatgaaaatgcaaacgtccatgagttatttctttacctaatgtgctagaagagaaaaggtagagcaattgctaaaagactcaccttgacagcataggtgaagaggagtaagagcaggtacgatagcaggctataagccagctataaatatattttaaagagataaaggaagagagagaaaagcggcgggctacagatctgtagccagctgcagcacgaattctaagatgtaatgtgtgtatgatagatgggactaggtattaatagtatagtaagcaactattgtatgaattgactattacattagttatagataatttggagctagtagtgggctatactattaaacttgccctaataaaagattagtactctaggggtagtagaaaggacttacggagtacacttctctccatgcgtaaagagtacttgcatccaaaaggagaatctccggtagaagtcaaaactgttactgcctgacatcccgtttcgcaagtcgatattctactcaacagagcttttcactgatccagtcgttctgaattctgaacatatgctccagcgggtagcaggtctgccatgtgatgggaggcatggagctgcagctgctgctgcaaaaggattaggatcagaggacccacaatagttggcccctgctattttgtgcacaagaacagcaatcaaataagggaacaagaagtcaagaacaacattgtctctccaagccaagaggtatgaatcttgtgtctttaacgcaaaaggaatcaaacaaaatcatcctaaaaacacacgaacagaaaagaacaacaaacgagaggcagcaacaacattccagcatggactgaacagcaatggcaaagctcaaacaaccaaccaaacaatgcaaatcactgcgatgtcaaaacaaaaatgcagatgacagataacagcaatgggaaatgattatgcaaaaacagaacccgctccatgatgagatgaatgtgttacatgaagctctgcacaattagaagtcatatggcaaactttgtaaaagtactgctgacattgacagtaacaaaaattagtatttcacgaacataactgccccaatgcgatcaaagaaaaatcccttcactttgacctttccctaattcatgcattacaaacatgtcgcaagtcaatgacaatctcaatccattatcaattcgaattttttgaaaataaaaatagcagcagccattcattgcttggattgatctctacttttatcattgaaaagaaaatagtatgtcaacttttaacatttgaaactatgttggctgttatgcatacaaagcttttcttcgtgaaatatttatcaagaccatttcaagttcacatgctactcccaactcacatgcttctcaaggatacataagctacagctcgcagatcttggatgcatgcatagtcacatagatgcactgtggtgagaaaacttacggatagcctctagataagaataatcaagcatagaagatacatggtgcaagggatccaagatgcatggtttaggaaaagaaaattgtactggaagcaatttctactttccaagaaattgtgctgggtcataagtaagcagctcccaaaattaaagcatctcataaaaataagcaatcatgatgatatagttactatcaatgctgcaagaacctagtaacattctacatgctcatggcatttgggcagaacaggttctttcatataatagtcaaaactcaaagattatactttcataataagagcatcagttcaggaccaactctagccatagattgatgggtttcttcgcccaattaaacatcatgtaaccacatgcagcactgtgcttagctgaagttattagtattaataaaattaagataaaacttatgcttcccagtgtttagccataagcaccagaacatttccttaacattagttgtttttagttttttaggtaagagaactacagaagacactccatggctcttattcagcgtataaacgctttcttggacttctttttttttttaaaaaaaaagcaagcaggattgcaaacagattctacaaattggaaaatgtaccagtcatacaaaatgtccagcaggacaagctatcatagtatcatacagatttaagggttattttcttttagggaatgcacaaagacttgtctatcatcacatcaagcctgggtactgatgttcaattacatcgatctaacttcacagctgcatgagaccaccaaaagtaactatgccatattgccatgtatgatgtatcgttgcatcaagggttcttttctctcagctatctccaaaaataactatgccaattgccaagtagcacaaggggacagaggaggatagtgttggtgtgatttagtagcagcccccattgccacctggtagatagtgccattacattagagtatcctaaaattttatatgcacttatagaattgcttcacttttgtaactattagaaaatggcactggcaaagagcttttgatctgctacaacagttctctacttcattgtaattgaacatatggacagatcggatacaggaggttcctatcaactgatgatttttcatttattagtcgcatataaaatgttgaggtgaattctcaatgtttctgtagaatgcataaggggagagagtgagagaaagcaggagaccaaaactttcatttctcgcaggctaaaaaaattacaaaaactatgttcattcttcactagatatctttcttcagaaaaggccatatttcaaacttaaatcatatacacctttcccatttacaattcggtcatcatttgatatatcatttccaaagaatgcaagtcaggtataatttgccatgctagaaacggtatcaactaacaagattgatatttgatggcaaaataagaagtatagccttccatactcaagttacgatggtaatcctactgacaaaatgggcgacagaaacaaatgcaaggaggcattggagcctaacctgaaaaggagaaatgaaaaaaatggtcaaagaggaagcaacatcgaataaatggatatgtttaatgaatttacctatgttatgttcccaagtattccattagatcatcatcatgcagcagcaaatcatcaatatctgggattgggctactgatactgatatagtctaaaggtaatcccgcaaaggaactgccagcaaacttatcttgttcgccatagaaagggtaatcaatgagctgcatatctccaggaacagaagtagaattcccactaccaattatttgatcactataaggactgttgtcagctggtgttctgatacccaagggaaccacatgatgctccatgatagatagtggaagtggttgcttaggaggtatggtctggtaactactaggcatattgttaaagcctgaatcagaatcctgtgggaagatatttccagtttttggcctggaattgtcactgctttcataaggtacagcctggcctctcatgcatatgcttacaggagtagcaattgttgcctgcgcattgccatagtgattaaaatcggcaggaagatgggccagttcttgagtatttcctctgtgttgcaaagcttcactcgtattagcttcctcattgaagcttgtaatctggttagccatgccttggatttctacctggtccagtcggttcatatctggaatcatattccttgaatgttctgatgcgtcatcagctctttgtacctcctgctcaattacggtgacactgtggcgtggtctttttctctttggtggttcttttgttcctgccttcttaggaacaacctgattagggcgtttgactttagctctttctctccttgttggggcatgctcctcgctcaactgtgcagccggagaaagatcttgttcatcatctccagatgatgttgaaaggggagcctcctcaaaaccatcaacatcatactcattactgctgctgtgtgtgtccccatttctgtactccagagcaccgtggtgagtaacctctgacatgccattgtcaatgctgagaacaagcctttcctctctctgtagaacacccaaccaaatcaggctctcttttgcagtcatcttatcctgcaagcattttgatttcctaacatggtttctgatcttatcgaagtttggggacatgtgcttgatcacacctgtaagcaccccaaccttccagaccttcttaagatcatgtggctttttatacggaggaatttgccccctcggaaggcccaacgcaatccaccaatcctcgttccctgaaggccaccacgggggtggagtgcccctctccaatgggtacttgcgctgcggtggatcacagtgctgcatcaatgacgaaagcagtgaaccgagagtggcgtcttggagatccatcaagctgtgctggctcttgatcccgctgctcggagcatcagccgacgccaagttctccgactcatactttgcgattgccgccggcccgttcttatcaaacttcaccttctccttccaccaagctctaatattgtcggaagcgccgctcacgggcttccctttatcagggatgatcccgtaaacgaacccgcgcgcgttgcacacctccatcagcttgagcatgtacttgaggatcccgtcctgcgccctcgacatcttcttgcgcatggcctgatcggatatcggcttccccttggacttgtccagctcagcctgctgcagcgcaagggcgagcctgtcctgcctctccttgatcctcctcagcttgatcctgtctttccacatccgccgggccagatcctcggcctcaatctcctcgtcgctgacatcattctccgtcagattctggatgccctccacctcgaagtccgacgaatcccccaactccgtcgcaatgatagccagatgatccatcacaacaccacaaactagggatttcccacaacccgatcacatccaactccactcccccccaaccctctcctcgtcagcaatccgcccaccgaaatcctagcgagaattcatacctcccggtgccaatcgggagcgagtcagcaccaatccgaatccgcgaaacaagccctgcaaaaggcgaagaccaatacaggattaacgccaccaaaaaaccaaaaccccatccatccaccccgactcatccaggaacaccgaaacaacgaacagaaatcggaggaatcagcagggcgggcgcgtacttgggcagcagcggatgggattgtgcgcggcgcggcgcgaggcgaatgcgacggcgaaagagagagaagaaatcgctgtgctcccctcctccctcgaatcgaagcgaatcaatctgttcgggggaatggggaattttatttatttttttaattttttttgcccagtggaggtggaaaagattcgcttctcttccgtgtttccctttttttagaaaaaataaaaggggaaagggaaaggaaacacgagggaggctagcgctgaggaggaagggagcaggggtagggaaggaaagaaagaaaggctcgcagatcccatttgctccggtccactctgtgcacagccctgtgttgtctaggactacctccgtctcaaaataagtgcggtcatggaaatctgttttcaacatttgaccgttcgtcttatttgaaaaatttatgaaatttttttaaaaaaatagtcacacataaagtattattcatgttttattatctaatagcaataaaaatagtaatcataaaaaaaattcaaataagacaaacgatcaaacgttggagatgaatagtgtaaaactgcacttattttaggacggagggagtaagttggagttgggaactctcctccaaacatgtaaaacggagctatccattagtaagaattaattatttttttaaaaaaataaatcaatatgatttttaaagaaacttttgtatatttttttatgcaaaatcatgctatttagcaatttggtaagcatgtgtacggaaaacgaggaaagtgagttgggaaagctaattctatataccactttaaatgatgttacacgtaaatgatccagaattactaattttagaaattgtaaagggttacgtacaaaaccttcaaattcaccttctaccaacaaatgaattataagagtctccaatcttgtatgatccgaccgtatgactcgtgaacatagtcggagaggataaaacgaggtgatctagaagcattttttcagtgtggctgcccttggagatgacattatatgcttaatcatctaaccatgctataaacttgttttttttttgcttttgcttttatttctcaaaatatactccctccattccaaattaatctgcatatatatttttttaagttattcctaaatgatctacatatttgcgttcattcattaggactattcgttatttgtacattggagtaaatagatattgatgcatgcatccatgcacacaagcatttataacccacatgcaatatcttgatttgctattggctagaaaatagtggggatggtgtatgcattgagtttgttgctagagtaaatatagtatgagagagttattagcttttcttggtcttggtatacctatgaaatatgcagatagggagtatgttgcaacacacaggttttagctagttttttgaaaaaaaaaatgttggagtgtgtgtcatttcacataaatttcatttatcaagttaatttataatagatgatagctgggttagaatatgtattttttaccaactacttgtcgtaagttacagttaaaatagttaagctgtttagaaagatgcgaagatttgttcgtgattttcaaatatagtggttttctcattgttgttagaatataatatactccctctgtgtcaagataaatcaacttttgtcctaaatctagacattaacgtagagagttaatttatttttttatgggagtatcattttttattacacaaaagacgcacactactcccacatccacgagtgtgtctcctaaaacacgctcaaatttagccgcggccgtagcaccactataacccatttgttgcttcattttgcgtgtaaagggagggttcccaacccttccaaaacaacacagcccgtataactcagccaacccaacagtcacagaaatgtgaaacctcttcctctccacaaaggatcccgatctcaaggggtcagccatgatgcatcaatgttcactggacacccccaagcttgtgtttgtgtacgttccttccttgagtgacttttcctgcttccgtagagccgttttccagcgtcaacccatgctcggaatctcggattctcgctcggctacgaccactccccatcccggagaccgcccgtctcaaccaccccaccctctcatcgattccatcctttctacggcggtggcggcggcggcggcgcgcggcgctgcgaacggtgagcgtcaggcattcgtcgtcttgaccatgaaacttgaaagacctcgtggttgtactctggcagaggcgtcgtcagacgtgtcatcgtcaagtggctataaaaactaacactacttaagtttgaggtcaaatagattcagagccacacgtttcttaaggatcaaggagtttgatttagcaaaacaaaaaataagattaagcaaagttatacaagtaacacaaacttgcagggtatggataagatagtagccctactggtagtattctaggagtactgctggtagcagcttgtttgttcgtgcatggcacctttggtggtttttttttggccatttgctaaggttcactgaaagggcagattcattgaacgtggaccccctcgttaggtgccgaggaagccgtccagattcactgtacccagcagcgggcctctcatgggccttgtccatcaatctgggccgagagccaattcaggccggaacacaacaagagcagtagtagaaaagtaataagttcaggttaggtcccttgaattatcaccgagttcgactttggtcctcgaaccacaataccacgtacaacaacgagggggcagtccctcaacttgcaaaacctgtacccgagattctaaacagtatagtgtccagttttaactaacatgactaggtgggtctcacatgtcaggcatatttctcgtcctctccaacctcctgccattgctaactaaaattataaatctctcctttttagttttagtagagttgttggtattttttggatgtatccatcctaatcaacaagcaggaggtctcttctctgatttaatttgctagcccatcagatatggggtgcttcgcgttcaagagcggcaacaggagcaaaggccaagaacgcgcggacgccggtggcggcggccgcgtcgtcctcgcgcgccgtcaagcgccttaaccagcgcagcctgcaggtcagtatggttttgcatttactcctctcaaaaaattgccatggtgcttttgatttgagctagatttgtcaaaaccataccgaatttgttcatcagaatgatcgaattacaggcgatacttcggcaaaaaatgaacttgcagattttgtcttttgagcctgtgcactgaccacatgtctgcatattttcagagtaccaaaaagaaataggcctaatatgtggggctcactcgtcacataagctaaaaccaagcattatactgtttgggatctcggctacaacagttttataagttgagagacacgttatatctggcattgtgtttgggggatgaaattcgaactcaacaactagataaaggacgtaaagtgaacttattccagtggaaaacgagatgaaacaaagagacgagaatttgttttattttcctccagatcgacgaacaaacaaccgaaacgaattccaattggtaaatcaaatagctcaagcaacaatgagctttatcccctccccctcactcaacaatggcaacggtggtcaagcatgtacagtacatcaattcaccaatcactctgaaactgaaaatcgcacagagagctagcttagcttagctagaaccattagctcactcagtacttcttccgcttgaggaagttggcgatccagtagctggactgcttgtggtagcgcttgagattgttgaggcggtcgatgtagatgaggccgaatcggtcgaggtatccgtcgccccactcgaagcagtccatgaacgtccaggtgaagtagcccttcacgttcaccccgttcttgatggcgtggttgacgaactgcaggtgtttcgagtggaactcgatcctatgcccgtccttgagcgcctccgtgattggcaagctcttgttgttcccctcggcgattcctgcaatcacacatgaaagtcatcttgcaggatgtcgatcccctcgttttttttttcatttccatgttatccaaatagttgtgaaaaagttttggagaaaaaaaatgagaatgtagttcaaatgtatcagcccacaaaacatgcaacttcaagttcaaattaatctatataaagagtgtactacttatctatactcctttaaaagaccctaatgataatggtgagtggtgaatctgccaccacccaccaccactaccatatgggtcccctaaatactgagataggtggacttttatcccttccttggccagaagccatcaaacaaggaaaacttattttaaagtgagatacaaaattatgaaaaacataatgtggaatgatttataatggggataattttattttaatatttgtggttttaaagccgtatattaattcctgttgcaatgcacaagcattcagctagtatatcaaaaagaagttaaagccattacaatgagaaagttatttaattgggaagtgcggcggtataaatcctaatgctcatgaatattatgcatacatgagtacattttcaataggaatttagtggagcttaggataagctattagtccctgtctatttgagcgtatgctagaagtgtgcgtactcgtgggtgagtgtagtgcacgtatttatctcgtgtgtaatgaaaacaaagatggttatttaattaccattttctgtgacgtagatgatcgggttgttgtacctcctcttggtgtagaggagtagctcgcggagacccggagggtagttgaagaagatcggggtgaactcctgccaaaatgttggaagaaattaatcagccgtggattgatggattgatcgatcggtctcaagaaaatcaagaacatgatgttgtgttcatgcgttggtgttgaggaggagtcgatctatgtacgtacctgcggaccaatgggtttgccgttgcggaagccagtggtgttggcgcggatgtcggtgtcgtaggagagcctgtttgagctgggcagcggcacgctcttggcgtagtaggtggtgtagtagttgacgccgatgaagtcataggatcccctcaccgctgccgcctgctccgccgtgaacgccggcagccgcgccccgagccaccccctcatcgtgcctgggtagtcgccgtgcacgatggggtccaggaaccatccgtacatgaagtcgaggctgcgttgcacaacgcggcggtcagcggccgtgtcattatacggcacgaaccagtgcgacaccgccgtgatgccgatctgcccgtgctgcgtgggttggtacttggtgcggtagaggtggacggcggtggcatgggcgaggatgacgtggtgcgctgctaggtaaggctcgcggctggagtcgccgccggcacaggaggtggagacgtagggggagcaccggcccaaggcgtggatgccggtgccgtagccctgggagcagtaggtccatggctcgttgaaggtggcccagaacttgacacggtcgccgaactcccggaagcacacttcggcgaagtccacataatccttgctgaaaatattgacaatccaaatctctaatatgagtatttttttaagataatggtaatggtttacatctccggtgtctttcgacaggcacacagccaaatttgcataatcgacaaattttaatgtgagtcattgatgaattctagccaaatttgcagaaccgacaagcaatttattttgattcagatgaccaaattacctaccctgttctatctaactggtttttcttttgaaacttaggtgaatggcctaactttaatcaacctcatcatcagcttaacaagttgagtgattttaacaggtttatggattttctttgtctctatctaaaaaacttacatgatattctcactcaggaatcctccgtatttgctctcaagggcctgtggtgtgtcccagtggaagattgtgacaaatggcttcatccctgttatgaaaattttgtaattaattcaaagtttactacttaaaaataccaaaaaaatatttataattttgtagtaacagtaacacatgattgtaaataggacataactgaaaaaatttactcacctttggctatgatttcattgatcaggttgttatagaaagctactccttccttgttcacccctccactcaatgttccatctgcattcaacaggcatttacaaaggaaaatttcacggtcaaaaaactgaaatgcaactgaatgcgctgatacgatctaggaaatataatgcccattctcaaatacttcctctgatcataattatttgacgttctggacagccatatactaagttcaagtcatcttaactgtctaaaacgtcaactaattcagtccggagatggtagaattaacttcactcacttggcaggatccggctccaagaaatggaaaaccggaaggcgtccatgttcatgtctttgagaaggtttacatcctcctgcattttcaaggttcaacaaaagaaatgaatgatcagttcaagaagattcctgtccaagataaactttttattcggtccatcaagtcatgaaaacatttattttttgacatacaacaagtcaaagattaaaaccttgagttaatatctttttaaataattagactgacacatggaaatcatatgggtaaaatctcatagtaaaatcaggtttttataatgtgctcacttcggtcaaatttatttgacgttgggagaactgagtttagttcttccaatgtcaaatattttttttactagaggctggagtatactataacaaaaattagtcattaaaattgcattccaaagactgcgattttttggggaaattactgtagaaaaggcttctacagtgtgtaaatatatattccaaagactgcgttaataccgaacaatgtgtttccttgaatgcatttcaagagcaagaactcctgctttacttaaaagaaaaactagaatctaccttgtagcgatgatagaagtcatctgccacatcgccggtgtcaccatttaagatttttcctgcaggcatgaaaatagtttcccttaatcacctattttaaattttacatgccagctatatatataatagtgggaggttaacacttaataataataataacctgggatgtgcgagaaagtgtcccacacgctaggacgctaggacccctacctccttccttagcagctccctcatactgcaagtaattaagcaatgcaaggatacatctctgaatttgttcaggaactaaccaagaaccatgtgcattgcacttgattcaaaccattcttgcagatgtaagagttttggacaaatttatctctgtatggatcacctgatacgctgcagagccggtgccgaagatgaaatccttggggaagctgtacctgttgaacgatgcatcaacaccgctgcagagtacagcaacgaaaacaagaacaggaacaatctgccttcccattccgattccgagccaggccatctcgaaactggaactgatcaagccaagcagcttagctgggcagtggctctgcaggaagcataattcagaagggtatttatagagaagagttggcgatgcagataaacggatcagatcataggccagcagatgtgttggcgttgcttccctgattggcaattctcactattccgagatcgagttcctcaagactttcgagaagagatatcgtattatatttgattttaaccggttgaatttgtcatctacagtagcaagaagacgttgaaattgatttgtttagttcagcatgaggggcacgagagggcaactgctcaaggcttgagacatgtaagtacagtttttttttatatatatagaatgtatatatgatagcggctgatttcgttctcattcttctgaagaggacgcaccacctataatttttagttaaagtattttgtgattggtacgaatggtgtataaatatataatgtacgttgcaataaaaggaatagttgctataacgacttacgcacgacgatcgcctagttgctataactggaaatgtattttcaacaccgcaattaattctcttcacatgtaatggcgtgccgctggttacaactgacctctgtacttgtaaacctcttcaaatggcaatggaaatttagttgggaaacctctcccctctggtctctggtgattattaaaaaaaaatagttgtattgattataatataagtacacactatacttatattataatcaatacaactattcctttttttatatctcacttggatactaataatatacctcctatgtggattaagggagagacatttgatccttacacgtaaggtaatgatataaaaccgacatcacagtcgtcatctatatacaaacatggaaaacactataagatcaagattcattctagataagtcatttaaaggcacgatatttttgataaattttcatgaggtggatttattgcgcgcatgttcgcgctcgaaatcgctaatagacgatcagtcgcgcggggcgtgcgactggacacgtgtcatgcgtggagaggggggcgtgggcggcgtgcagtttctttccttttttttttgtttttttcgcacggtttctaggcggcacgcggtttcttttttttttctctttttatacgcgcggtttctttttttttttttcttttcttctttcagtatcgttactttttttttggcgcatggctttttttctgtttttttttctttccgtatttttttgtttttcggtttttttaatacaaacatatacaaattttgtatatgcgtatataaattttgtatacgtatacaaaatttgtatacgtgtatataaacttcgtatatgtgtacttttttatatatagatgtacaaactttgtatatatatacgtatataaagttggtatattttgtatgcatacatatataaactttatatacatcgtatacaaactttgtatatgccatatacatacattatacatgtgtatatacatattagaatatctacttatatatactacttaaaaagtttaagatgtttccttcctctgttaataaattttttttaaaaaagtccgattgtaattaaaaaaagcccggggcgaaaaaaaaagtgcggcaaaaaaaaactgaccgattcctatccttacttaaaaaagcggaacaaaaaggtgcggcaaaaaacgattgtaaaaaggaagcccggcacggccaaaaaaaaaatttgtccgtttcctttttttttccttttccaattttattttattttcaccgcttttttctttcaccgtttttccgggctttttcgtccgttttctttttttttcgttttattttctttgcgccgttttttctttcaccgtttttctggtttcgctattttttttctgtttttccattgggccgaatcctagcgccgccaccatatcgatttgcatttttatgtgtttcctcatccaattgattgcaaaaaccgattctccactactctcttatcattttccccttgaatttctcttccagttcgtcattttttttccaagttttacggattgctttgattttggtaaaaaacgaaaaagggaatcgagtggatcaaaatctctcaacaattttggagatcgagaaagattcgaccgcatttgacggagaggatcgactccaccatcgtacagacacggtactatgcgagctcgaccagattaccggatttgatgggtggatcggctccgtcatggtacgggcacgagttgacggagaggatcgaatccaccatcgtacggacacggtactatgcgagctcgaccagattactggatttgatgggtggattggctccgtcatggcacgggcatgagactgttcgagctaggcctacagttgcacttgtgggctaagccgaagagaggtaggccaggcacaggactgttcgagctagggctacagctccacttgtgggctgagccgaagagagataggccgagcatatagatgtagtggactactctaggactagagctgaaaaggaaggaaggaatgaatgtccggtccaaaaacaaagaagcatccggtccaaaaccaagggagtataatgtatcggcttgtttggtaactcaagggaaggggattgggagtttacacgagggaattgatgatgagattaagatgggaatttgatttttaatctcaatatcttgtttggtagaggtgatggaaattgatagggagtttagttggagattagttcattaataaaaacggatggctgagattcgcttagacaaactaaaggaggaattcccttccaattaccttcccctacccaggtattgaaaaggagggagttccttactcaattccccatcccaccaaaattctcatatctcccaaccaaataaaacacttaatagcctcatccctctaaactctcaatccctcataaaaactccttccaactaaacgagccatataggataaaaaaatgtttttacccgtagcaacgcacggatattttttcgtgtgtgtgtctatatatatatatatatatacacacacacatatgtataaactttatatataaagtttaggaaaaagtacgatttaccccccaaactattgcgacagtacgaattatccccccgaaccacaaaaccggttatattacacctcaaaactattgataccggctgaattaccccctgactcaatactgagcggttttgctcctacatggcatacacgtggcgtcgacgtggaaatccaatcagtaaaaaaaaagaaaatatagggcccacctatcattactctcactgtctctccctcttctcctttggacggcgacggccgaggcagcaagcgcacgcggagtcagcagcggcgaggcgaggcaaggcggcggcggtggagagcggcgggggcggaggagaggctagcgcggtgggggcggtggagaggcgagcgcggcggtggcgaggcagggcgggcgcggcggagaggcgagccgagcggcaggggcggaggaggcgaggcggcgga

SEQ ID NO: 9713 - DNA, 7709 bp, Oryza sativa
ataaaaaaaaatttaactccaaagttgtagatcgcgttgagggctataagtttgatataaagtttgtcttcattagagttcacatgaaaaagttatgaatttttttaaatataaagtctttagatcgtcctatttgaattagatgatattcaaatccaagtttagggaccagggtgacacaactgaacaagttggaggacctaaacgagtgatttgcaagtttagggaccgggatgacacagtcgaacaagtttgaggacctgaacggtcgatttgcgagtttagggactgggatgatacaacggtacaagtttagagaccggtgatggactttactctatctattattacctctggttcttttgaactttgtagttgcgtcagttgggtgtaagtagatgcagcattattacatatatgggattatttggatcaggtgcagtcacaatagtgaccgtaacttgcagtagtagtacgcatcattggatataaattgaacggctcaggtcgcacatggtactgttcatattatcgtatcagcaaatactgttcatgtgggtactgtagcttttgatctgaaccggtgatcacaaaaatggatggtcgaagttgtgtgcagttgttaaatcacctaatcccaattcatatacgtggtatggctcccattcctttgatttgaaaatgtagtcatttatggctttccaaatcttcgaaagcatgatagagattttttatagcgcattttcagttttcatagtagcaagcaaataagccaaaatatcttgcattgtctgcattggtgtgagagcatctatttgaaggtgaaaatcagatacaaaccaagttagccttgaaaattgacaatgaaagaaaaggtgaaaatcatctacctgctgaccacatcttgaacaagttgaggcaatattagggaaattgtttttccaaacttctttaagaagattgattgttaaagtaggaacagagggttgatgaggatgaagatgagagtgaacttctttgtaagcacttttttgttgcactcacctgattgggtatgtttccagcaaagttggtcctccaaaacttgtggaataatttgtacctgtaagattgattcagtagctttctgatcaaacatttgtgaaattttttcagtgtcccatctcttatatatcttgataaaaaaatcagcaatatttataaaggcaataggtatggaagagtatcgaggacaaggtgaacatgaagacatgggtgcacagtgaagatggcatggacacggtcgggccttcacgctcgtgccaaaatttggtaaggctattttgttttcaatcacaggacgagtaatttcaccgtccttaagaaagtaggttaaaataactaaattttaaattaaaatttttttggtaccttgagatatttagtatctagagatatcaaatttgtcattaaaaatatatatctccagataccttctcaagaatgataaaattattcttataggactgacacacattactacacacgcaatacgttcacatactcacgaatgcatctcctaacaaacggcacattcctaatattgataaaattatttttaaaagtctacttaattacgcatgtgtaatatccgttggcacccaaacttgaatatcggttggtccctaaaattaatcttaaaccctagcattccacgaatattttaaggagaaaaacaaaagaccataatgcatttaattaatataaaagttgtatttgttgaatttgtagatgtggggtattgaagtaatgaaatttctcgttttgcgaattggtggtagccaagaaggtagaagttgatttattttgcgacaaacttcaatctttataagttggtttatttcgggacagaggggagaagtgccgtacaagatgacctggttgtccagacttattaattaacaaaataaaacacgtgtagtgtcgacgtgtagtgtgggcatgtcggatcggcgcgcacacacacgcgatgataacatgatagccagccggcaggtagatcgaaaatataggaaggagcttaattagccatggatggcgcgcaggtagctgcttcattcagttgcgcacccagagcatgtcgtcctgaggcaggaagtggcagactgccaccttcccgggcgccacgccgagcctcttgtacgcctccgccaccgccacgccgtgcccgtccacgtccccgtggcacgccgccaccgcctccgccatggtcccgtcggcgccggccagcgtcaccgtgtacgccgcgcccttgatcccgtgcaccccgaacacggcgtacgcgtagggcatcctgtggcatgccaccatgtcgcccccgggcaccggcacgggcctcacggcctccaccctgtacgcctgcctcggcgtcggcccggccctgttgaccacctccgtggacacggcgtggacgtcgcgggtgccgaggctggaggcgacgagctcgaccatggactcgagcgacgtggcgcagtagtgcttgtgcttgggcgccgtctcgctggcgatccgcgcggcctcgcacacggcgagcgtggaccgcatggcgtcggcggtcggcgagccggcggggatggagagctgggagaggatctccgggagcttttcggaggcgaacgggacggagtcggcgcggccgcgagggagcagcgcggcgccggcggtggcgcgggtgaagtggagcgtcatcttggagcccgggaagaggtccttctcgaggaagaacacggagcccaccgtatcctccttatccttcgaagctgaggccgctgagctcgccgggctgatgaggtcgcgaatggcgccgggcatcggcgaggtcgggagcgcgatcttccagtacatctccgccggcgacgcggcatggctggctcccgcggctgcgacctgaaatgcagtcagaaactagttgaattgaaaactatcaaagccaaaagttgcaactggaataagtactaattgtattacgttctcatcagaaattcaatgaactccatatgttgatccatcaaccatcttaaggtaaacatgttgatccagttagtttaaaattttagctagggttccccgcaaaaaaaaaaggttagggtacgtaattttaacttaatcttcaatctctaaataatatatatctctctcccaacttatctctgttctaggcttctagctcaaaacaactaaaccatacaaagagcgatatatatgtgtgtctgctcaccagaaggagaaggagagcagcgagagacctagccatgctaattaacgagctgtcaaggacacaagtatatgatctaattcactgataagagtgaaactgagcacaagcagttcatagcttttgggagctatttatagatcagggaagcgggaagaagacgaacaaataatacattgcattggccccactggattatgcagaataaaaaaatatgtcatgtagcaaagatgctatatcacattcacgatcatgccggatatctctattattgagcaactaggagggtagcctgcgcattcgcgcgggcatatattgtagtgtatttcagatatatacttataagtaatagaccgattgtgttaaatgtcgtatttgttatatagcaaaatatggcatattgatattatatatattgttggtttgattataaacagagtaatagttagattagaaatcagacgtggagcttataattattgattatttctcttttagttatacaaaataggaacgagagagtaatgaaaagcgtagagctcgagctagagtgggtgtgtagtgatggacgcatgtgagggtgatgtggagtggatttttttttgtaatttttctaattgatttaagtgaaagccaattattagatgttattttccttggatttgtaagatttttttttaaagttgtaacatgtcatggattaagatttttataaaaatagatttgatagttgaaaataatattagtgatacgtggtaacttaatatggctctaaaaggttataaaagttgactttgtactttcctaatttttattatgtagaatgattaacatgacataatacttgttgtcaattttttaatatttcagtgttgtttgcttgttggcctatgttcaaattacgtattttaaattttacatagtaaaatatgagtaatataaatcaacaattcaaataaattaaaaatcggatgttattaggttgtcattgctgacggtagttatagaccaattttgactgtcaatacttttgtagataatggagaactagcaatgcttgcatgcatatttatttagaaataatctagttccacttgtacttgataaagtaagtatttgtttacaagagatcatcacataaatggaggagaaatgattgaaaataaccgtttaaccaatcagaggtcgacatgtggcagatatatggatggatgtgcccagaatctcattgaaacacctacaaatgggcccaaccactatgccactgggccgaggatctgtcaggagacgtctaggacgaaggactggcccagggaggccaaccacggttcggccaaccttgggttccgctgacccatgcctggctccgatcgcccaggcccaagccgaaggcggttacataccgatcttctaatgacggttgtactggtattggcgctccaatcatcatactcaatctataaaaggacctccccaacttcacttcaatacacaccaagaaggaaatcaagtgaagaagctctcttaggctgagttcgggaatgaggtttgggaaccctcactccctggcacggaaaacggagcagcgattagggggtaattaactaagtatttgcttgttttttcaaaaatggattagtatggattagcaaaaaatacaccatttagcagtttgaaaagcgtgcgcgtggaaaacgaggaagggaagttgggaacaggaggtaacgagcgcaaccctagtttacatattttgctctagtgctagtagagttagaattaaatattcttccttagttcttcatgtcttgcagagaagtcgggtatggttctagtagctcttcctctcttgtaagactttattcaataattaaatattgttttttatatagttttggtcctttactatacttgcataattattcgagtaccaacttcggtttatacttgactcgtatttattatgtagctagcttactggagatatgcaatggtattggcttagtgttcatttatttggtaatatttagtaatgtaagcgcggtgattagattattagatatcattaagtggtgctatatgccacgcatacgtaaagataggccgctgatgctgacaactcaatacgtgtattcgttcacgtgcgtagatagggctaagaaaggttccgggtgcgggtacttctccatatctttaaccggttggatagtcatgacggattgtcgtaagaaactcgacaatttggggtggtttctcgatataccagtaggcatagttgtacattagcaagcatatactaaaataactatatattaaaaatatagaaatgatgcttttctttattcttctctagttagcctagacttataatttagtgagagtactctaaactatcccttctatgtgtcattcctctccccttcctactttgtatgactaaaagagaaataatctataattaattataagctccacgtctgatttctaatctaactattgctctgtttataatcaaatcaacgatataagattcatatacctatattttgctatataacaaatacgacatttaacacaatcagcctattacttataagtatctcaaatacaacctatgatacatgcccgcgtgagtgcgcgggctaccttcctagttttcctaaaagctacaactacaatagctcaatcttccctacaagctgaacttctggctctacaattgacaatataagtggcgatatttcttgattttgcaggtaccatatttttaacggacaacgagacgatcgcaaatacaatgaatatgagacattttgaagctgatccagcctattcgaatcttcagcggttactgagttaaattcaagcaaatattccttttagcttattgcaggtgttgtggtcttgtggataacgagagaggtcaatcgcatggctgacaagttagcaaaaaatgcgagagatgaccaatgaaatccagcatttgttttgccacaatatcgccaacctagcttatccaagcagaaggtgatttgctaaggatatgaaagaccatttcagtacgtactctaaattgtatgaaaaccatgtaattaatatgtttgagcaatggaataaagtttgagttctaaaaaaaattgcatccttttcatgttctaatgcatatcatctagaatatgcttaatgcttgggctggaatatatatacacggaatggtcatcgtaggcgggcctggcctgagtaaggtgtaaacatatccgagcccttaaatggccttcctgtgaaaaaccaagtcctcttcataggcagccagttttacagccagcatactatagatgaaaacggagcggataattcatggatagtccggataaagatatttttttatatgaatgtgaatatggtatatcagagttttcgatgaatatgaataatagaaggatatccgatgaacaaaatgctattcagatatccactgaaggcatgagacatatctcatttctttctaactctagaccttcaacttacttctttagaattttaatagtagcccatctcatgatactagcccacactattaatattacttaaatatttaaatatttttttgtaaattttactatattttatattataatttcagttagacatgtatttatatcaactctgatgtacatgttaaacttaattagcattgttgactctatgatcaaacttattatataaaacgatatatttatatatgatagtatttgtttctattagaaattgaagtgtttttcatgttctgagaaatatttatttccctattcgtgtccgatcatattcgatctttattcatattcgagataattcatatttgttttcatatccgagctttcgtattcgttttcctatccgacagaaaatacggaaagaaatattgtataagcattatccatccatatccgctccattttcatcctaagcacatacaggacactcaggagacccgcttgcgaaaaaaaactcaggtggagtgcttaagaacctatttgtgaagatgactttttcgcgggcagcccgtatactctcgggagcctatcgtattaccggcgagccttctcatggccggaaacggatcctctgactttggatggaaagtcacggtcttgcaattcacttcatcccagccaaccactgcatccaacggcacacatccatcttcccctcatttgcctgcatatgttgggagtagctaagaaaatattttacgtagtggtgtatacaaccgtgtaacattgtcatacaagatgtatggatcgatgaatcgtacatgcagacttattaacatgctgccacaagtatagtagtggcatttcgggtcgtcgcatacacatatgataagacatgatacgcatatagctccaaaatataggaaggagctatcttgagatcacacaatttttatcccctttca

SEQ ID NO: 9714 - DNA, 5125 bp, Oryza sativa
tttcagttgtggcataattaagctgagctctagtcaacgttttactagcatatgctatagcatggtgttttctatccttagtttgtccaagaacagctcccacggcaaaatcactagcatcgcacatgatttcaaacggcagcgatcaatcaggaggttggatgattggtgctgagatgagtgaatccttaaggattttaaaggactttaaacactcatcatcaaagtcgaacggaacatccttagctagcaaggcagttaagggtctagcgatttttgaaaaatcctttatgaaacgcctatagaaccccgcatgacccaagaagctacggactcccttgacattgacaggaggtggaagctgtcgaattacttcaatttttgctctgtccacctcaattcccctttcggagatttgatgtcccaggactattccttcacgaaccatgaagtggcacttttcccaattaagtatcaagtccttttcttgacatctttgtaagaccttgtttaagttctccaaacaatgatcgaaggatttaccatagactgaaaaatcatccatgaggacttccatgatgtcctcgatcatgtcagagaaaatagacatcatgcatctttgaaatgacgtgggtgcattgcacaacccgaacgacattcttcgatatgcatatgttccgtacgggcacgtgaacgtggtcttacttttatcatcgggatggatggggatttggtgataaccagaatacccatcaagaaaacaaaagacggaatggtttgctagccgctcaagcatttcatcaatgaaaggcagtggaaagtgatccttcttagtagccttgttgagtttcctatagtgaatacacattctccatcccgtgacggttcgttgtgggatcaactcgttgttcgagttttcaacgaccgtcatgcctcccttcttaggcactacttgaacagggctaacccactcactatatggcatgggataaataatcccggcatataggagtttcaagacttccttttttgacgacctccctcatcgcattgtttaacctcttctgaggttccctagatggtgtgcaagatggttctaagggaatgcgatgagtgcagagggccggacttatgccttttaagtcttggagggaatagccaaaagaaacatgatgcttttctaaaacggtgataagttgggtcgtctccctctcagagagtttgtcacttataatgactggagactccgcatcaccgtttagaaatgcatagtgtaggcctgaaggtaagggctttagctcaattggggcacgtgacggctgatccatttttggcagttcaatcgtttctccagattcatcctccccttcattgaattcttcgatggattcattgaaatagactctggggcctcgaatggagaaatggccatcaccttctcaattggttcaggaataggaagaggctccgtcaatgaattgattgattgcaacacaaggacagaggtggcgattcttcctatgttcaggttgaggacaccggattcgggcatatctaagagtttctctatgggatggcctatgagtatgtcgaaatcagatatatcgaacacatgaaaatctaagatgacctcaacgctgttgtgccgtgtgggcactccagagataatccctaaaccttcggtagtagagtttgtggaaattcggaaggttttgacggttggttccaacggtttgtcccctaagcaatcaaatgcaaaggttgctgacataatattggcaccaacagagggattatacagaacacggaccaaattacctccaatgagacacgtaatggttgaggagtggcatcgtatctgaatcgattcagatgagagctctccttcccttaaacattcattactcacgatggtggtcaacttcttcaccgtctctttaagcatagctttatcgagaggttcattagaattgaccttggtcggtggtctcttctcgcaggaataattcgaggtgttctcataatctttgaaaagatcctcctcgaattggaatggaatttccggaggatgaatttcttcttcctccggctcctgcgactgggatgaggattcgatagttgagtcgggttccgactccacgtgcagaggttcctcatggataatctcgacctccgggacggcttcgctttggccaaaagaatcattctcgaagataagatctaagagttctcttccttcgacagttgtcttatgtgcaaacgatcctccagcggaaatatcgagattttcaacagactccttatctaacctgtaccaaaaatgttgtaacaacacatggtcatgtaaagacaagtctgggccaaactgagttaacagtgagaaccttactcaggctgcaccgagggattccttctcgttgtcggaaagaaaggatgtctaatcgaagattgattacacaggttaatggaaagaaagtaaggcagaaattgcacttaagctactcccattcaccgtggaatttcttgacagacatagtgtaccattgcttcgcttcatctctatgagaaaaatgaaacaatttccacttaagagtttcatgtgtcatgcctacgatggatatgcaagaacacactagctcaaagtcccgaagatggaggtatgggttttcactgatactactagagaaggttttctctcgaaccatggctataaagccaggactgatttcatagccatccgaaagggttggttttgaagaacacgatggctcacaaagattagcccgaggagcagaaaggttttgaattgtgggttgctccattaaggaaaggaataaaagaagaagaaataaaaataaagattagcaaccgttctccggcaacggcgccagaaatgcttgttggtatttcttacgaccacagataaatccgcaagcgcacggaataccgctgtagcacttcaccttcgggtgaccccaaaaggatatcgaactcagggaacgcgtgtaatctacctaaggctaaggcaatccagggacaacaactataggtaggctaggcaagctagagaagacattctatgtgttttaattatctaagctaagcaaaggtaatttcctatctgttgcttcgggcaccgacccctgctggtctgccagcgtggttccggctatagctctatgatgtatccgaacgtggaggattattgggacgggattcaaagctatcaccacctgccgcctacctctgacaaatccgtggaatacacaataaacaaaggtaatctgtaacctagacaccacgtctaagttattaattactactctaatacttgtacatgaacttccttctttatcaagagtcctagtactagagcacttagtatgaatactaaacaatgaacccgcaaagatgaaaacctatcttacttagactaaataattaaataacataagaaaggaacacgaatgcttactttatagaagaagttctccgaacctggagcagagtgtaccgacagctccggtactcctctagaattcctcctaagaagctacactcgtcgaggtagaaatcggatgagcgccaaacttccgggcactcctccagagcttccccttactctctaccttattctaatgtacaaaagatacaatagagcctcttgtaattcagctcaaagttgtgtctattggaatgtgagtgagctcctccttatataggctccaaatgacagttaggggcatgggaattgtctaaaacaacctgcaaccgcctctgggaagaaatccgagccgtctaggtgaaagcagatggcgggaagcgctaggattggttcggccgaacccaaaaactctcctcccggcctctccttgggctgggaggttgcttattgggcccccaacaacctgggctatgttttggcccaattctaaatggtttttattgacttattgggcatctaatccgtgtaaatatgtcctgaatacgcggagatgcattttgtcatatgacggatgtgttttctcctcaaattacttgcatacacatatttcaccaacactagtggaaatgattagtaataatacctaccactaagttggataccatgttttatttcattatatacaggtattgacggtcagatattatgatttaaggaccgtcaacaatattcaccaacactcgtggaaattgttagtaataaatcctatcaataggtttaatatttcattgatttgcttttttacaggaattgatagttatatttggtatttaaggaccgtcaacaatttcaaaacatgagtaggtattacctctcatcgagagggcctaaggctgtattcgataccaggagttcctaactcccccctctcgttttccacgtgcacgcttttcaaactaccaaacaatgtgtttttttacaaaaagtttatatacgaaagttgcttaaaaaatcatattgatccatttttgaaaaaaagctaattcttaattaatcacgcgctaatggaccgctccattttccgtgtgagggtgatgggttcccaacaccaaccaacgtgcacagcctaaacctgtctaaacctttgtcctgatatccatccaaatttagatctcatacgctaccccttttactactgttgatataggacactgacagttggcgcgccatgtaggggttgcatcaagttttacaatgacaatcgtgatgaaatcatctttaggagtcgtcagatttgtcttccctccaaggaagacatttagtttcggcagttttgactttctcaccgacaacttcagcaagcattcagtcttcgactcagattcaaacaagttggcggggttcgagacttcctcggtcccttttggtctctcgaatgcggctgtggcccactccagatcggatttccatggctcggcctcaaattggccaggggagtcaatgccactagcttacccggacaacatctccaacaacggcggcaaactaccctaagattctgatgcaactctctccgcttctcgctgcgacgatttgggacctacaccgtccccgtgaattcaatccaggcatgattcgaccatgtccgaacatggtcccagggaagtaagcctcctgatt

SEQ ID NO: 9715 - DNA, 8693 bp, Oryza sativa
catgtgaagcttctgaggtcctagggatgacacctgcacggggaatcggatggtggctcaacggagaaggaggatttggcggtggtgctcagcggccggagttggggaagacggagtcgatctcccagcttgctccaccgatcttggtggttcttggggcgttttgcagagggggacgaggagaccttcacggcgtagtggcttggctcggggcggacaggttcagccgggcgacgatgacgctgaagcggcggcgaagaccggtgcgcgcctcctcctcgccggcgcctgcggaccccatgccgacgcctgcggcctcctccgcgttggcgcctgcaacctcctctccgcgccccgcgtcaccgccgacacctccttggaccaccgcgccgccaccgggcattgcggcgccaccgctgtggatcaccttctcgcagcagtcgccgaccaagagaggtgcgctgtcaccgggagagccgcctggatcgggtctagtgttagggattttcaccatttcatctcccttttcccttttaccgtgaaatactgggtatgtatatttgtgagtgagggaaatttggtctttgtaaaaaaacataacggttgtaatggtgtggaatcaacgggatgttgacggtgatggcatttttggaagaaatatgcttgtacaatggtatttttgggaagttgcacttgtcgatggcatttctaggataagggtgtttgttgatggcatttcatggattttctcattaattaaataacataagaaaggatcccgaatgcttacttaatagaagaagtttctccgaacccggagtagagtgtaccgacagctccggtactcctctagaattcctcctagaaagctacactcgtcgaggtagaagtcggagagagcaccaaacttccgggcactcatccagagcttcccctcactctacctattttctaatatacaaaagatacaatagagcctcttgatttagctcaaagttgtgtgttttgaagtgaagtgagcttctccttttatagtctccatatgacggttacaactatgggaattgtccaaaacaccctccaacgatcattgggaaaaaatcaggagtgtacacatggaggtgaacgggttcggccgaacccaaaaatccacctcccggtctctcttttggctaggaggttgcttaatgggcacccaacatcatgtactatgatttggcccaattctaagtggttttgattgacatgtgggtcctccaatccatgtaaatgtatcatgattgtccggaggtgtattttgttgcatgacagacgtgttttctccttaatatgcatgcatacttatatttcaccaacactagtggaaatgattagtaataatacctaccactaagttggataccatatattttatttcgttatatgcaagtattgatggtcagatattatgatttaaggaccgtcaacaagttagatggctttgcctctgcttttcaaaaccagctaagttttaacaaaatgctagaaactcaactagctcagatggctactcttgtccctgctaatgaatctaggaggattccagggcaacctgagccctctctagagaactttaatgataaccacaaggggaggaaaatccactcgcgaccagccacatcctaacactgcaggaacaagaaagaacaataaggaggcttcaccatctaacacaaatggagaagaagagacaattcagcgggagaaggctgcgccgcaggagtactgcgacaccaacctgctgccattcccccagcataaccggaagccatccatcgatgagcaattcgctcgctttattgaagcgatccaaaagatccacatcaacatacctattttggatgcgatgcaagtacccatgtacggttgctatctaaaggacattctcaacaacaagcgaccgatgccaaccgcggaagtggtgaaactaatggaggagtgtagcaatgctatactcctccaacttccggagaagaagaaagatctggggtgtcccacgaacaggccttgtgcgaccttgaagcaagcgtgagtgtcataaccaaggatgtcttcgacaaattgaactacacagtgttcgcaccaacactgatgcggctctagctagccgattcctcggtccgttacccagcaggtattgctgaggatgccctagtaaaaattcgggatttcttcatcctggtggactttgtggtcttagacataaactctgacaaggagacgccgctcatcttggggcgtccgttcttaagcatcgtggaagccaacattgatgtaggagctggagaaatccggctcgacctcaatggaaaggaggagaagttcgaattccgaccgagaatagaacaatgctctatggtgaagatcaagtacgggccaaatccacaaaatatccgagaggtcgaagttaaaccctcaaagacggatagcctcattgcattcatgaagaacttcctggagaaggaagcgatgggcaggcaccgtccagatccaaaggtggcatcaagaacgcaagctaaaaagcctgtgacaccagccgccaagaagccacaggatgcacccaagacgtaaaatgactagcaagtgaagaaatcgacacccactctctcacctccggagcagggtgccgcatcatcaagctaagcatgatggaggtatggtcttgctcgtcggactaaaaacgacgttgcccttgccaataggtaatttggtatgtatctcatatttgccttttgcatcaaaacatgtttattttttcaaaattttgcattaggaataaatttgagacaaatttataaaaatcaaattttgagcaaaaataaaataaaattttggccaaattgaacgtggctcccactcaacttatcgttgggagccaacggccaaaagtgggcccagttgggcctaccaggccttgttcggccaaaccggccaggcaacggtcagttgtggcactttcaggggcaacggctagtaggtcccacatgttagttctagccgttttggggcctctataaaaaggaattggctggtggaggagagttcaccccaaattcaacatagtttcactctctcacacactctctcgcgctctcaaattcatctcaaacctagaggagttggtctcaagtttatttcctgcattttgattacatttttagcatctacgagtggctttggtgcaaggctaactggcgggtagaattaatccttgttactagcttaacccccgctcgagtttgtcttgtgctcttgctcattttgtctgcaggcatgaagagacgaatcacgcacttgtttaataattggtcaagctgtcaatcaagccatcaccaagaagagtcgagtgcactttctttcatcgaggtctcgttggaggaagcagacgctttgccaagactgcttagcgactcagacctcaacctcaaaggtgagcgggaaatgcaagcctatcatatgctcaaggatcggccgtttgctcacacaagagcatacgacccagaacttctttagaaaataggtatagatgttgatttctacattgtttggaatgctttaggatgggagaaatttgctgtggtaattaagcaatggttctcgcttacttaccttgcaatttctaggtaccttgctagaagtagatgatggcattttgtcacgctcggaaaatagaacactatattccgtttgtgagtgcataaatccttgtcctatgaggcaaggtacacattacaaagttggtaaataacaaagtatataagcaaaagcataaatagagtactttattacattggcaaccaaagttccaacactaaaagataaacgataaaagccgaaagctatgttgggccaccacaggcgcttgatggcaggcacgagctagacatcaaagccatcatctccaaagtattcctctgctggaagggggaaaatggagcaaggctgagtacaaccaccatactttgcaagccatgccgggaaaatgcaaatataatgcaagtgagtacaaagaattcatttataacgttattttgcagaaaactattatttcaaagcatgtaaatatttaactgtatttgaataaaacacgaacctatctctagtcaattattatcaagccgcgctccaacgcgatcttgcctttatgcaggccaaaaagtgataactccaattattcaaatttcaatagaattaaactctaactagggtacattgcttggtttgcccataaccgagggcgtggctattcaaatagattagaggtgtacatcgttacccaccaaacccgtcttcctcacatgttgccatgtgccacatgccaccgcggcatatgacataagctatgacataactcatcgtttggtaccgccctaaacaaagaggaccgacatagacttcccccaccaggtgccctaggtcaagcaaacagtctatgcccccgagcatacagccagagacgtcgaccccatcaagggcttcatccatccctatccgtgtcttccttgtttatgaccgtactagacgatgcattaagcctttcctattagacaggtggttgtacggaatatgctttgcaacagaggcccgaagactgttacttatgacggccgagatgcgactagcgaaaccaagcaccccaagcccagccgaaaacatgtttggggaattttgaaggggaaatatcatgtcaaggttaaacagccactaaaccatattaaccattatttaaaagttattcccaaagtctaattattggaaaacatctaattgtttctatttaagcgaggctaagcatatccctaaatttactagtaagcaccacatacataaagttcccactagttttattttcctagagttatcaaggatcgtaataatacaagtaataaagctaaaacaaggagaatcggtaaggctaaataaaacagtgataagcgcggaaatttaataaagtgaaatgcaataatttaaataaacataattttataaattaggacaacaatatgatcaaaatgacatgacttgccttgctcgctaccaaaatcttcaaaatcaacctcgaggtagagcatctctccggatctgcagcgtctacactgcatacgcaaagaaaaagggctaaaacataaattaaaaccatataagatgcagaaacaaagcactaaaatgggttctttactgattaagggaaaattagcaatttgaacgagtcaattccgagttcaaatagtcaatatatgaccatttgaattttagatgttgtctgaattgcattttgcgaatttgtggattgattttgtaaaggaaacctactgagtgtgcgtgctgaaacagcaaagagagaaaaacagagaagagggagagaggtggcagaggacatggcagtcggtctccaccggcggccatggcgcagcgacacgggagaggtgagggtggcggcgaggctcaccagagcagcggggacggcaatgaaacagtgatggtgacgagcttggttttttgttgatgttcgtcattgtctccgaggtcttgatgttctttttttgttgttagtttcttcttcctctttggtttcattacctggtatatctcaaacatgaggtgttagagccctgttcttcgaagaatcccaggcatctcccgctcatgacatttgcggtcatcgttgttgaaattcttggtgggaaggggtacaacctgagccgtagatagtgaagcattcatggaggatcccaaggatgcgaacactaccgaaggatagcgtgctgctcccactgagcaggagcaggacaagccactcggccatggtgaggttattgtgcactgtgaatgctcctagcaaagccaatcgtttgtgccttcggcttcttcaccatcgcctagcagtcacacgccatacggtttttctccagtctagcagctgtggacatggcgacaacagaattttggcacttagtttccctatcttcttgtctaccttttaggccatttttttagttttctaggagtggttggaataacatggtcatcaactccagcccaaagcacacttggtttgcaccggtaggtaatactagtacaaaaaaaatagaccagactgacggtccaaccggaaaaaaccagactcagagtaatcacggttcggttagataggaagaccggacatgcatttgaaccgctttagaccagatgaactgggaaaaccggcaccggtcaaaacattaggtccgatgttgggccattccaagactaacttaacgctgttgggccataaatgagagtgcccctttggtttttttttgtgcaaaaatagggaacaaaggtgctctagctaggattcaacctcaggtcactgagttggagggaaaagtcactagcctttcgactagcatggaaaatacacataatacatgtaagatacaaccacggttcaaccgtcgggtcaacggttggattggtggaccggtgaaccgagaggtcggccgggtcacccaccggtccggctttttacactatggtaggtatactcatgcttgctttatatagatatgcggaaacgacggagtggacactaccggttgacggtgtgctgctccagctgagtaggacaagccgcttagcagtgattgctcttcccatagccatcgtcgatgcattcagcttcttcgccattgcccagtagacatgaaccgtaggattttctgcaggaaagcaacggtggatgtgggtacggctcaattttggtatttatttttcccatcttcatgtcaaccttttaggcattttttattagttttctaggagcggtttgaaatgatatggtcatcaactccagcccaaagaacgcgtagtttgcagtgataggcatactcatacttgttttatatagagagatgcgaaaataatagagtggacactaccggtggatggtgtgctactcccactgagctggacaagccatgaggtcatgcaccgtgattgctcctgccatagccatcatcggtgccttcagcttcttcttcgccattgcccagcagacatgaatcgtaggattttctctaggcaagcaatggcggacgtggcaacaactaaattttggcatctaatttttgcatcttcctgtctaaaatgtatgcctttttagacaatcattcagttttataaagtgagttttaagcatactaagaaagagcaaagtggtttaaacacaaaataaaaatgtgtcttccagttttcggttgtttgtgtgacaatcataactaggcttttatttttgaaaatatttggtaatagctacaaaataaagaactgctcattcgttgatccttcacacagcaataggacaaagctaagagtacatcctttttagaagagagtggtcgctgatatccaaattccgtaatgaacttgatgaaatttcttgcacatgaatcaaacaatctatcactagtagattttacaaacaagcatgtgttgttcaataaatcaaataccatcacatctagagaaacaattgtaagctccatatttttctactacatggctcgagatcacgagaaagaatactgcaagcacaagcacatggtcacaacctgcttgagctacgccgtacaaattattcaaagttacatggaggtccctctgttctctatgtctatgtctctgtctttgtcattgtccccgagttcttgatgttcttttttgttgttagtttcttcttcctctttggtttcatcacgtggtagatctcaaacatgaggtgtgagagccctgttcttcgatgaatcccgagcatctcccgctcatgactttcccaatcatcgttgctgaaattcttggtaggaaggggcacgacctgagccgtagatagtgaggtgttcatggaggagcccaaggatgcgaaaacgacggagtggacactatgggaggatggcgtgctgctcccactgagcaggaggaggacaagccacttggccgtcgtgaggttattgcacactacgaatgctcctagcacagccaatcatttgtgccttcggcttcgccgccagcgcctagcaggcatgaatcgtaggattttctccaggcaaacaatggtggctgtggcgatggctattttttggcatttatttttcccatcttcttgtctaccttttagggattttttattagttttctaggagctgttcgaaacggtatggtcatcaactccagcccaaagaacgcatggtttgcagcgataggcatactcatacttgttttatatagagatacgaaaataacaaagtggacactacaggtcgatggcgtgatactcccactgagctagacaagctgtgaggtcatgcaccgtgattgctccggccaaagacatcgtcggtgccttcagcttcttcttcgccattgcccagcagacatgaaccgtaggattttctccaggcaagcaacggtggacatggaaacaactaaattttggcatttatttttgccatgttcctatctaccatttaggccttatttttcgtatttctctagccgtgcttaccaacgacatggtgatccactccagaccaaagaaagtttggtttgcatagggtggtatactcatactttctttgtatagaggcgtcttggcaaagaaaaagggctgcaggaat

SEQ ID NO: 9716 - DNA, 37101 bp, Oryza sativa
agaaggaggggcacaggggcgctacagcatgttgccaagcacttcattgccagttcaaagcccctgcaccacctaggagcctggaccacgccgctgagcacctcatcactagcacaagctgtagtttgcgaggagtagtgccgctgggaccaccacctaatcaccaacaagatacatgcacaaggtcagtctttatttcatgtgtgcttttccataatgtgcggcttgtttaataatttttgccatgatttcagagaaagaccaaatcttacctgaaatatagcctagagtgatggtgtcattctctaggcatgtacggaacattatgttagatagggcttctacaactgaacaatggaaagtaatctttgcttcactcgtttcttttctctcctatttttcctttccccatcatactctttctcctaattttctattttatgttcaaatgaaaagttgaaaacaataattttaagatagaatttgggtgttatagcgtaattacctctctatatatatagaatggggaaattatagtataacacataagacttctccaattcagtctaatctagcagctcgatctgtcattatctcctcaagaactagagagaatatcaacttcaattccgtccaaaaccttgggaattccacaataattggcataaattcagatacttttcactctgtattatgctctagataattgttgtgtatgaatgtttggaagtgtgtaggactgcaaactgtaatcctactgtgtatgtatgttgatctgaaagtgtacatgtatggtactgcaaaatgatgctctgcatcacaaaaataaatgtgtgttccacctggcatgtgtttgtgtttgtattaggtaagtgcttatgtgtttatagtaagcaactgcttatctttagcaccgtttaatttgggattaactcaggaaccttcatccacatgatgcaccactcagcaatcctaacaaatcttcatcccttgccaactgggaaagtagctagaaggtatcatgacaccctcacttcttacatttactatttggacaataattgaggttgagtaggagagaccaaataatggtgctcagcaccaaaaaataagtgtcttccacttcccgggtgtttgtgtgtatatcataagtaagaacctatgtttgtgaatattacgtaagagtttcaaaattaaagaattgccttccgttgtacttgatgcgcaacaaaaccaaactaggagtacatatgctatgatcattgagaagagagcgctcaatcatatccaaattgtgtagtgaacttgatgaaaattgttacacctccatcaaaaagtctaccagtagtagagtttgcaaaatgtggcatcctttgcttgttagatcaaatacgatctcatctagagtagtaactgtaagcttatcatgacgccctcgctgcttatgtctaccattgggacaatggttgaggttgtataggagagaacaaaatggtcctcaacaccaaacaaaaaaatgtgtcttccatttttgggtgcttgtgtgcttatcataagtgtctatctttgcgaatgttaggtaagtgtctcaaaatgaagaattgtccttccattgatccttgatgcatgacaatatgtagtggagagaatatgacgatcatcttgtccaatccccgatccatatggaaccttctagaaatttccattatgctgtttccattctattgaaggcaacaataatttttgatcttggttacatgctcaaaattagactactgaagcatagttcttgcccaaatcagaaaaatacaatcccaatttcttatatcaacaaacaaaaatagcagtcgcacgtacctcgtaagtactaattctgcacatcggcacactgcacaaaatcataagctagctagctagccatatgtatccatggagctatttagatctagactaatttttatatatgggatgaaatctcgcatctgatgtcctcttacactcacacagataaaccgatatagagaattaatcataaacccatcagaaccatcaaacaattaacaatcgaaaattaaacatgcatacgagcaaagctagatatcttgaagtattattattgcagaaaaatattgctgcaataatgactagatcatggacataaggtagtagaacctcatccttcacttgagtcccgagcacctcctgctcatcatattatacctcctcatcacggagatacttggtggaaatggacacagcttgcaccatggccggcagggcattcacttatcaattttatttatagcattactgccagtttgtaataaaaactagcagtgatattgctgccggttttatttgtgagtggataaaaggatttgtcgagtcggtgtggatgtgtgattaagtattgatccctcaggctcttcctctagcatgtttctccctttcactgtcagccttccaccattgtcgtgtgttagatgtgtattagataggttgtatttattgttttatgtcttttggctttccatgttcctgtcttttggttttccctgtatctgtatatatatttgggctattgccctctgatgtatacaagtcgtattcataacatggtatcagagcatggtttagacttctcatcttcttagatttttctctctcggcttctccatgatttgatttgaggattatcggcctcttcatcttgaagccatgatgttcctcttgatctagtatggtgtcgctgagaatcatccatctctgctccccaacatcatcaatttcttcagaacagtgtagagggttggtggttgtcctcatcaccggctatcgtcgcttctcatcgccggccgccgtcgctcgtcgcgggcccccggccgccgtcgcccctcgtcgccggcctctggtggcgggactccggccgccgtcgcccctcgtcgcgggcctccagccgccgcccctcgtcaccggcctccggtcgtcgccgctcgtcgcggccgccgtcgcccctcgtcgcgggcgcctccgcctgggttgtagggcgccgtcgcttggcgtctgtttccccgatccggatctggatcgggaggtttaaaaaaaagaaaaagaaaaaaaagaaagaaagaaagaaaaaggcttctctggctctgctactgttgtgctctgatcgcacgtggtggctctatattttgggctgaggcattagaaaaaaaaacttgctgccgcttgttctgtttgctctctcgccgtcgcttcttccttcttgatgatgtcgtctttatccggcactgtgtctgttcctcattgcccagttctttttgatggttgcaactacagccattgggctcagcacatgcgtcttcatatgcgtggtcagcgtctttgggatgttttatctagtgagctaccctgtcctccttgccctattgctccaactatgccttcacttgcaagtcaagctactgatgacgatagagaaaaggctaaagagcagtttgatgatgccatggaaaattatcagagtcagtttgctttatacaaggcttggttggatgaggatgctcgagcttctgctattcttgtagctagtatggagattcatcttactggtgaggtggttactcttacttcagcccatctcatgtggacacacctacatgatcgttatgctcctactagtgatgctctttatcttgctatggtgcgtcaggagcagtctttgcagcagggggatagtacggtagatgagttctatacacagttatcctctatttggcgtcagcttgattctttgggaccgactatttgtcatacctatccgtgttgtcagcgtcagcgttctcacatggatcttcgtcggatctacgattttctcacacgtctccgatccgagtatgagtccactcgtgcacagttactttctcggcatccgcgtgttactatcatggaagctcttacggagattcgttctgaggagattcgtcttcgagaggcgggtattctaccacttccttcttcagtgttagctgttcgtactgtggcttcttcggcttcttcgacaccggctgttcattctacagtttcttcctcttcttcatcggcgcgtcctcctaccacagttgtaccatctactaggggtcaccttcactgcacctattgtgataaagatggacatgtggagtcattttgcttcaggaagaagaaggatttacgtcgtggcaattcttcgaagggtactagtggttcttctcagaagagttctggaggttcagattcacaggaaattcttatgttacttcgtcgccttactgcttctgctgcgacaggttctgttggttctgtggctctaccttctgcacagtctggttctgctgttcttggttcttcatcttctactgagggatcatcttctgcttcaggtactattccatggattctagattctggtgcttccttccatatgactcatgatagatctagtctttcatctatatgttctcctttagttcctactactgttcatactgccgatggtactcctcttgctattgttggtcgtgggactctttctatttcttcctttagtgtccctgctgtttcttacgttcccaaattggccatgcaactcatgtcagccggccaacttacggatcatggctgtcgtgtaattcttgattctgactcttgttgtgtccaggatcatcgcacgggtctcctggttggtactggccctcgccgccgtgattctcagcgtctttgggagcttgactggcttcgtcttccttccgctgcgcctgctagtcttcttgcttccactgcttcctctacggtgtcttttgctcagtggcatcatcggttgggacatctttgtggttctcgtctgtcggctttagttcgccgtggtcttttagggtctgtgtcaggagctgtctctttaaatcaatgtcaaggttgtaagcttggaaagcaaatacaacttccctatcattctagtgagtctgtatctaagcgtccttttgatcttgttcattctgatgtgtggggcccagccccttttgtttccaaaggaggtcatcgctattatatcatatttatagatgacttttctcgtcatacttggatttacttcatgactcatcgctctgaagttttggctatttataaatcttttgctcgcatgattcgcactcactttgattctcccatccgcgtgtttcgtgctgattctgctggtgagtacctttctagagagttgcgtgtttttctttccgagcagggtactctttctcaattttcttgtccgggtgctcatgctcagaatggtgtagcggaacgtaaacatcgtcatcttcttgagactgctcgtgctcttatgattgcttcttctgttcctcctcatttttgggctgaggttgtttccactgctaattacttgatcaacatccaaccttcctctgctctacagggtgggattcctattgagcatctttgtggccagcctcctgattattctaatctgcgtcttttcggttgtgcttgctatgtgcttcttgcaccacgtgagcgtacaaagttgacggcttagtctgttgagtgtgtttttctgggtatagtgctgaacataagggttatcgttgttgggatcctgtaggacggcggatgcggatttcacgggatgttacttttgatgagtcccagctccacatcctctcccgatgactctcttctgtttctcacttttcctgatactcctgttcgtgctagcattccttctcctgtctcttcctctcagctggcaccttcttctgagaattctgcatcttcttatgtgcctcctcttacccaggtttatagtcgtaaacctcgtatccaggagccttctctggatgcttctccggttgctcctcctcgatacaattttcgtgatcgtaatttagttacgattcgtccagaggatcgctatggttatgttgctacagttcttgctgaaccttgttcttatcgtgatgctgttgtccatcaggaatggcaacatgcgatggcagaggagcttgctgcacttgagcgtactggtacttgggatcttgttcccttaccttctcatgctcgtcccatcacttgtaagtggatctataaggtcaagactcgctctgatggaactcttgaacgctataaggctcgccttgtggcgcgtggtttccaacaagaacatggtcgtgactatgatgaaacttttgctcctgtggctcacatgactactgttcgaacacttcttgcaatagcttctgctcgtcattgcaatatatcgcaacttgatgtcaagaatgcttttctcaatggggaattgcatgaagaggtttacatgcggccacctcaaggctatttagttccagagggtatggtttgtcgtcttcgacgctctctttatggcctcaagcaggctcctcgtgcttggtttcaacggttttcctctgttgtcctggatgctggtttctcagctagtgctcatgatcctgctctctttgttcacacttcaccccgcagtcgcacaattctacttctctatgtggatgatatgctaatcacaggtgacgatgcggagtttattacttttgttaaagcacgtctcagtgagcagtttcttatgactgatcttggtcctctttgttattttcttggcattgagatttcctctactcctgaaggatttcatttctctcaagccaagtatattcaggatcttctggatagggcctctctcactgatcaacgcacagttgaaactcccatggagcttaatcttcatctttctgccactgatggtgaaccgttagctgatcccactcgctatcgtcatattgtagggagtcttgtttatcttggtgtcactcgtcctgatatttcatactctgtgcacattctgagccaatttgtttctgcccccacacaaattcactatagtcatcttcttcgtgtcctccgttatcttcgtggaactatctcgcgttgtcttttctttccacgctccacatctttacaacttcagggtaattctgatgctacttgggccagtgattcctccgatcgtcgctctctttctgctttttgtgtttttcttggtggttccctcattgcttggaagactaagaaacaaacagcagtttctcgttctagtgcagaggctgagttaagagctatggcccttttgacagcagaggttacttggctacgatggttacttgaggattttagtgtttctgtgacttcaccgacttctttattgtcggacagtacaggtgctattagtattgctcgtgatcctatcaaacatgagcttactaagcatattggtgtggatgcctcgtatacccgcacacaggtacaggatcaggtggttgctctttagtacgtgccttccgagttgcagttagctaatttctttaccaaggcacaaactagagctcaacacaggttctatctctccaaactcagtgttgttgatccaccctgagtttgagggggggtgttagatgtgtattagataggttgtatttattgttttatgtcttttggctttccatgttcctgtcttttggttctccttgtatctatatatatatttgggctattgccctctgatgtatacaagtcgtattcataacatcgtgcacctccccttcccatcactgtctttggccctctcgttagcctattgttgcatctccttctccctagatcagttatcgttgcctctccctctcccctgatatgtcgccttcgcctctctctctctctctatctcttctcagattcgccaccatcaccctccctctctctctagatctgccactcctctccctttctcaatccctaatgactccatcaacctcggtgcttgtggttagggtcatcagatctggcggcagggccactagatctagatgttgtgccacctcttccattgccgacaggaaggaggccatgggcggaaaagggaggggagcatggtgacttggcaatggcgagaagagggagagtaggcgagacggaaaggggagggtggtgggtcggtgacaatgaggaagctagggaggagggagagcggactacgtgggggcctacaccatgctgccgcagctcaaggcccctgctccgcctaggggcctgcaccgtgctgcccagcacctcattgccagcacaagctgcaacttgcaaggagaactgctgctatggccaccacctcatcaccagcaaaaaaaatacgtgcacaaggtcagtttactatcatgtgctgctcgtttcataatttttactgtgattttggagaaagatgacttttcctgaaatataggttaaaatgatggtgccattgtgtaggaaaatatggaacattatattagatagggcttctccaagtaaagcatttaaagtaaattttcctttctcttatggttctttaccatcataccttttctcctatttctctattttggaccaaaatggtgcccacaaaaagaaaaacaaagtgtcttccacatcctacatgttcgtgagtttatcatcactaggtgtctacctttgcgaatgttaggtagtagtttcaaaattaatgaattgccctttcattgatccttggtatgcaacaagaccaagttaggagtacaaatgctaaaggtccttgagaagagagcggtcaatcatgtccaaatcatgtagtgagcttggtgaaatttcttgcacctccatcaaacaaagtatatcagtagaaaactttgcaaagctgggcatgcgatattcgatagatcaaataccatcatctagactaacaatagtttaggttgaaacaaaaaatgtgtcttccacttctcaggtgattgtgtgcatatcataagcatgtgtctacctttgcaaatgttaggtaagtctttcaaattaaagaatttcccatgcatcttttgttcctcgatacatgacaatatatcacaagcgactatgatgatcagtttgtccaatccctattccattttgaaccttctagagtcctctatattcctatctacattttattgaacgcaacaagaagttcttaccataatgatctcaattgcattcccaaaattagactattgaagcatagttctggctcataccagataaatacaatccaaaattcttccagcaacaaacaaaaatagcactcgcatgtgcctcataattactaattccgcatatcagcacaccgcacaaaatccaaaattttatatatggggactataatctcccttctaatcccctctcacactcacacagatcagctaatgtagagaattttagccataaatccatcagaaccatgaaacaattaaccatcagaaattaaacatgcatgcatgattatctacaagcaaacctagatatcccaaagtattattgttgcaaagaaaatattgctgttgatctggttcaagatcacaacatgatctcctagaggaatacaacactgcagacaatggtagctgacatatatgtgttatcctccctaaggattgctggttggcctccatacatctgtcacatacttacataccgggttgaaaattccggaatgaaaatttggaaatttccgaaacttcgggtctattggtgggtcccgatagacagtgagctccggtcaaaaatttcggcaaaacactgttcatggcaaaatccccaattttctggtaaaaatccccagtgtccgatcccctcctcactcacctttatccgccgtcctcccccaacagctcctcccatcattccagcacaagcgagcagcaccagcggcggttgctcgaaccagaggcagacgggtggctggagtggctggcggtggctccgcggctctccggtgtgacgacgacaacacaagccacacggcagcgcgggcctcgcatcctcatgctggagtgccagcgacggctccgcggcttcggctcgacggcgacacaagccgcagacctcgcatccttgtgtttggttggagtggccggcggcggcgcggctgtcgggcgccgccgcgacgacgacagaaggcacgcaagccgcagaggacgcgacgatacaatccttgcgtttcattctccgatcctgtccaaatttctgtaattttggattggatggactcaatgcatgtttatattctgatatatgtcaaatttcagtaatttttgttgttcaaattcaaattttgtttggaaattttgttcgaaatttccgaaatatttctgaaatcttgttatttcgctgacccccgaaaaatttccctttcccgatagattgaaccctgcttacataccatccgtatcgagaaagtagagaggaaaagttaagcccaacaaagaaaggagaagctgcaaaagagagacagagatagagggcagaggggaatgtaaattaagagagaatatttaatgttggatccatagttggataaaatggattgcaatatatactagtttctatttaaagtatccattttttatgtgccaagtatagacactcttaacagtgtctataattgggaatgctcttatgttgttagatgtttgtgtccttgtatatatcattatttggtcactagtagaaacttagaatacctagagtattatgctctgcactgcaaaaaaatatatatatgttccacctagcatgtgtttgtgtttatggtaagcatgtgcttatgtgtttatggtaagcaactgtgtgtatttgccacatttagttttatttttggattaactcggaaaccacaattcacaggattcaaccacccatcaatcgtgacatatcttcatcccttgtcaaccaggaaagtaaccaaaatgtatcatcctactctcacaggtcgctgcttatgtttaccactggggtggtgcttgaggtgaattagatagcaaagcagtgtccagcacaaagcaagggcccctttgaatcaaaggatttatgtaggaatttcataggattcaaatcctataggaaattttcctatttggccctttgattcaaaggattgaagctttccaaatcctatgaaattcctatggaatgacacattgcatgtagattttggaggaaatttagcaagagctccaacctcttggaaaatttcctttgagtctatctctctcatccgattcctgcgtttttcttgcgctccaatcaaacgaccattcctgtgtttttcctgtgttttgcaatcctctgttttacacttcaattcctgtcagaatcctatgtttttcctattcctccgttttttctaccctgcgattcaaatgggccctaaatgtgtcttctacttcctgactatttgtgtgtttatcataagttagtgcctatcttcgtgaatgttagataagagtttccaaataaagaattgcccttcaattgtttttttttttactggggaaaactaccagggctttgcctagtagtgtaattttatcagagagaaaatatgtacaaggttacatggaaaacactaaaaaattacaaagttttcattgagaagaatgtgatcaatcatatccaaattttctagcgagcatgatgaaatttcttccacatccatcaaacagactatcaatagtagattttgcaagactaggcatgcattgttcagtagatcaagcactattgtgtctagggcaacactagtaagctccaaagtttttaggtacatgatatgtgtgactgaggaacagaacttgttgctgccgatgacactatgcttagtcatggtgttacatgatacatgctatgtctaacttagtagccatatatgcaatagatgtatgttgtagtgaaagggcatagcttagagaggtgtagaatactgtagtctttgttatcattcacttcttcctcttcttcattttcatcacctggtagatctcctacatgaggcagtagagcctcttcattcaccaagtactgagcacctcctactagtcatattccggctcctcgttgccgagatacttggtaggaaggggaccaactctattggggcatccacgtaggagcctaagggcatgcaaatggtggagtgggcgccactggacgatgatatgttgttccagctaaggaggtcaagccacttggatgcagcgagctcacgcaccatgaaggctcctaccatggccatcatcggcaccttcagcttgtttgtcaccatcacctagcaacagcataccgtagggttttcccgggtagtgatggatgtggcaaggacaaattttttcctttttttctttggctctcaattttcacttattctaatatactttttagtctttatttttgttttttctacaagcagatggcaatggcacggtgaccaattccaacccaaagctgagctagtttactccgattactatgcttgtactcacttatatagtgttgcccgcattttcctagcgttgtccatccctccacctaggttgagtctagtctggcttagaggttaggcatccagctgtttggttgtttgcgtgagcttagcctggctagcattaaattttgtttggttgattgtgtgagagagacggtttagaacatatttcattttgttcgatgcataatgtgtgagtgcagttacctatttagttggatgataaggttactgctaccatttataggccaaaatactttggaaaatattaaaatcaccttcttcaaattcaatcactatatatcatacaaaaacataaactgtagcttccatacatagtactaatcctcttggttactagatatttgaagcaatcaaactagtgacaaaaaaaagagagaaaaggacaactaaaaaagagaaggaaaaagaggaggcttcgttgagttcaccaccattgcctcccgctgtgctctggcccaccgctcgccgccatcgccatcacgacagccagatctggtggtcatgagctcgtgcctgcttgattcggctgtcctgctactggagagggtagctggaggtgttggagggctctagcagggacaacgacgtgaggaccagatggagggcgacagtgtggaactgatgaagggcaatgatggcaaactaacggcaaggttatgtcgacaatgacagcaatgccccttgagcctccagatctatgatcctctcaagccctccttcctctcgccatcctcctttctccatgatctagatgaactagagatcttgggcgccagattttcagcagtggagctcttcgcccctaatccagctcgtcgcagctaacgaaggtggcaggagggaactggttggtgacttcattgcaaaaccagcaaaccctagttttatattttgggggacaaattactaggcggacaatgtggtgactggtgacccaatgtcagcccctggtacgcggtggtgaaactcatggacacacggatgcagggtgggctgtgctactacacgcgtcaggccaggatgagcagtgaagcttgatccggccattcctgatcagtctagctgcgggcattttgaatctgttgggactgtcttggacatgtgcaggcaaccaaacaagtagccagttgcatgcaaagatgcaagtcaggccgatacaaccaaccgaacatgtcctatattcatgtgttttaatccttctttttttgacatgaatttctttcctattccctcgattttcctgtactatatttttccaatcctgtgttccaaacaagcactaaaacctttaagaagagagcagtcaattatatccaaattgtgtagtgaacttgatgaaatttgttgcacctccatgaaactgtctatcagtagctgattttgtaaagttggttatgtgttattcagtagatcaaatgccgtcccatcttgagtaacaatagtaagctctaaattttcaggtattatggtgcctctcgctgctaccattgaaataatacttgaggttgaatagaagagaataaaatggtgctcagcaccaaaaaaaatgtgtcttccacttctagggtgcttgtgtgaataccataagcaagtgtctatctttgtgaatgctaggtaagtctttcaaacaaaacagttgcccttctgttgatccttgatgcatggcaatatatgatggagcgactatgatgatcggccttctagattcttctatattcctgtttccattagactattgaaattagaatatttcttacaataataatgtcaattacatgcccgaaattagactattaaagcatagttcttgctaagaccagataaatacaatccaaaattcttttagcaaccaacaaaaatagcacttgcatgtgcctcataattactaattctgcatattggcacaccgcacaaaatacaattttttttatataacgggattataatcacccttgtaatcccctctaacactcacacagatcagctaatacaaagaattgcccataaatccatctgaaccatggaacaattaaccatgagaaattaaacatgcatgcatgattaactacaagcaaagctagataacccaaagtattattattgcagagaaaaaattgctgttgatctggctcaagatcacaacaagatctcctagaggaatacaacactgcaagcacaaaaagaaaacacaagcaggtccgcctcttttgtacttcgttctcatctttgtcttctttgcgttgttctgtcctcatgtatttgttgccactggtttcttcttcttctttggcttcatcgcctagtagcttattcttctccatcaccccgcagccatgcaccttacggttttatccaagtagatgtggatgtagccattgctgattttttttttccttgtatctctgctctctttctttggctctcaggtttcccatcttttatctactttttaggcttgtttttccattttttctaggatcagctagcaaaactccaacctaaagccgacctggcttgtgccgctcgttgtactcatactcactttatatatggcagtattggcaaataaaaatgtttggaaggcagatagtagtgactaaagatatcgtaattaaaaaataaaatgtctcttaaaaactaatctgatggaagatgaatgttgtggtcctttcgatatactcacacttgtttaccggttttcatcctgtatacatgtataccaactatactgcattaataaataataaagtatgatgaatgtcagtaatcggaataatatatactagttgaatgcccgtgcgttgctacgggaaaaattatttgtatcataagtataaatcacaccatgtcacctactaccttagggccaggattgttttcgtctgccaagacctccgcctaatctctcatcactaccaggaagtgtaagccaaagaggcgtcgtgcttacacattattctacaacaatattatgctcaccctcctgagcatgtgcagtgcacatttgcacaacatatatacactagagaatattataagcacttgtaaaatttggaaatattgtcatatacaaattcatggcccattgccaaaagactcgaaaataaaaacccaacaaaaatatttataaattctatacaatcactttgatgtataaagatctttgcaagtagtacatttgctatttccttaatataaccattggcatgacaaaactttcaattccctataaaaataatttacttcaactatgatggttccacactattctgtcaaggagaacagagaggagagagcagagagatgaagagagggaagatggggagagagaggaggaagaagaggatgggagatcaccggcaccctcaccggggacgagctccctccgcagcctctgctcctcatggcatgtggcggcaggtgggacgtcggccgtctctacacatccccacacgacgcacgcgacaggtaggatgaggaagaaaggagaggggagagaggaggaatgagagaggatgacatgtggggcctacgtgggccccacatttattattattttgtgtgctgctcacatgtgggcccactgtttttattatttttctaggatcgaattaccacctaagcgccacaccaatgcacgtgtcacgaagacctagtcaaaccaaccaagtaggcgccacgttagccaaaaccaccgagaaatcatgtttacactgattttgatagtgaccagttatatctggttttgggttaaagatgaaaatgggattcggtctaaagttaacactggtagagaaaccatctttggtcggtcgacccaaatccataatagtcccggttccattaaaaaccgggactcatttttagtcccgattaataagaggaagatctttagtcccagttgttgttaccaaccgggactaaaaatcatctttagtcccggttggtaactccaacccggactaaaattcatttttagtcccggttgatttcatgtcaggccgtgtcagggctctaggatctttaatcccggttagtaacaccaatcgggactaaaaacgttccgattggtgttactaaccgggaataaaaatcaaaacacactatataatctatagtaccgatcatcttttcccgtccacataacaaactccttcctctatctcttttttttcctctctaacttcttatctctttccttatctctaactcccctcctctccttccttttttccttcaccacacagtgaagaagcgtgcaggaagccggcgcggcggctgcggcgggcggccagcgcggcggcgccgagggccatgcggaggcggcctgcacggcggcgcggggggccgcacggtggcgcggaggggaggaggggaggcggcagtggctgctggccgaattgttttttctttttttttttgagatgtgaatctgtgatgtatttttgtgtgagatgtgaatctgtgacgaattttttagaaccctgtgatgtaatttttttaagagtttgtgatgtatttagagatgatatatttttttaagagtttgtgatgtatttggagatgatttatttgagaatttgaggatttggagatgttctgtgatatgtgatgatttggatatgggaggggatgatgtgaaatcaatattcaatattaaaaacagaaaaaaagaaaaaatatctttagttccggttgatgttactaaccgggactaaagatgctccccacatcaaccgggactaaagatggggattttagtcccggttggtaacatcaaccgggactaaagatcgatttttagtcccagttatttgaactgggactaaagatagcgatctttagtcccggattcgtagtcccggttagaaaaccggtactacaagggggttataaaccgggactaaacaacacttctccataccaaatgaacttattcctttctcctgttcacatcgaagtcgcgcctgtgcatcgcgagctcatgagtcatgcacgagtagttcacgaccggctgaattccaagactcggattcctcgtctcccctctttaacctgaaactaagatgtgtttcctgcgacccttctcagaacctgattagttcccacgcagaaactttttattccgtcatattaaatgtttagacacatgcatagagtattaaatatagaaaaaaactaatcacgctgattgcgtgtaaattgcgagacgaatcttttaagcctaattgctccatgatttgataatgtggtgctacaataaatatttgctaatgacggattaattaggcttaataaattcatctcgcagtttacagacggaatatgtaatttgttttgttattagtctatgtttaatacttcaaatgtgtgtctgtatatctgatgtgacacgccaaaacttttcgttcgcaaactaaagaaggcctcattctcttatccatccaaatgatgctctctcctcttccaccaacaacagcagtctgcagctcatagctgccattcaacaatggagatctttctatcctcttatgtttacttactgctggtcagtcaggatataggtatatcaatgcatctgcttctttcgggctccatcctttttattcgctggctgatttggtttcttgcacactacccaatttcaatccacaaagaaggctctggtagctaatgaatttctttcttttattatagacacttgcctgacaagattgcaagactccagtgtataaacatgtgcaggtcattgcagtagcactcaaagatgagttttatataggaacaaacatgatcaaggtgagtatatatttttctaaaatcatctcagaatgtcaatttcaaggagaataatattcttcagttttctgtccagtatctaagcatctccctaaaattcgtcatgaatgaattggctacagcagtggcaaaagggttcgaccatgaaaattgttcttcttattttattaattgtttttataacctacctttctctaggatattttcatttttcactttgtaatgtgaagcaaagtcaggtagcggtctcaatagcacaaatctatttatctataatagctgaaaaatatcatctgtaatgacttaggcgtccgttatagtacaataggtacataatgtgacatgtcatctgtaacggttggtcgaccattacagatgtgtgtcatatgtaacggctcggaaccatgagtcgttatagatgtaaaaataattaggcaaaaaaaattacggttcacatcttgtgaaccgtcatagatagcccgttacagttgtgagaatctgctagtgtctattggtggtctttttttttattaatgttctcaatctgtcaatatagtcggcactagcgggcatgattcgccagcaagcgtgattattcaatgtacagaacgcaccaactgaagaagagaatgagctgtttggtccagtcagtctcatgctcccattgacacaaagtttattgcattgtataattatttaccgctttcatccaaatgttctctgaaaagaagatctaagtgcatgctatctttatctgttgtccaattacatatatgtacacatgaatatctacaaatctccgtttaatgcgtggtatatcgtctaattcttttataaggataacgaccctccaaaatttcttatttttctttcaatccaaaggaggcacaaaagggcagaaagagcttttggtgtcattggaaaaaaaaactatttcaataggtttgacgaccccacttagattttaattgaaaggagtcatacatagacccattttggaagcttaattaatattctaataagcaactggttggtatttagcttttaagagtttcaaaacactaggtatcccaaattttaacttctagtctatttcatagattttgtagctacgtattttgagaagctaggtaaaaatcggaagtgttgaagccgaagaatttgaggtgttatgttttttcttaagcttatgtttcccagccaaaatttgaacatatatataaaagttttattcacaaattatttttcgtttgcaaatatgtcgtaccacgaataaacccaaggcatgggggctttgagacaagttgctaaaagctgccttaaacaggtccataagtcatatagaagaccaatatgtaggatttgggggggtgcctgcaaatcaggcgcccgattttttttccaaaatcggatgctgtttcaccaagtagataaaaaatgtttcactaaataggttaaaaatgtttcagtcttttaaaaagcaaaaacacaaccaaatcaccttatgaaacattttgctacagcgtatgaaataacggtttccaaaaaaatcggatgttgtttcaccctatataaaaataatgtttcaagtttcaacaaataacgaaacgatgtttcaaatcttaaaaaaatgtgaaacacggtcagatcgttagatgaaaaaatttggttcaacatatacaacaaacgatttaaagccattgcaacacttaaacccatgtatattaacaaaccacgtgtccatcaagatgaaattattaaacattatcaaaaatctgctgtaacatttgatccatacatagtgaaacatcataagaacactagctgaaacattgttggtaaaaaaatgaaacagatcctccttaatagggcgtttccgttatatctggatggctgttgcaaaagacgcgtggtggggcatgcgagcgtgggctgcgcggggcgcccaatctttttgggcacccgagcactggcaatttcgaagatttggtgagtggttattcattcaaaatcctaaggatcttgcaataacgaaatcatgtggaatagaaccctccaaaatctcataaatgtactccaattaacaataatagtacatcacagagtcaatcagtggtgctagtacagtaacattttcaataataaaaataatacaagaaaactcctgtaataaagcacacctatatcactacatgtaaccacttaagcaagcaggtgagcactgcaaaatcgccaatcccaaccgcgccactgtcggtgtcggcatcggcgctggaggacctcgagctcgaaatcttgcctcccatggcctccacctcgaggcggtggtggtggtggccgtgggcgacgccgccgcccttctcctcctccgcctcgcggcaccacaagggggaggggtgggggctgggcgggcccgcgctggtgaaggccgtcgggtggctcctcctcgccggcctcctcttccgtgtgctctgctccttcccctcctccacctcttcgccggagatcagcgaaggtgcgagctctctcgtttcctgatcttgaatgcggatgcagtgggaaaggggattgggagggtttaatgctgtcggtgggtttggggggcctgcgagattcggtgcatttcgacatattttgctgttgttggagcgaacattagtggttttcttgggtgttcttcggttccatgcctccacgagttagagattttgatgccacttgaatcttgctgcgggttggaccaaatgattagtctgaatttgttttgttccgttcatcctatctcgtggaatggcgtgcaaattttgttttgctgtgttagtaggaaaacatttcgaattggtgaacgcttttttcttttttgtttctcaaattctgggtagcgctttttccggcgggtttggtggggaaagctccgaataaactttctctgatggagcagtttggcagttacagatctcatgcttgtgcaattgcgattggacttttcttttttcttatcctccaagtggaaatatttaatctcttctctatggaagactagagattcagttctttttattctttaagaaccagaaatctcgaaaacaatatttcctttatatacgtttgcttcgtatggggaagacaaataagaaagctgtctgttttgatcttgtcaaccactgcttagtaaatatctgtgcaaagaatataaatatgcccttcaaatgtagccagtaaattagttcttcagctaaaacatgaaacaaaattaactcttctgttcatctgtcatatgcaaatgttgtctcactacttttagttcctatcctgtacttattcacattatttgatttgttatattgtcctaagtgggcttctgcaattttaaattgtactgtctatttttatgagaatgatactattcgtagtaatcttgaaatttttttagttcttgttgcatattattcccattagaaatcacttggtaggatctcagtaacacgtagaatgcccatccacagtcaaccatgcatttactcacggcatgttgacttttgacatatgtgagtggtaatttgtaaacaattggctgtagcagaatttgcttatcttgacaagctggagcaactaaagtactggtcgttaaggaaggattgtggctatggtgccaagcatgtgttgcttctccaagttttcttttggttgtgactgaatagttaggatgtaatatttatggaaatagttttgatggcaaatttgtatgaatgaacacttgaagcacaaatgacaaacttcttaaactctttcactagttcgaatgggtaaatgagaaaagtggctgatctatatatccacaatttcctgaaacctaaaatgtagtagtattttgtgaacattgtgagtcctcaactattcaagtattcattcacaagttcaagacctgctattgtaccaacctaattcctgtgataaagatctgccttcccacttttgttccaacaacaaacagatattttgttgaactggaaatagttgatgttttatgaatctattactgcttgtgtatctaaaagaagattttagggctactttccaccacagtacgtttaggatacttgacataagaaacaacgtataaattgtgatgtttctttccgtagtgctcttgtcttgcatctcatataggatatttcttttgtagggaaatgtaacctttttgatggtgaatggataccaaatccctctggcccagcctataccaacaaaacttgtcgatttattgatggtcaccagaactgtatgttgaatggtagacctgacatgtcatatttacactggaggtggaaaccatatgagtgtgaactgccacaatttgatgaagtgagatttctaagtgctatgaggaacaaatcctggggtctgattggtgactccattcttcgtaatcaagttcagtcactgctttgccttttgtctaaggtaaaagttatgaacattacatattttcactaattcactttcccaaccctgttatgaagcaatgttcatgctttccttgaataatcatgttcctctgtgcacctttcctaattcttaaatataacttaataagggatgatatatgatagcaagcaagaataccagataagtttcatgttaccttccatgcatactgaacattatccccattagtgttatacagataaccatcctgagcagacctgcttgctgttttatttaggctgaagaacctattgaagtgtaccatgacaaggaatacagaaacaggagatggcacttccaatcatacaacttcaccgtgtcactcgtctggagtcccttcctcaccaaatctgaggtatttgaaaatgagaatgggcaatccacctctgaaatccagcttcaccttgacatacttgacccaatctggacaagtcagtatgagaccttcgactatgttgttattgccggtggacaatggtttctcaaggtcgcggtctactgggagaatgatagggtgataggctgccattactgtcaggacaagaagttacgtgaacttggatttgaacacctctatcgcaggactctgcaacaaatcttcagattcattgcatcttcaaaccacaaaccagctgttctcttcaggacttgggcacccgatcacttcgagaacgcggaatggttcaacgggggaacttgtagccgggttttgccttacaagaagggagagtacagcggaaaagacatggatcgtatcatgagaccaattgaacttgaggagttcaggaatgccatggcggcactaggtggttcgcggaactctgcgaatctgaagctcttggatacctacagcatttcgtccatgagacctgatggccatgttgggccttacaggtatccattcctgaaaggtgacaaggatgccaaatcagttcagaatgattgcctgcattggtgtgtaccaggccctatcgacgcttggaatgatctcgttatgaagatggtattgggctgatgaagcctctgagataatactgaaagagtaaaatgcaccagcggtccttaaacttgtcaagaggtttcacttaggtccacgaacttgcaaagcgcacatcgaggtccctaaacttggtttattatatcatcctggtctaaagccacgtttgaccgtggtcttgtctacgtggcatgccacgtggacgatgacatggattttttgaaattttttctccctccttccttcttttttttctcttttatgaaaagacgatgacatggatgacgtgtacaaggcattttcgtcttttcgacaaggaagaaagagaaaaaaagaattaagaagggagaaaaaaataaaaaaattccatgtcatcatccacatggcgtgccacgtaagcaagatcgcggttaaacgcggcttggaccgggatgatacaataaaccaagtttagggacctcgatgtgcgctttgcaagttcgtggacctaagtgaaacctcctgacaagtttaaggaccgccggtgcattttactcatactgaaaatgcagggtttgtttcaagcacattctgcaaatctcgaatcagggtcagtttcctgtgctcggtcgtgtactggtttaaccgaaatttgtaactagtaaaacctaaattttgtggttgtaaatcatatttcggttttgggccgggaagtggcttattgtttaatgtgtgcggctgtaacttttggaagtcaaatctgtttgcctgctctcatctttatgtgaaaattcagggcatgcagtaggagaaagttctttttgataataacatatatctggtcaaaggttattacagcattgcaacattaagttgctaagttgaaacaattaagttcagatgtcttgaatcgtccgcgatcgctaatcggcgcgccaccagcgcgcgtttcaggcccataaggcccagcaccggcgcgcgcctccttccacgctttttttttcgtttttctttagcgatttttttcgttttcttttccacttttttctgattatttttttaatctttagcatgttttgagtttgaaagtttttaaattttgagttaaaaagtttcaaatctaaacttgaaagttttcaaatcttgacttgaaagttttcaaatctcgatttgaaagttttcaaatttttcaaatctggacttaaaagtttttgaatctagttgacagttttgaaatttgactttaaagtttaaaatttaaatcgaaaattttcaaatctaacttaaaaaattttcaatctattagtaaaaaaatcttcagaatctttcctaattactatcattagtgttaagtatattaactaatagaggtagttaaatatattaactaatagtgttaatagaggtagttaataggggagaagtgctcgctagcggcgcgcacgcgctagcttggtgccccctgaatcatctgcctcggccctcggcaatgtcagattctcaaaaaggcttgtaatctgttcatagcagtgctggtcacgtgcttgttgggcctaggcatgcccttggaaggataatgccctactatttttaatgggtcccaccagtattattctactcactttttatttcctctctcttctctgcctttcccgctagtggaggaagctgaggctccgggctgaatgccggcccaagcagtgatagcgtcctcaagcacaagcgtcgggcaaagtagaagtatataggtagtacgtggtcgtcctcaccaccagcctaccaccaccaactccatcgattcttctccgctgccaccaccttcccatccccatccatggaatagatcgggcgctacaacctctcttcatcagggccagaagatgaggacgatggtgccgccgagcttgctagatccggcatggggctcggcggatctggccttgagggtggtggagtaagaaaaagctggatgacggcatcaccgagctcgccagttccgccgagagcaccgacttcatttcccgccaccatcttcccttctcctcacatgtgtctctccccaggttgccaccaacgccccgtcgagctcgtggtggtgaccttgcttacaacggccactcgttggatgcctgtcaccgcctacatgtgttgtggaggcgtcgcatggggccacaccctctcccaacgcactgctcgagtcgtgcctcgtcgcgccctaacaaatccctgacaaggaacataggtctcgacttgtttctgcagtcttcacatggtaataggagaggcaaacatggcatgaaatctcttacatgagaggctggggctgaacgacagttaggcacactgtaaaagccctaatgaacacgtaacaaatccccaaagtagtcatttataccaaagctataaggattcgcttaggccataacagaacaaccttagtggaaattcataacttagctacactccaaaattcataaatttagtaagagaaaaaacatcgacacgattacaaatcgagcatttgaatttcctaaaaattgagtgttgtttcactactcgtaaagaaaatatttcacccaatagattagacagtaaacacatttaaactatgattgaaacattttggtgtaacatatgaaacatcgagtttcacgctattaaaacaccaacaaatccatatgaatcaatgacaatgttatgagacaccgtcaaaattttcataacaacattttaatccaatacaaagtgaaacatcaaaagttcatagcgcatccatgctaccggcggtgaggcatcggtgtccatgccgacctcctggaagaagagaaaagaagggacgcaccacctatattcgcaagcttgacacgaaagtcactgcatgctgccgcatccacatcatatttttcgacgccggtcactacgctgctgtcgagcgacgcccacgggaccagacctccctttcccctagcttccagcaacacaacaaccatagatgttcatttggctaagttgtcatgacagaagaagagagagggagggagagagtgagagagatgggatgaaactagtggataggaatgaatagattaccgttcatcgactaaaacaaatctgagccatcggattgaatcggaggcctggatgaccaggatgtgtgtgggtgtgggcatctgatttttgcctagcataggatgcccgggcgggagcattctaaaaaaagaaaagaaaaaaaaagtatctaaagaactttcgtaattttttttgggtcaaaaactttcagacgtaactaaagtataattaaaatgtaattatattttaactgcattgtaactataagtgtaactacgatattactatgtgtagatagcattgggtttttatgtgtaacatgtataaaaatttctttctagcaattttctctcttaatgcatagaataaatctcgaggtgatccgatgtttataaatctgaaagttctagggacataaaactttcataagttttctaccaaatctgaaaaaaaaaatggtataacaacaaaaatcaacaaaaaagatgtagtcagtccaagtcaatctcggatgcactcctcgcacaaagttgatttttcggacaagtttgatacatcgattcggatttaggagcacgtcacgtagcgagaaaatttcgatcgaaataataatccctaaaactttcatagaaaaacaaaagattattttgtgcttcaactcaggcatataatcgctttgtgcttgtctgcttagccacctgtatttagtcagattggcagcagcttaatccgtcggctaaattagtaccagcgaaacttgctggtcatattgttgacggcctgaatctgcagctccaggtcacggatctgcctgcgcttcgccgccgcgagcacgagctcctcggcgcgcgcgtccttctcctcctccgccgcgagcagccgcgcctcggcgtcgtcggcccgggcctcggcatcccgcctccgcgcctccaccgccgcccgctccgccacggccacggccagcgcgcgctccagggtgcccacctcctcctccaggttcgccgccgcctcccccaccagcagcctccgccgcagcagcgccgccgtgccctcctcgccggcgtcgtcctccgccgccgccgccgccgacgccgcgccgcccctgagcgaggccagcaccgacgagaagcatgacagcggcatgtttttgagtcgcgttgagaaaacgaaaatccaaagacggcggcacgtagagaaattaattacgttgggaaaaagtgatgagcccatgggcttttgataggccgattattacgaaggaatacgagtccgattacgatgggaagtaagacgaggtgtcccggtctgaatcgaattacaccggtctgaatcgaatacgttgtttatacgcccgaacaaagtgagcgaaagtggttccgagtcggatagtatcgcggagaaaaaaagagttccgctatacatacgattattttttatacgatgtttgtacgatgaaacgtctctcctaacatttgtagtgacgaaacagatccctccttcactgcaaagcccatatccaaagcccaggctcctcctgacgacctggcctgctttctcgttggtctggttgcacatccaaccaaagcaatcttctttctaatcatatcttaagcaatattcttcctaataatatgttatatagtaattgtactcagcactcatttatcatgtggcaggttaagcaaattactcatacatatatgttccttgcaccttgcactatcaaatagaattcccttctttggttcttgtaacatagcttcctctgttgattgctcatttgaaacaaacttctcaatttcttggtcatctgattcattttggacctcctcaataataaaatcatctttgtctgatatggcaatatcatcttctacttcattggtagataaattggtctccattactgaaacatgtaaattgaaacaatggcatgttttgcaaagcaaaaattcagattcattctataataaaaaagaagcatttcatggccatggacattacccaggaccaaaaaagaaagagagggagactagtgtaccaaaaaagatgattgcgaagctaaaggaattcaggcaaataagatggcatacctatgtcttcgtatgccgtatgctctctggattaaatgcagaattgcagatgcgctgataacatggaatagggaaagtcaggtttagggtttaacaaaggaagatgtaaagttagatgcaaagaggctaattgggctttagggcccatgacgctcttgactgccgtgtgcgcatgcgccgtgcgcttgagttaggttccctgccgtcggcgttgttacgtttgatggtaccaatatcgtacaaaaaattcgtatgcgtagcattttccagaaaaaaattgaaaatattttttagtttggacgcggataggcgcggctgccatgcttgggccgggcggctgggccgagagggaaagagggagggaggcccgggagagagagaggagaggaagaagagagggagggaagagagacttgggccgcgggccgagggagaggagggggactttgggccggactgggcccaaaggaggaaggagggtttatttttagtttttctttttaataaactctaataattgttttttttcttaataactattttccgtgctctgaaaatacaagtaaaatttgagggcaccttttagaccaaggaggatttaacggaaattctccgggcaacacgaatttttcttgtatgtattttagtgtttgtcaatttcttttcgaattttaattaattctattattccttttagagaatgatttttaattcgggatgaatttatcaggacgtgacattggtgataaggtggaggagagaagttaggagagagagagaatgagccacccccttatggcatagcttgtgtgcttcaattgtgcatattgatatgacagaagaaagtgatagttttagatggaactttcatcaaaatggtcaattcacagtttgatctatgtatttagctttaataataatggttatattgagaggaataagattaattggaaacttaagatgcctctcaagattaagatttttacgtggtatctacttaaaggaattgtgttaactaaggataatttggctaggaggaattgaaatggtagtttaagatgtttttttataaaaaatgaaaccatctaccatctattcttcgattgctatttttcgagatttctttggagttactttggtttacatcctccacaaagtatatctcatatgtttgggaattggcttgttggtgttgataaaaaaattaagaatcttattcttgttggagcatccgctttatgttgggttctttggcttagtaggaatgacatggtttttgatatatcaccatcaaaattttatttgcaggtacttttcagggcaacgtaattgctccattgttgggcttaattataaaggtgtgaagaagatatcagcttaattaatgatggcatgtcgtaaacttgagtcaacgattatgcaactctttgttaactttggatggaggttctcaaatagaattaaatagttgtgggatctttatcttgtgtcagtatatattagttgtgcttgtttgaaattttcattggactcactatgtgagtttgctattgtgtgaactatgtaataattggttgtagctcgtttgagcaaatgccgggatattttattccattatcaaaaaaagggggcaatctctatataatctctaagaaaagtgcaatatgttgcacttgctatcttttaattaatgagaagatgacatgacttaaattagatgtggtatttacatctactacaaaacttgtcctaagtactgcacatgaaccaacccggggtattgaagtaataaaatttattgttttgcagacaggtggtaggcattgatggtaggcaagaaggtagaagttggtttattttgggacaaacttcaatctctataagttgttttatttcgggatagagggagtagcaccgtacaagatgacctgggtatgcagacttattaattaacaaagtaaaacacgttagtgtgggcatgtcggatcgtcgcgcgcacacgcgtaaatttatgataacatgatagccggcaggtagatccaaaatataggaaggagcatgtctaaaataattagccatggatggcgcgcaaggtagctgcttcattaattcagttgcgcacccagatcatgtcgtcctgaggcaggaagtggcagatggccacgctcccgggcgccacgccgagcctcttgtatgcctccgccaccgcgccgtgcccgtccacgtccccgtggcacgcggccaccgcctgcgcccttgagcccgtgcaacccgaacacggcgtacgcgtacggcatcccgtggcatgccaccatgtcgccgccgggcaccgccacgggcctcacggcctccaccctgtacgcctgcctcggcgtcggcgtcaacgtgctgatcacctccgtggacacggcgtggacgtcgcgggtgccgaggctggacgcgacgaactcgaccatggactcgagcgacgtggcgcagtagtgcttgtgcttggtcgtctcgccggcgagccgcgcggcctcgcactcggcgagcgtggaccacatggcgtcggcggtcggcgagacggccgggatggagagctgggagaggatctccgggagcctttcggaggcgaacgggacggactcggcgcggccgcgggggagcagcgcggcgccggcggtggcgcgggtgaagtggagcgtcatcttggagcccgggaagaggtccttctcgaggaagaacacgttgcccaccgtgtcctccttcgaagctgagcccactgagctcgctgggctgatgaggtcgcgaatggcgccgggcatcggcgaggtcgggagcgcgatcttccagtacatctccgccggcgacgcggcatggctggctcccgcggcggcgacctaaattgcagtcagaaacaagttgaattgaaaacaatcagagccaaaagttgcaactagaataagtaaaaattgtattatgttcaatctctaaataatatatctctctctcccaacttaatttatctctgttctagctcaaaactactaaaccatacaaagagcgatatatatgtgcttctgctcaccaaaaggagtaggacagcagcgagtgacctagccatgctaattaacgagctatcaaggacacaagtatatgatctaattcactgataagagtgaaactgagcacaagcagttcatagcttttgggagctatttatggagggatgctggaagaatacgaacaaataatacattgcattggccccactggattatgcagaacaaaacaaatatgtcatgtaggaaagatgctatatcgcattcacgatcatgccggatacctctattattgagcaactaagaagttagcccgcatgcatcctaggctgcatttgagacatttataagtaataggttgattgtgttaaaatgtcgtatttgttactatatagcaaaatataggtatatggattttatatcatcggtttgattataaacagagcaatagttagattagaaatcagacctggagcttataattgtaaactatttctcttttagtaatacaaaatagcaacggaagaggaatgaaaagcgtagagctcgagccaaagagggaaggagtaggtgtgtagtgatgggcacaggtgagggtaatgtggaggggattttttctttgtaatttttccaagtgattgaagtgaaagacaattattagatgctattttcctaggatttgtaagattttttttaaagatgtgatacaaatcctagaaaagtaacatctaataattggttttcacttaaatcacttagaaaaattacaaaaaatgaatcccctccacatcacgctcgcatgcgtctatcactacacaccggcctactccttcatttcctctctagctcgcgagctctacgcttctcatttctctccccttcctattttatactccctccatcccataatataaggcatggtcaaacttggcacagtctttaaaagattaaatctttgacttaaatttctcatatactataaggtttattgcaacaaaattataaccatcttaaagtaaatttaaatatcaatctaatgatattaatttcaacaaacaaaacttaatttatattgtaatagttgttggtcaaatgtttttaaagttgaatattggaatgtgtgcatgccttatattatgggatagagggagtataactaaaagaaaaataatctatattataagctccatgtctgatttttaatctaactattgctctgtttataatcaaatcaacgatataagatacatatgtctatattttgctatataacaaatacaaaatttaacacaatcttttcgggagtattgtgtacagccgtgcaacatcgtcgtagtttatatatttcaccggacaagatgcatggatgaatcttacatgcagacttattaacatgctgccacacgtatagtggcatgtcgatcgatcgggccgtcgcacacacatatatgcatgataagacatgatacgcacatagctccaaattgtaggaaggagctagctttgagatcacacaatttttatcccctttcacgcgcgcgcgctcagttgcgcacccagagcatgtcgtcctgtggcaggaagtggcacaccggcacgctcccgggcgccacgccgagcctcttgtacgcctccgccaccctgggcgccgcgtcggtgtggcacgccgcgagcgcctccgccttggtcccgtcggcgccggccagcgtcaccgtgtacgccgccgccgtggtcgtgtggcacccgaacacggcgtacgcgtaggccatgccgtggcacgccaccatgtcgccgccggacaccggcacgggcctcacggcctccaccctgtacgcctgcctcggcgtcggccctgccctgtcgacctccgtggacacggcgtgcacgtcgcgggtgccgaggctggacgcggcgaactccaccatggactcgagcgacgtcgcgcagcgcttggcctcaccggcctgcggcgcggcctcgcactcggcgagggtggacctcatggcgtcggcggccggggagccggcggggacggagagctgggagaggatctccgggagcttttcggaggcgaacgggacggagtcggcgcggccgcggggcaacagcgcggcgccggcggtggcgcgggtgaagtggagcgtcatcttggagcccgggaagaggtccttctcgaggaagaacacgttgttcaccgtgtcctccttcgaagctgaggccgctgagctcactgggttgatgaggtcgcgaatggcgccgggcatcggcaaggtcgggagcgcgatcttccagtacagctccgccggcgacgcggcatgtcggatgcctcatgcctctattattgagcagaggctgatagtgtaacaacaataatcatagtgtggcctggggttacccgactccctatcggtattctttgaatgatccaacatgcatgtctatttctagtaaatttatggattcgccaatagagcaattttagtttggctcagttctatcgatggatgagtccatgagaagttagttttttttacaagctgttcaaatagttatgaatgttttttttttcaaaaaattacagaagtatgttattaattgtatcgcatgtttattgaaaaacacgcatgatcaaattcaatatatgcatggtgtaaaaaaaacaaatcaaatagtaaaagttaccatatatagttccacaattcaatttttttctcgatatagatattgaatttgaacttgtattaaaagacatatataacaggctgccataggcaacaaattaaatgaatcacaaggaacactcgacgaatacaatccctgtcagtatttgttatggccacagataaatccgcaagcacacaaaccgatatagcatttcatctcagagtattgcaagtgtattgaatcacaggaaacgtatgtttataatccaacaaatatgatttttctaaggacaacaattaaatgataggcttaagagagataggatttgatgaggacatcccagctacacttgacgtaaacaagggtgatggtttacgtcatacatcacattaagaaaatgaagatgacataaaccaagttgatagattacgtctcagcaagaatgatcaagcttatcatgatctaattacgcacagccgtgctaggaaaatacaacaagaggtgaactcgctctttgctcaacttaacccaaattttagtgagaattttatactacctaaatgctctacctttgtattgctaaggtttacacccgaggacatcatcactacaccaaggaagatgggttacgttgaggacgacaaggattacgccgaggaggattcagcccattcccaaccagcagctttttacaccaacaagaagatggtttacgctgcaacggctcaacttccaaggcttatgcgacccagccaatcaagagacgggaagcatggaatacatgattggaaagagggacaagtatagtttcgaacgcatcaaaccccacctcaatatcattctccaatcaaaagttatggcatttttactgaaggctgcgcaggagctgtagggctgtgtgcaaacccgagaaaactctttgcattctcatttttgttagccttgaccaccagaacgtggcttcttatgttcacaccttagctaggagggatgttcctagtataaatacccctctactccatccattagacaacttttgttcaattgaaaacctcatatatgagagattcctgaagactgcataagtgtcttacccctttgttcttgtgagttcttttggacttgcgagaaggctcctctggtgccccctagttcgtgctctacggcttctagttcagctgcaccatattgtgtggattagtcccggattgtggttctgtgattgctcggtttgacgggtcggagtccagggggcttcggatcattctcaccctcaccacttggtcgcatccaaccttggtaggtataaagctagttattccggatcgtggttctatgattgctcggtgtgacggatcggagtccgggaggcttcggattgttctcaccctcaccacttcatcgcatccgaccttggtaggtataaagatagttatcctcttgctgctcgtagctagttaccctcttgtgtttcggtttacgccggcactctgtcttgaacctactgctgtgaagatcgggccacccctcgcgagtgtgttcgtatcaggattcctatatgtaaataatcttagttaagttaaggtaaaactctattagtttcttcgagcaacggttcactcctggtctaccaagggactccagcatgtatctctatgatgtacccgaacgtgaaggattaagaaagacggacatgattgtcaccacatgttggctgttgcctacgtttgcattccatggagcacacaataaatgaaggtaacttctaacctagacaacacctctacaacattgattacaactcggccaagaactttcttctttatctacaatcttagtactagagcacttagtataaatactaagcgatgaacctgtcgcaaagataaaaatatatcatacttaaataagaaaagtaaataccaaagaaaatcatgaatacttacttatataaaagacaaaatcgtcgaggtacaagataggagagagtgccgacatctccggcaatcctccagtacaccccatggagagaatgtcgacatctccagcactcctccaaaactcggagagaactccgatattttgggcacttctttcggagcttcccctcattctcttcctatattctaactctactatagagtaggctaaatataaaagtgagttgtactcaactttctggtgttttgagagtgggaacttctcctccttatgtagcctgggaatcaagcataaccgccataggggaggcctgaggaagcgacatgtggaagctgtggcagtgatcagtcacactcttggttcgaccgaaccatggttcagagggaatcactttcaccgcctttcttcctcattttcgccttagtcattgtcctatgggtcctcatgacggtgcatagtaaattggcttcaattatgttagcttcatatgattagttggcccatggatcttctgctagcgtttgagtggccggaggtggttttcttcgcatggcaggtggtttt

SEQ ID NO: 9717 - DNA, 17992 bp, Oryza sativa
atcagctatgttactgttgtttcctaagaggactacatcatacaaaaggaacatagtacaggtgcaggatatgtgaagaagccaaagaaagaaggtagcagtgccaaacaacgagagaagaaaacaaataacaaggttggctgcactgaacgtaagcacaaggaatcaaagaattatggcatcaagtaaatttaccatcataaagttcacccaaggattcaaagagaggaaaagatttgtttttgctgaacttccttactttctcatttgactacacaagatacaaaaacagataattatggcatgaatacaaataatagtgatttgaatgaggacaaaacaattatgctcaaaatatcatactgtaattatgtttgcccaaacagcatcatcggcaacaatcatgcaccgttgattatcccaagaagctccactctgtttccttgcctccttaagcaacctataatctcgttttaactccttctccttatcttggatctgttgcttattcatggtgacatagggatgtctgtcacgaaattctttgacgaccttgttccatgcttcacttgtccacccgttttggcaccggtaatgtgggttattgtgctcatgaagtaaatcaactaaagccttttctggtcccgggttccatgaagctcttgattgttgagctattagacaaaattagattatagtaagtaaaatttgtaatcattaatatgaaaggaaaatacttcacaaaaaaacaagttagatactaccttttggagaaaccttcttcttctgtatgctacagctctttggtgatgccttcttttgtagatgcctttgttgctgctgcaataggcttgctttcggagatagtcttccaaacatcataactatattgcaatattttattgaatgagaaaatacaaactacgttgcttactattaatttgtccatatcataaatgttgattgcataaataaatacaaataatgcaaaaccaaaatattatctatactattcttgctagttacgaacataatcttcccacatcttcttagcaatcatatctctaatattattcccactgatcatttgattgctaagagatggcacatcatttcggtattcactgtcaccttctggtagatcgacaaaattagtaggttctatattatcaggttggttgtccaaccagccctcatcaccattaagcaaccggatcatgttgtggaacaccgcagcagctgctggaatccgcacttggttctttatccgatggaaagtgcctactttcaggatgggaaatcgcttctttagaacccctagagctctctctacatggtttctcagaatggcatggcgatgattgaataactccttgtagtctctaggtctacgatgaccacgtccaaactcctttagatggtaccgaacaccacgataaggagtaatgaactatggtgtgttggcataaccaccatctactagaaaaaatttaccatttgggacttgaaagccactattcattgctgatctaaggaccctagcatcggttgcagacccctcccaaccacatgagataaaagtgaaatttaggtcgaaatcacaagcaactatcacattttggctcaaagtcccttttctgttcctataaggagctgccttctctccatctatagttataggaatgtgagtgccatcaatagcccctatgcaattctgcagcaaaaagggaagaaaaggacagaatatgcatgagttatttaattggaaaaggaatagatattcatttctagtttgagtgccagattcaccttgaagtaaggaaagaagcgaggatttgttctaatcttccaatgcgtttggtcggcatgaggaagcttgagaaatctataggtgagagctgggattatcttgaaaatagacttaatatgccgatgaagtgtagacccactatgcttgaattcatattgtagatcttgaaagcttgcattgtgagcgagcatgaacataaatatcccaagtttctcctcaatcctcaagcctctactatcctttaacaacttttcctctctaagataattcgctattgtcttgaaaacatgaggctccatgcggaatgcaactttacaatccattacatgtccttcaaggatttcttgaagccgctctttaccggatagtcttgagatatgtctaggtattttctcactatttgtcataccgcacagcatatacatcgcaggaaaaacaaaaagcatcatatcatcgtcctcttctctcctccttttaatttcatccgccattctcgaactgattttatcactaaaagagatatagaattactatactttaaactatgtgtgagaacataataatatgcatatgtattacaatattattaaacatgaaattagaggcattcaaggtggctacatgcataaatacttttaatactttcagcaaataaacagtctgcaatggaaggagggggatcaataatgtgttcagattttgactagttccagaagtactttgtgtacttagttttgtttaaacctcagagatagcaactttaataaagtgaggatatccttctagggtaggatgtttacttgaaaataacagcctcctgttcactagcaaaaaaaaactgagaccatctgccacctgagcaagatcacataacattgtacctacaatctctctctctctccaacttcaaattacttctgttactctagtaaatatgcaggggcaagattaaatgcttcatatcaggcaaatgtaagtacaactgtatttagttttttctcaaataccttgagtaatatcaactccttcagctttacttttgccaaccccacacgcctgtgcctctcctgaaatttaattcagcacaacagattatatttttgtcattcaatagcaatttatatagctttgtatggtatgacctctagtaatatatctgaacacccagtttcctgaaactagttgtgaacatagtagcagttcagaatagataaatatgctaaattgattgctaagagtaaaataggtattcgaacaaaagatggacagctacatttctcaagttttaacaagggcattttgctaaacaaaaagccatggaaaaaattaccaaaactagaatgtatactacagtgtccacctgaccacctcatagcatgactttaaaaatttttgtatcttcttgctcattcaattggcatatagtattggtcgttcaatctgaagctcaaatgaccttggccaaaagcaaagtgatgcattctagacagcaacaacagagtgcactagtttttattttttaggtgtgctcccactgcatctacaataattcctggagaattaacaaaccaggtttctccctcacaaaaaaaagaaaagaaagaagagagcccatgttcagaaatataggatatgccaattcaaatatatatttccttgattacagagcaactgataggcaagatttgcgcacacacacagagatgtgcatggaattttctgtggtttcaggttctactactacaaaccacatcacccctccttctaagcagaacatgactgatacttcaatccatacagccactcaatacatcaactagcaacaaattcatccactagataagtcacaaaatcttttctgagtgggaaaagaggagatcaagaatcagacctgcttcttggtgtccgggctgttgccctcgaccttgccctctcccgcaaccggtgaatccgaagcgaggaaggagagatggcgagcgccggcgactggctgggatggagagcgggaaggagagcggtggcggcggctgaagcgggatggagaccggcggcggctgaggacgggatggagaccggtggcggctgaagctggatggagatcgtcggcgaccgagggcgggatggagagcggcagcggctggagatatgctgctcctggatctccaccctagagccgcctcccggacctcgcgtcgcctcccggacctcacgccgcctccaaaccctagcgcagcgaggagtcgaggaggccgagcgctgcggctggcttggaaaaaaaaatcgtctccgaggcgatttttctctccccgtgggattggtgtggattgggtggagaattactcccaccccggcccaggcgaacgcatacatgggccacggaagaaaattcgacccggccgggatggcacacggggatgttggcccattcccccccaaacccagcctaaaagaacaaggcctgaagattgggggccctgtgcgatcgcgttggtcgcactcccccgggacggctctgagcttgaataaaaacttctgcacatataaagattccaacgacagtaaggttgtgacgttgtccttccacgaggcatctgcatagcatctggtgcctaacggaataggcaaacagttgtgaaaagcatttgtattatctgttagagtaaaatccatcaccggtccctaaacttgtaccgctgtgtcatcctgatccctaaactcgtaaatcgatcgttcaggtcctcaaacttgtttgactgtgtcatcccggtccctaaacttacagatcactcgtttaggtcctccaacttgttcagttgtgtcaccctggtctctaaacaggacggtctaaaaactttatattaaaaaataattcataactttttcatgtgaactttaatgaagataaactttatatcaaaattgtagccctcgacgcgacctacaacattgtagttgagaagttttttaattaaaactgtttagggtcccaaaatattgttgcatgtttatagattttgaaattttaattttaaaattacattttgggaaaaaaatgacttaaaataaaaaaaaattcaactacaaagttgtagatcgcgttgagggctataagtttgatataaagtttgtcttcattagagttcacatgaaaaagttatgaatttttttaaatataaagtctttagatcgtcctatttgaattagatgatattcaaatccaagtttagggaccagggtgacacaactgaacaagttggaggacctaaacgagtgatttgcaagtttagggaccgggatgacacagtcgaacaagtttgaggacctgaacggtcgatttgcgagtttagggactgggatgatacaacggtacaagtttagagaccggtgatggactttactctatctattattacctctggttcttttgaactttgtagttgcgtcagttgggtgtaagtagatgcagcattattacatatatgggattatttggatcaggtgcagtcacaatagtgaccgtaacttgcagtagtagtacgcatcattggatataaattgaacggctcaggtcgcacatggtactgttcatattatcgtatcagcaaatactgttcatgtgggtactgtagcttttgatctgaaccggtgatcacaaaaatggatggtcgaagttgtgtgcagttgttaaatcacctaatcccaattcatatacgtggtatggctcccattcctttgatttgaaaatgtagtcatttatggctttccaaatcttcgaaagcatgatagagattttttatagcgcattttcagttttcatagtagcaagcaaataagccaaaatatcttgcattgtctgcattggtgtgagagcatctatttgaaggtgaaaatcagatacaaaccaagttagccttgaaaattgacaatgaaagaaaaggtgaaaatcatctacctgctgaccacatcttgaacaagttgaggcaatattagggaaattgtttttccaaacttctttaagaagattgattgttaaagtaggaacagagggttgatgaggatgaagatgagagtgaacttctttgtaagcacttttttgttgcactcacctgattgggtatgtttccagcaaagttggtcctccaaaacttgtggaataatttgtacctgtaagattgattcagtagctttctgatcaaacatttgtgaaattttttcagtgtcccatctcttatatatcttgataaaaaaatcagcaatatttataaaggcaataggtatggaagagtatcgaggacaaggtgaacatgaagacatgggtgcacagtgaagatggcatggacacggtcgggccttcacgctcgtgccaaaatttggtaaggctattttgttttcaatcacaggacgagtaatttcaccgtccttaagaaagtaggttaaaataactaaattttaaattaaaatttttttggtaccttgagatatttagtatctagagatatcaaatttgtcattaaaaatatatatctccagataccttctcaagaatgataaaattattcttataggactgacacacattactacacacgcaatacgttcacatactcacgaatgcatctcctaacaaacggcacattcctaatattgataaaattatttttaaaagtctacttaattacgcatgtgtaatatccgttggcacccaaacttgaatatcggttggtccctaaaattaatcttaaaccctagcattccacgaatattttaaggagaaaaacaaaagaccataatgcatttaattaatataaaagttgtatttgttgaatttgtagatgtggggtattgaagtaatgaaatttctcgttttgcgaattggtggtagccaagaaggtagaagttgatttattttgcgacaaacttcaatctttataagttggtttatttcgggacagaggggagaagtgccgtacaagatgacctggttgtccagacttattaattaacaaaataaaacacgtgtagtgtcgacgtgtagtgtgggcatgtcggatcggcgcgcacacacacgcgatgataacatgatagccagccggcaggtagatcgaaaatataggaaggagcttaattagccatggatggcgcgcaggtagctgcttcattcagttgcgcacccagagcatgtcgtcctgaggcaggaagtggcagactgccaccttcccgggcgccacgccgagcctcttgtacgcctccgccaccgccacgccgtgcccgtccacgtccccgtggcacgccgccaccgcctccgccatggtcccgtcggcgccggccagcgtcaccgtgtacgccgcgcccttgatcccgtgcaccccgaacacggcgtacgcgtagggcatcctgtggcatgccaccatgtcgcccccgggcaccggcacgggcctcacggcctccaccctgtacgcctgcctcggcgtcggcccggccctgttgaccacctccgtggacacggcgtggacgtcgcgggtgccgaggctggaggcgacgagctcgaccatggactcgagcgacgtggcgcagtagtgcttgtgcttgggcgccgtctcgctggcgatccgcgcggcctcgcacacggcgagcgtggaccgcatggcgtcggcggtcggcgagccggcggggatggagagctgggagaggatctccgggagcttttcggaggcgaacgggacggagtcggcgcggccgcgagggagcagcgcggcgccggcggtggcgcgggtgaagtggagcgtcatcttggagcccgggaagaggtccttctcgaggaagaacacggagcccaccgtatcctccttatccttcgaagctgaggccgctgagctcgccgggctgatgaggtcgcgaatggcgccgggcatcggcgaggtcgggagcgcgatcttccagtacatctccgccggcgacgcggcatggctggctcccgcggctgcgacctgaaatgcagtcagaaacaagttgaatttaaaacggttaacttcagatatatatatatatatatatatatatatatatatatatatatatatatatatatatatatatatagatatatatatatatatagatagatatatatatatatatagatagatatatatatatatatatacctgaagtcagaaactagttgaattgaaaactatcaaagccaaaagttgcaactggaataagtactaattgtattacgttctcatcagaaattcaatgaactccatatgttgatccatcaaccatcttaaggtaaacatgttgatccagttagtttaaaattttagctagggttccccgcaaaaaaaaaaggttagggtacgtaattttaacttaatcttcaatctctaaataatatatatctctctcccaacttatctctgttctaggcttctagctcaaaacaactaaaccatacaaagagcgatatatatgtgtgtctgctcaccagaaggagaaggagagcagcgagagacctagccatgctaattaacgagctgtcaaggacacaagtatatgatctaattcactgataagagtgaaactgagcacaagcagttcatagcttttgggagctatttatagatcagggaagcgggaagaagacgaacaaataatacattgcattggccccactggattatgcagaataaaaaaatatgtcatgtagcaaagatgctatatcacattcacgatcatgccggatatctctattattgagcaactaggagggtagcctgcgcattcgcgcgggcatatattgtagtgtatttcagatatatacttataagtaatagaccgattgtgttaaatgtcgtatttgttatatagcaaaatatggcatattgatattatatatattgttggtttgattataaacagagtaatagttagattagaaatcagacgtggagcttataattattgattatttctcttttagttatacaaaataggaacgagagagtaatgaaaagcgtagagctcgagctagagtgggtgtgtagtgatggacgcatgtgagggtgatgtggagtggatttttttttgtaatttttctaattgatttaagtgaaagccaattattagatgttattttccttggatttgtaagatttttttttaaagttgtaacatgtcatggattaagatttttataaaaatagatttgatagttgaaaataatattagtgatacgtggtaacttaatatggctctaaaaggttataaaagttgactttgtactttcctaatttttattatgtagaatgattaacatgacataatacttgttgtcaattttttaatatttcagtgttgtttgcttgttggcctatgttcaaattacgtattttaaattttacatagtaaaatatgagtaatataaatcaacaattcaaataaattaaaaatcggatgttattaggttgtcattgctgacggtagttatagaccaattttgactgtcaatacttttgtagataatggagaactagcaatgcttgcatgcatatttatttagaaataatctagttccacttgtacttgataaagtaagtatttgtttacaagagatcatcacataaatggaggagaaatgattgaaaataaccgtttaaccaatcagaggtcgacatgtggcagatatatggatggatgtgcccagaatctcattgaaacacctacaaatgggcccaaccactatgccactgggccgaggatctgtcaggagacgtctaggacgaaggactggcccagggaggccaaccacggttcggccaaccttgggttccgctgacccatgcctggctccgatcgcccaggcccaagccgaaggcggttacataccgatcttctaatgacggttgtactggtattggcgctccaatcatcatactcaatctataaaaggacctccccaacttcacttcaatacacaccaagaaggaaatcaagtgaagaagctctcttaggctgagttcgggaatgaggtttgggaaccctcactccctggcacggaaaacggagcagcgattagggggtaattaactaagtatttgcttgttttttcaaaaatggattagtatggattagcaaaaaatacaccatttagcagtttgaaaagcgtgcgcgtggaaaacgaggaagggaagttgggaacaggaggtaacgagcgcaaccctagtttacatattttgctctagtgctagtagagttagaattaaatattcttccttagttcttcatgtcttgcagagaagtcgggtatggttctagtagctcttcctctcttgtaagactttattcaataattaaatattgttttttatatagttttggtcctttactatacttgcataattattcgagtaccaacttcggtttatacttgactcgtatttattatgtagctagcttactggagatatgcaatggtattggcttagtgttcatttatttggtaatatttagtaatgtaagcgcggtgattagattattagatatcattaagtggtgctatatgccacgcatacgtaaagataggccgctgatgctgacaactcaatacgtgtattcgttcacgtgcgtagatagggctaagaaaggttccgggtgcgggtacttctccatatctttaaccggttggatagtcatgacggattgtcgtaagaaactcgacaatttggggtggtttctcgatataccagtaggcatagttgtacattagcaagcatatactaaaataactatatattaaaaatatagaaatgatgcttttctttattcttctctagttagcctagacttataatttagtgagagtactctaaactatcccttctatgtgtcattcctctccccttcctactttgtatgactaaaagagaaataatctataattaattataagctccacgtctgatttctaatctaactattgctctgtttataatcaaatcaacgatataagattcatatacctatattttgctatataacaaatacgacatttaacacaatcagcctattacttataagtatctcaaatacaacctatgatacatgcccgcgtgagtgcgcgggctaccttcctagttttcctaaaagctacaactacaatagctcaatcttccctacaagctgaacttctggctctacaattgacaatataagtggcgatatttcttgattttgcaggtaccatatttttaacggacaacgagacgatcgcaaatacaatgaatatgagacattttgaagctgatccagcctattcgaatcttcagcggttactgagttaaattcaagcaaatattccttttagcttattgcaggtgttgtggtcttgtggataacgagagaggtcaatcgcatggctgacaagttagcaaaaaatgcgagagatgaccaatgaaatccagcatttgttttgccacaatatcgccaacctagcttatccaagcagaaggtgatttgctaaggatatgaaagaccatttcagtacgtactctaaattgtatgaaaaccatgtaattaatatgtttgagcaatggaataaagtttgagttctaaaaaaaattgcatccttttcatgttctaatgcatatcatctagaatatgcttaatgcttgggctggaatatatatacacggaatggtcatcgtaggcgggcctggcctgagtaaggtgtaaacatatccgagcccttaaatggccttcctgtgaaaaaccaagtcctcttcataggcagccagttttacagccagcatactatagatgaaaacggagcggataattcatggatagtccggataaagatatttttttatatgaatgtgaatatggtatatcagagttttcgatgaatatgaataatagaaggatatccgatgaacaaaatgctattcagatatccactgaaggcatgagacatatctcatttctttctaactctagaccttcaacttacttctttagaattttaatagtagcccatctcatgatactagcccacactattaatattacttaaatatttaaatatttttttgtaaattttactatattttatattataatttcagttagacatgtatttatatcaactctgatgtacatgttaaacttaattagcattgttgactctatgatcaaacttattatataaaacgatatatttatatatgatagtatttgtttctattagaaattgaagtgtttttcatgttctgagaaatatttatttccctattcgtgtccgatcatattcgatctttattcatattcgagataattcatatttgttttcatatccgagctttcgtattcgttttcctatccgacagaaaatacggaaagaaatattgtataagcattatccatccatatccgctccattttcatcctaagcacatacaggacactcaggagacccgcttgcgaaaaaaaactcaggtggagtgcttaagaacctatttgtgaagatgactttttcgcgggcagcccgtatactctcgggagcctatcgtattaccggcgagccttctcatggccggaaacggatcctctgactttggatggaaagtcacggtcttgcaattcacttcatcccagccaaccactgcatccaacggcacacatccatcttcccctcatttgcctgcatatgttgggagtagctaagaaaatattttacgtagtggtgtatacaaccgtgtaacattgtcatacaagatgtatggatcgatgaatcgtacatgcagacttattaacatgctgccacaagtatagtagtggcatttcgggtcgtcgcatacacatatgataagacatgatacgcatatagctccaaaatataggaaggagctatcttgagatcacacaatttttatcccctttcacgcgcgcgcgctcagttacgcacccagagcatgtcgtcctgtggcaagaagtggcacaccggcacgctcccgggcgccacgccgagcctcttgtacgcctccgccacccccggcgccgcgtcggcgtggcacgccgcgagcgcctccgccctagtcccgtcggcgccggagagcgccaccgtgtacgccgccgccgtggtcgtgtggcacccgaacacggcgtacgcgtaggccatgccgtggcacgccaccatgtcgccgccggacaccggcacgggcctcacggcctccaccctgtacgcctgcctcggcgccggccctgccctgtcgacctccgtggacacggcgtgcacgtcgcgggtgccgaggctggacgcggcgaactccaccatggactcgagcgacgtcgcgcattgcttcgcctcgccggcgagcggcgcggcctcgcactcatggcgtcggcggccggggagccggcggggacggagagctgggagaggatctccgggagcttttcggtggccaacgggacggagtcggcgcggccgcgggggagcagcgcggcgccggcggtggcgcgggtgaagtggagcgtcagcttggagcccgggaagaggtccttctcgaggaagaacacgttgcccaccgtgtcctccttcgaagctgaccccgctgagctcgccgggttgatgaggtcgcggatggcgccgggcatcggcgaggtcgggagcgcgatcttccagtacatctccgctggcgacgcggcatggctgtctcccgcggcggcgacctgcagtgcagtcagaaacaagttgaattgaaaattattaacttgatttcaaaatatacctacttgctagctaacatgcatacatacttatgaaccaaaagttacaacgaaagataagtaaaaaaaaacttatattacgttctcatcagaattcaatgaactccatgttcatgagttcatccatcaaccgttttaactatggggcatatattgttcctgttaatttaaattctagctagagtaatttcaacttaattttcaatctctaactaatatatatatctctcaccagaaggagtaggagagcagcgagtgacctagccatgctaaataacgagctgtcaaggaaacaagtatatgttctaattcactgataagagtgaactgagcacaagcaggccataaattttgggagctatttatagaggaggagtgggaagatgacgaacacgtaatatattgcattggccccactgtggatacggaacgaaatatatacatatcagtcttattatcagatgtagcaatgctgctactcgatatatatatcgcattcatgcgaacatgtcggatgcctctattattgagcagtctgatagcttaacagcaatcattctgtggctggggttacccgtgtccttctcgatattctttgaataatccaacatgcatgtctatttctagtaatttatggattccccaatagagagattttagtttggctcagttctatccatggacgaggccatgagaactttttttttttacaagcggttcaaatagttatgaatgtttttttttcaaaaaattacaaaagtaggttattgtatcgcatgttcattgaaaaacaatcaaattcaatatatgcatggagtaaaaaaaacaaatcaaattgtaaaagtaaccatatatactttccacaatttgatttttttctcgatataggtattgaatatgaacttgtactaaaagacgtaacagtgccgtaggcaacaaatttaatgaatcatagggaacactcgacgaatacaatccctgttggtattaatttgttatggtcacacataaatctgcaagtacatagttaccgatatagcatttcacatcagagtattgtaagtgtattgaatcacaagaagcatatgtgtataatccaagaaataggatttttctaaggacaacaattaaggatttttctaaggacaacaattaaatggtaggcttaggagagataggattcctttgggtaaataatcttagttaagttaaggtaaaactctattagtttttttgagcatcggttcacccctgtttgccaagggactccgacctgtagctctatgatgtacccgaacgtggaggattaagaagaacggacatatttgtcacagctgcctataattccatggagcacacaacaaatgatggtaacctctaacctagatagcacctctacaatattgattacaactcggccaaaaacttccttctttatctagagtcttagtactagagtacttaatataaatactaagcgatgaatccacaatgattagaatatatcttacttaaataactgaagtaaatactaaagaaaatcatgaatacttacttatataaaagaagtatttgtcgaggtacaagataggagagagtgccgacatctctagcaatcctccagtacaccccatggagagaatgtcgacatgcactcctccgaaactcggagggaactccgatattttgggcacttttttcggagctttccctcactatcttcctatattctaactctactgtagagtaggctaaatataaaagtgagttgtactcaactttttggtgttttgagagtggaaacttctccttatgtagcttgggaatcaagcataatcgccattgtggaggcctgaggaagtgacacgtggaagctggcggtgattagtcacactccaggtttgactgaaccttggttcagaggaaccacattcaccgcctttcttcatcattttcgcctcagtcactatcctgtgggtcctcatgacggtgcatactaaattcgcttcaattatgttagtttcatatgattagttagcccatagattggccagaggtgtgtttctcttcgcgtggagggtggttttcatccataattacatgcatacaaatatttcttggtatttcttacgaccacagataaatccgcaagcgcacggaataccgctgtatcacttcaccttcgggtgaccccaaaaggatatcgaactcaaggaacgtgtgtaatccacctaaggataagacaatccaaggacaaggtaggctaggtaggctagagaggactttctatgtgttttaattatctaagctaagcaaaggtaatttcctatatgttgcttcgggcatcgacccctgctggtctaccagcgtggttccggctatagctctatgatgtatccgaacatggaggattactgagacaggattcagggctgtcaccacctgccgcctacctctgacaaatccgtgggatacacaacaaacaaaggtaatctctaacctagacaccacgtctaagttattaattactactctaatacttgtacaggaacttctttctttatctagagtcctagtactagagcacttagtatgaatactaaacaatgaacctgcaaagatggaaatctatcttacttagactaaataattaaataacataagaaaggaatacaaatgcttactttttagaagaagttctccgaacctggagcagagtgtaccgacaactctggtactcctccagaattcctcctaagaagctacactcgtcgaggtagaagtcggatgagcgccaaacttccgggcactcctccagagcttcccctcactctctaccttattctaatgtacaaaagatacaatagagcctgttgtaattcagctcaaagttgtgtctattggaatgtgagtgagctcctccttatataggctccaaataacggttaggggcatgggaattgtctaaaacaccctgcaaccacctctgggaagaaatccgagccgtcccggtgaaagcagatggcgggaagcgccatgattggttcggccgaacccaaaaactctcctcccagcctctccttgggccgggaggttgcttattgggcctctaaccacctgggttatgttttggcccaattctaaatggttttattgacttattgggccactaatccgtgtaaacgcgtcctgaatgcgcagagatgcattttgacatgacggatgtgttttctcctcaaattacctgcatacacatatttcaccaacactagtggaaatgattagttataatacttaccactaagttggataccattaagatgttaccttcgttgtcgcatagcgtgatggctccatgcgatgaagcatcgacgatggtatatggacccatccatttacttcgatgttttccatgtccgataagcttcacccgtgagttgaacagcagcaccttgtccccagcttttaactccttgtgcttgattcatttatcatcccatctttttgttctttccttgtagatcttggcattgtggtaggccttgtccctccattcctctagctcagagagctgcatctttctgtgctgtccggctttctttaagtccatgttccaagtccggatagcccagtgcgccctgtgttccaactgtactggaaggtgaaaagtctttccgtagacaaggtggtatggtgacatgccgatgggcgtcttataagcagtcctatatgcccatgcatcaggtagcttgttcttccatgccttcccaatctcattgacagtcttctgcagaatattcttgatttgtttgttgctcgtttctgcttgtccacttatctggggatgatacgaagtggcaatgttgtgctgagccccaagttcttgcaaaaagtttcaaaaggtcttatcgataaaatgagaccctccgtcacttatcaccatccgtggagttccaaaacgagggaaaataatctcatggaacatccggcgggcatgcttggtgtttgcggccctgcatggcattgcctctacccacttggacacatagtcaacggccaccaggatatactcgcagtcataggactttaggaaaggtcccatgaagtcgatgccccatacatcaaatagctcaacttgaaggttgtatgttagtggcatcgcatctcgagcagtgatccctccatgcttctggcaccttgtgcatctccgaacgaattcctttgtgtcatcatacatctatggccaaaagaatccactccaccagatctttgcgtgtgtcctgaatgctccatagtgacctacatatggggcagcatgacacttctcaatgatctgcatgccttcatctgccggaacgcatctccgtagtaagccatctgaacaaactctgt

SEQ ID NO: 9718 - DNA, 10131 bp, Oryza sativa
ccctcccccccccccccccggtcgcccgaggcggaggattatcgatttttagatgtttccctcttgtctttctctatttacaggaacagtaacccaacaaccagttcaatataagcgtgcatcaccacgacggtacataccattcctcacacaccgaccataccgcgatcttgtgtgatctcccattctcccccgtactacaatattgctcaacataaccgggcaattgctcatttgacgtatttcgaagtgtaactaccaatttaatcccattttttcggtttgattatttgaccctattttttaaaatcgaagatgaacactgaccctactccattaaagcgagttaacggtgttaactaaggggtaaatagtccattttgcccttgctttataacaaatttataacgaatttgatttatcttttacatttgagacaagtttgaaaaatttagcttcaatattttaatttgaaaattttggatcggtttaacaaatttatctttcattcgacggtttttcacaaaataaggcaaataaaatttggcagaaattttttaaaaaattgacagaatattgtcttaattttgtgaatcccaaattacatacaatgaagcaaaaacataaattatggtcaaatccaacagagaaaatatcaaatagcaactgccaccgcgcgtcggttgcccgctgcctccctccgcgcgcccgcgcaccagcagcggcgcaccaccgccccctcctcccttcacacgccggacgctccggcctccctcctcgtgccgctccccaccgctcctctctgcgtgctccggcgcccctgccgccgcctctctccacgcaccggcgctgtcgccgtgcctcctccccgcgccgacgttgtctcctgctcgctctccgcgtcggcgtcggtgccaccgctgccatcgcctcctccttccctgtgttgccactaccgagatgtgaacaagagagggtgtcgaaccctctaccaccgccacccccgacggcgcgcgtcttcccaccacggcgcgcaagagctggggatcaaccaccgcaccagctggggagccgctgccgcaccagctagggatccactgtgatgaccacgtgccggcgcggatccccccgtcccaccaccaccacgcatgcagagcaccgccaccacgcacggagagcaccactgccaccctccacgagcagacgtcggcgcggggttctgcttcacgccgccgccgccccctcagtgccgccgccgcaactcacacaagaacgagagagagaaatgtgtggatagggttcggtggatggatagggtttcctatgggtattctgggtattacgaatattagttatatttcttttttattttaaatcaaaacttaacagggtcagacgggagcttcattttcgaaaaggatggtcaaataagtaaactctaaaaagtagagtcaaattggtagttaagcttcaaaacggggtcaaataagcaattgtccctaaatgaaatgtagaccccgattttggaaatcgaaaatcttctgtgtttatccgtaccaatccctggatcagtagttggtatacacatacatagttggatcacaacatatcacgaatgaattcaggctaaaagaattaaatacttacattagggccaggtaggccaacaactatcagagaacaacagcggaagacaaaataatataagggcccggttaacatgccacaggtagtcgactggggaacgagacctagaacaagaccgcactccgatcatcttgtgagatacgcaagcgtaccgacaagggcttctcttcaacactctcctaaaagatatataaatagcaagggtgagtaccaaccgtacccagcaagccaccacaacaacaatgcatatgatagagggtttttcaaggaatggcttcaggttcttttgcataaagctagttttgtaattcttttcacaagcctaagacctagcatagactgatcaaattttaataccagttttcacattaaacaacgacggttctatccaccatccattatgatcccaaggatagcttcccgccattgaatcgtcatggttttctgaggacgtccaccttcccgcctctcaggaagtggctccaacagcataaaatcatcatgcaatatcccatcccacacaagttaagaactttgagtctagccaagtgtaatacatgtcccggtgctcaataaccgcgagcacggctattcgaatagatttggtttactcacactgcagtggatgcacactttacccgcactccgtgactgcccaacacatgagcctcgtcccaacacatgagatgcgtcacggcaaagcttttcgatgacctcgcattggcagtacccgctccataaacttaaatcctcatgcactctaggcgtccatgtttctagcagtgagaggagttctggcgctcccgggaaagagaagtctcacacatatattaaattatggttcaagttaagttctctctctcacacactcatggcagtcctaccaatggcgacaccgatgtagggcacgcctctcggccctacctcaacggctgttccaccgtagcgcacctgcctcactcaggggtgaaccatctatgcagggatactgcctccgctcggctatctaatccgctaggtctatacccatatgagaagtgcggttgtacgggggtcgtttcatgcttaacttcatggctcggtccttaattgaccggggacggtactagccttttccagataccacccaaatcctccgtccgccccaggcgaaaacagttgtttaattttatttctcctttcacaaatcatgtcatcaacatcatggcaatgtggcgctcatgtctccacatgccgcatctcaattaccttcccaaaggtaattgcccaagcatatagcatttgataaatatgagtatgcatgattctagaatagcatttctaagcaattgtcatagttgactagggactcatacgtaaacatggttacaaagatttaagggtaaacaataatcaaggcatggcataatcacaagtaggatgttcatcattgcatgcaattttatttgtaaacaaaacaatttcgcaattgggatcaacatgttcaaggaatagtgatgacttgccttgctcaggatagtccttattcttgatataattcttgatcaaccttcacctcctggaaattgctgacgttgcctcacgactaaccgatacacaaagtctataatacgcgagaaaaaccaatattcaaacaacaatcaaatatgcacaaacaaaatatatttgttgaggttgaacctaaggttgctcatattattcgcgcttgctaatgggttccaacatgctaagggctaaagtttcttaatctttctgttatcatggtggtctatttaggagctagccaatgtagtatgaatgagatacgtatctggctaatttgtggtttagtctagctaatggctatggaaggattatggctacacatgcatctatctaaataaaatggtcgtatactagaggttctgttgtcgggtggatttaggatcaatcaaataattacagtgaatcatttgtattatttattttattgatggaagctttactttaattatgaacatattttacttgtcacaataaattataaaaggttaataattatccatgctttgtatgttagagttgtttaggttaatcatattatggttacagattatcccatcacataattttacaatgaataatcctaatttacagttgaactataattataattatatgaggtcaagatttataactagtatttatctgatatacatgtttgtcatacactccctcttaatttcatatatgcaacacgcaaattaatattataccgtaccactataatgggatgtatagtatatgtgtaagcaacaatatcttattattggatcatatatttgagtagtttcttttactgtaagctatacaatacatgttgattttaagatggctctatttggttaactaatggatatcaactgactctatatatatatattctacttcacatgacattgtatcaactaattttttttaagtggtccaaatacaactagctctgtgattactctcctaaacaagttaaagattcatctatgtgtgtttatattttagttacataatcataaggctatacttgatttaaataacctataagccatggatttaattatatggccatcgaatattaaataagtactagtattttcctatacatccattcatttgagacatcacataaaattagtttgtgtggttgttacagtggcaagacatgttagagacaaaacttattacatccactctactgtacaatactaattttatttattagcatatttttaagttgactattatgcatcatcttgatattaattatttaatatttataaatatattttatcaaatagtgaattatatatcattggaaagcttatgaatttagatgaatttaggttcaagtttcactcaaatcggagctgaaatgaataagttatgctagtgtaaagattcaaatttgaattaattctaataattgtgaaatggtactgttcctaattcatttatttataatacaaccttatccacaagctatagtgactgacaggtggggtcaaggtcttgattttcttttctacagaattatttttctaagggaaattggatggaattaatgacaggtggggcccactctaacctctctcctccattctcttttctctctctcctctgttttctcctctctctcacggcctcggctagaaccggcgggcggcacggcgcgatggcaagtggtgggggagggggaggctcaccggttcggcggcggggtcgacggagacgcggcggcgaggtcgacggcggagcacggcgcggcgacgaggcacatcgcggcggcggggcacattggctcagcggcggcggcggcggcttccaacgaggcggcaacgccggggatgggaaagagagggaaaagggaggggaggtggtgggggtagtgtggggagcaatgggcagccggggaggggcttatataggcgcggggaggggtggccggctttaaacgacgacgggacggcgcggcggcgtggggctcggggcgacggcaacgcgcggcggcgggacggcgcggcgcaacggcgacagtgcgcggcgcgggcggggctcgaggcgctgatggcgacggcggtgacgcgaaggcgtggtagcggcacggggctcgaggcgcggcagcggctcagggcgacggcgacgggacggccgcgcggcggggcgcaggcgcgaggcagcgagaggacgggcgtgcggcggctcggggtgcgaggccgacggctacggctcgcggcgcatggcgatggcgacgcgacgggcgacgcgacggcggcaacgggagtggcgcggggctcggcgcggcgcagccgacggtgacaggcgatcatgacgatgcgacggcgatgacgacggcgcgcggcgcggtgatgatggcgacgtgacggcgacggcgacggcgcgcggggcgcgaggcggcgcgacggcgtgcggcggcaacggcggagcgaggcgacgacgacggcgacggcggcgcggggcgcgaggcggcgcgcagcagtgggcggcagcggcgcggcgcggcgcgtgcaggggcacggggcgcgagggggagcgcggcagtggagggggggaagggctagggaaccacatcaaacacctaggccataatgaacagtgactttttcctaattatccacttttgaggcatatttcctattaaaacttgtcccataatttctagatttcacacaattagagttttacccaatatatgttttattttagatgaaagttgaccaaaatttaatattacccatattttatatattttcctattgtattatttaaatgaggtttaaatctaaaattaacctagataattttggaggctttgagggttctaaaattaatttaaaatatcctaatgtggcaattattattacaatagcacattgaatgaacttatttgtataacaatgcattttacgtgggtctactcattctataaatataaattgagacttagtacaacattaatctaattgtttaattaaacactcacatattcttatttatgtataaagcctaatttatttatatgaccattattttatatgagtgattttcatgctatgaggagcttgataaggtgtttcaaatattaattatatattctagtgagatactctattatagatagggccattgatgtgatcattatttcatgtgtacttatatttcatgtgagattggattcaagtgaattatattcaactatgttgtttccttttgttaaatatgaaatcaggctatcaacatggtttgattatttaatatttgatttgtgatttgtaccacagggtttaataattgacttgtactttatttggcctggctttcatgtgcataaatatttatgggattgataataaatatcgtatcgttgtaaatcgtaactattgctcgggtgtaaatctttagattgatttttttccattgcgtcaatttatggtttggcaagcaataacaaccataacttccagcatgatgcaaaaagttttaaaaagttcgaaattttagtgatttttaatgtcaggaattttcaggatgttacatgaaacaacacttatcttattgcacttgcacatcttcatcgatctaagatgtttataagtccagatctgtacgtagtcctcactactacgaaaaccatctttcgtggtggccattttagattttcgctggcagaatttggagccgtcacaaagcaaaggccaatgaagacatattttcgcaagcagacatacgattttcgctagcggttgcgatccgcttacgaaaatcgattttggcaagcggacaaacgatttttgctaacggttgagtgtcgcttgcgaaaacccattttctctggtggttgcctaaagagaaccgccagtgaaaatcaacccaccccgccaaaaattccctaccccaaagtcaaaattccccactcggccgaattcaaaacagtccatatttggaaatggacataaacatcattcaaacacaatccaaatccagagcatcacaaatacatatataatattggcatcaatccaaatacaacattgacatcatcaacagaacagacacacagattaacctaacaaaaacacaccaaaacacacaaaaacacacaaagagaaccaccgccgaagccatcgggacgagtcaccaccgctgccatctgccggtcgcggaaccaaaacacacaaaaaaacgcttgctggcagcgtcgcggtcgtcgtcgtcgccgcggttgcagtcgtcgtcgtcagctccattgccagggacgagccgccgccgtcaccaccgacggggacgagccaccgccatccgccgccgggaacgagccgccgccgccgccggggacgagccgccgccatctgccgctggagacgagccgtcatgtgctccccgcgccaccgccggggcagatccatgcgtcctccccgccgccgcctctgttgtgctgccggcggcagcctcctcccctcagacagatgggagaggaggggatgggagagcaggggcggcgcggggagccaccggtcgtcgccgccagagccgccgccgctggtcgtcgccaccagagccgccgcctccgtcacaggtggagaggccgggagggaggagagggaggagagagaagaggagtggataagaagaggaggggatgtgtggtgttttaatgtggagaagaggatgaggatgggtaggtgggtgttttaatgtgacagagatttttggttggattttcactggcggttctgtttattggccgccataaaaaattggactgccagcgaaaattatctattttcactggcggcgcacctaattgaccgccagcaaaaatagacatattttcgctggcagccgcattagatgggccgccagtgaaaataaattttcactggcggtcggtgcccctcaccccctcgttataagtttgctggcggttttcacatttttctccagcgaaaataatagaccaacaccatgaaaaatcatttttctagtagtgcctggtcttctagcaaaaggtgattctctaaatagtttagtttgtatgagatctgtatgtaacagatcgaatgttctaaagtccaaaatacatgacaagaatgtatgggacatttttcatcaaagaaaaagaatgaatgggacatcacaacattccatgatcattattagatcttgtaaacataaaacccttatctctacatgccataagagttgtagtgtttccgccccattttttgtcgtattacatttccgtcttccgtctcatatggtcatggacgaaaaaatggcagacacactatggatttttaccatttaaatgagatctggttttccaatgcaaaatatcactagtagatgaaatgatctttagtaccggttctaaacccctatatattaatcccggttgtagcaaccaagataaagaaaccgagactaaagttcttgatctttagtatcgattgaaataactggtactaaaaatgtacaccaagtaaaaaaaatatgtgggatgtgagatttgaactcaaaatctctctcctaagtccttgcacgtgttactatcccacctactacacacatctgacttggatagagatactttggtgttaccaatcgggattaaagatccttcagcattagtcttggttggtgttaccaaccggttctaaaagtgtttctagggacttggacttttagaaccggtattaaagcatctttagtatcggttcttaatctagttgagaaagatcagttctccagtagtgtatgtctagccttcatgtttaactggctgccatagcaatcattcatcagttatcatagtttttgcgccatgaattaaattaatggaattgctaaacctaattcgatagaaaaatatagacaacatcttgtaaatttctaaccttcagctatgcttcatcgtgctccgatggacttcttctccaactccggtattcttgatgaacttcggcgactggtggaattgaccccgaccattccttgggcttagaggaattgccatgggaggcaccaccccatcgatgggtggtgaacatgggctagtggtgatacatcggaggtacagggatgaaggaaggtgatgggtgagacggaagcaaagtggaacttgtggttaggaagaagtggatggtggtggctaggggtgggcattcggtctacccaaaatttttggtttcgatcttcggtctttcggtcatttcagtctttgagaagttgagactgaatttcatcacaaaaaagtcaggactaaccaattcggtctcggcctcggtctcggtcgtaaccgaatttggccagttgagataagattggcaatgaaattttttggtagcacttaccctctttctagacaaaatttaacagttatacatcacgaaaatacaagataataggcaacatcaaacaccaaacaatatatcacaagatcggatcaagtagcaagattaaatcgcaagcatcaatggaggcggaggggggctggtcggctagaggcagaggtgagctggagcctggaagcggagcccagaggcggcacacgggtgcacggcggtggagacggaggcgggatggatggaggtgccgaggcagagggcggaggtgggctggaggcggcacacaggcacaccgcgcacggtggtggagatagaggtgggatggatggagatgccgaggtggagagtagatgcacctaggcaggaccgcgggatgaaggcgccgaggcagcacacagcgctggcgctggcgcctggtggcacgatggaggtagaggcaagaggcgaaggcagccgagtgcgatgggattgggggatggatggaggcggcggaccgctttggcggttgtggctgggtgcctcttcctctctggggtttactctatattagtgggcttattaggcctaataggtctattgggcc

SEQ ID NO: 9719 - DNA, 52474 bp, Oryza sativa
  unsure (1)..(52474): unsure at all n locations
atcaccgtttagaaatgcatagtgtaggcctgaaggtaagggctttagctcaattggggcacgtgacggctgatccatttttggcagttcaatcgtttctccagattcatcctccccttcattgaattcttcgatggattcattgaaatagactctggggcctcgaatggagaaatggccatcaccttctcaattggttcaggaataggaagaggctccgtcaatgaattgattgattgcaacacaaggacagaggtggcgattcttcctatgttcaggttgaggacaccggattcgggcatatctaagagtttctctatgggatggcctatgagtatgtcgaaatcagatatatcgaacacatgaaaatctaagatgacctcaacgctgttgtgccgtgtgggcactccagagataatccctaaaccttcggtagtagagtttgtggaaattcggaaggttttgacggttggttccaacggtttgtcccctaagcaatcaaatgcaaaggttgctgacataatattggcaccaacagagggattatacagaacacggaccaaattacctccaatgagacacgtaatggttgaggagtggcatcgtatctgaatcgattcagatgagagctctccttcccttaaacattcattactcacgatggtggtcaacttcttcaccgtctctttaagcatagctttatcgagaggttcattagaattgaccttggtcggtggtctcttctcgcaggaataattcgaggtgttctcataatctttgaaaagatcctcctcgaattggaatggaatttccggaggatgaatttcttcttcctccggctcctgcgactgggatgaggattcgatagttgagtcgggttccgactccacgtgcagagggttcctcatggataatctcgancctccgggacggncttcgctttggccaaaangaaattcanttttnccttncgaagataagatcttannaggaagttctctttcccttttnccgnnnaccaagnntntttgggttnccctttttttaattttggntttgggccccaanaaaaaaaaccatctcacggaattcagattttcaacagactccttatctaacctgtaccaaaaatgttgtaacaacacatggtcatgtaaagacaagtctgggccaaactgagttaacagtgagaaccttactcaggctgcaccgagggattccttctcgttgtcggaaagaaaggatgtctaatcgaagattgattacacaggttaatggaaagaaagtaaggcagaaattgcacttaagctactcccattcaccgtggaatttcttgacagacatagtgtaccattgcttcgcttcatctctatgagaaaaatgaaacaatttccacttaagagtttcatgtgtcatgcctacgatggatatgcaagaacacactagctcaaagtcccgaagatggaggtatgggttttcactgatactactagagaaggttttctctcgaaccatggctataaagccaggactgatttcatagccatccgaaagggttggttttgaagaacacgatggctcacaaagattagcccgaggagcagaaaggttttgaattgtgggttgctccattaaggaaaggaataaaagaagaagaaataaaaataaagattagcaaccgttctccggcaacggcgccagaaatgcttgttggtatttcttacgaccacagataaatccgcaagcgcacggaataccgctgtagcactttcaccttcggtgaccccaaaaagatatcgaactcagggaacgcgtgtaatctacctaaggctaaggcaatccagggacaacaactataggtaggctaggcaagctagagaagagcattctatgtgttttaattatctaagctaagcaaaggtaatttcctatctgttgcttcgggcaccgacccctgctggtctgccagcgtggttccggctatagctctatgatgtatccgaacgtggaggattattgggacgggattcaaagctatcaccacctgccgcctacctctgacaaatccgtggaatacacaataaacaaaggtaatctgtaacctagacaccacgtctaagttattaattactactctaatacttgtacatgaacttccttctttatcaagagtcctagtactagagcacttagtatgaatactaaacaatgaacccgcaaagatgaaaacctatcttacttagactaaataattaaataacataagaaaggaacacgaatgcttactttatagaagaagttctccgaacctggagcagagtgtaccgacagctccggtactcctctagaattcctcctaagaagctacactcgtcgaggtagaaatcggatgagcgccaaacttccgggcactcctccagagcttccccttactctctaccttattctaatgtacaaaagatacaatagagcctcttgtaattcagctcaaagttgtgtctattggaatgtgagtgagctcctccttatataggctccaaatgacagttaggggcatgggaattgtctaaaacaacctgcaaccgcctctgggaagaaatccgagccgtctaggtgaaagcagatggcgggaagcgctaggattggttcggccgaacccaaaaactctcctcccggcctctccttgggctgggaggttgcttattgggcccccaacaacctgggctatgttttggcccaattctaaatggtttttattgacttattgggcatctaatccgtgtaaatatgtcctgaatacgcggagatgcattttgtcatatgacggatgtgttttctcctcaaattacttgcatacacatatttcaccaacactagtggaaatgattagtaataatacctaccactaagttggataccatgttttatttcattatatacaggtattgacggtcagatattatgatttaaggaccgtcaacaatattcaccaacactcgtggaaattgttagtaataaatcctatcaataggtttaatatttcattgatttgcttttttacaggaattgatagttatatttggtatttaaggaccgtcaacaatttcaaaacatgagtaggtattacctctcatcgagagggcctaaggctgtattcgataccaggagttcctaactcccccctctcgttttccacgtgcacgcttttcaaactaccaaacaatgtgtttttttacaaaaagtttatatacgaaagttgcttaaaaaatcatattgatccatttttgaaaaaaagctaattcttaattaatcacgcgctaatggaccgctccattttccgtgtgagggtgatgggttcccaacaccaaccaacgtgcacagcctaaacctgtctaaacctttgtcctgatatccatccaaatttagatctcatacgctaccccttttactactgttgatataggacactgacagttggcgcgccatgtaggggttgcatcaagttttacaatgacaatcgtgatgaaatcatctttaggagtcgtcagatttgtcttccctccaaggaagacatttagtttcggcagttttgactttctcaccgacaacttcagcaagcattcagtcttcgactcagattcaaacaagttggcggggttcgagacttcctcggtcccttttggtctctcgaatgcggctgtggcccactccagatcggatttccatggctcggcctcaaattggccaggggagtcaatgccactagcttacccggacaacatctccaacaacggcggcaaactaccctaagattctgatgcaactctctccgcttctcgctgcgacgatttgggacctacaccgtccccgtgaattcaatccaggcatgattcgaccatgtccgaacatggtcccagggaagtaagcctcctgattcgtttgctcgatgattcctgcagcatcacggagattgtatatgacctcgaccactcggaggactatgccagattcagcacgggaacgatctacagctccaagtactccaatgattataccctactcagggaagtctttctggttggagcaccaaaagaggacgagcaggcccacatctagtaggaagcggaggaggagcgcctacgtaaagaggagaaagaccgcttgtggaaacaatgtgacctaatgcatccagggtgcgcgacatgtgacaacatcatccaaactacaacaaaacagcattgctgttgtaatgctacttgacaccctaatcgatgccttagacaacgccatgactctgatgctcatcaaggtcaatgccatgatggtcaccgcggtcgcacaataggaaagggagctagaggcactcagcgaccaagccaaccgccagaggagtctattaccaacacacccaagactccatcgggcaaccgaccaagcaaatggccatctcttcacctttcaagggaccgccggtcagccgagagcagtcggggccacacagcctcaaatcttcaacactgcgagcagaataacggaacaaatcctttcgtcgaaaaccgtgataacaatcatcgtgaagacgaccaccatgaaagtgaccatagacaggaagacgaccacgggcatcgggaaggcaaagacctcaggattgaacaacaccgtcgtcgccgagagagaagaccaggatcgctgcagttcaccactccccccccccggtcgacccatataacctgattatgctgatgaaggaatagcaacttttacccgagacctacgtcgagtggactggccggccgacttcaatccagctggtatcgagaagtacggcggtaaaaccgaccctgagtcgtggctcaccatctacaccttggccattcgcgcagcaggaggagatagcaaagccatggcaaactacttgcctgtggcactcactgattcaacaagaagctggcctttggggcttcgagatcggtttgttgcaaattttcaaggcacctacgagaggcccgggatacagttcgacgtttaccacgtcatacaactgaaaaataaattattaaaggacttcatccggcgtttcttcgagacatgcaacaagattccagaagacacaaacaatgtcatcatcgttaattttcagaaaggaattcgtgacgaaaatctcatcggcaagttcacccgcaagccgccacttaccgtcatgaagctcttcaaaacagccaattcagccgaagccatcaatattgtgcgggaggacaagcagtctagtgctccacatctggtgaaggataataatgaatatcacaagaaggatcgcaatcgacgacctggaaacttggtggccacaacgtcttattgtcagtcacattgtccgagtgctagaaattacaaccgaatcttgaacgggcccagtccaaatcacccaaattccaaacaccctgctaaggactgagtttgttgaagaccgtgctaagcagttgaagctagcagctggaaaaggaacttcaggacagaacaatgacaatactgtccggatggtttccaaattccaatacccagaattgagctaaaccacatatttggtggccctttagcttataagttcaagagaaagcagaagctgatcgatcatcatatcaacataatacacttggtgaataacaattctcaaaacacgagtagggtattacctctcatcgagcctgaacttatctaaacttttatccatacaatccatccacttttaaatctcgtacgctagcccttttagtatcgcctatatagaacatcgacagtttattaatttccgtattcaccaatgccagtgccgtgtgccatccgaaaccactacaaatatgctcgaggttgaaaattctgtaattgaaattatggttggaatatgtcaaaataaagtctagagttgatatagactactggacctccataaatgtttaccattggaacacagtattagtcctagctagtcaataggtgggaagtaattcgacaagtaggtactggtattggatatacaaagagtttatgaggatgtttgtccatccaatagacatatatccaaatatatatgaatcttgtttgaattttcgatccataaatcaaccgagatctagttctatgccaaatttttacttgttcccacaatcccgtttcggcaccaatttttaagttgctgctgaccttattttttcacctgggaattaaaatgtcaacgagacatgcaggaatggaatggaatagataatggatacacttccgaagttcttaaacagtgtgttttttctaataactttcaatatatatatgaatttcttagaatacctttcaaaaaataatttttgaatttaatttgtaatagttagttcgttcttttgtaccttcaaataattatcacaaataattcatccactcatccattccattccattctattcagcacaaaagagtggttgttcgaacatgccatgttaacatttctaactttgcctaaataccatcgaccatttgcatgcaacggtgaccatatatactttctttatacagacataataatcttctgctattatatcgaccattcagaagttttccatggtaaacactagggacaaaatcgtggagccaaatcatctcaccttctaattaaaaaaagcatctcacctgcttcactcacttttcttttcatcagggaattagtttgagtgaactaaatcaatccataggtacattaaagctatatccctggtagtattctgaattaaacagaagaaaatgaacctcatgcatactgcaacaaagctctactatgcgcctctaatttttctccttctactggctactctatatatgcaacactatatatgtacatctaaaaaaaatatagcatgattgtcaccttgtcctcgctcttgattttttgaattatcgtggcgactaaaaaaatgatgtagacccctctttggaagagaacacaatgattggagctaatctctctaatatactccctcgatccgtcctaaaatataagtatttttagcatagtgtcaagtcaaatatttgtaacgttggctattaatagaaaaaaaaaattaaaaagatcaatcatgtaaaattaatgttactagatttatcattaaacaaactattacaatatacaactctttttttgaatatcattgatcaaagtagtatctggaagaccatgtcgaagtccaaacgtgcttatattttggggcggagggaatacaaacagcaaaacatgaaggactctcattattcaaaactgagcaaaatagtcgttgtcaaaaccaacgaaagcaatctctaaaataaacaaaaaactgtgaaagcatgggaagaacttggcatcattcagacatccaatccccgagctgacagacgttatagacacaggcatatgtacagagcgcagttagctgcgacgttgctttccaacttcaaaatgatggttaattaatcaaatgattgatctacttgatgaattgttgcacatgcagtaaagaattaataatgctgcttgttatggaaaaatcctggattcgaggacaaattaaagtcgatcagacaggagaggaaaatggcaacatttgataaaaggacaaggctgattagaaagatcatgtcaacagtatcttaaagcagttgaatgatctgttatttttagctaaggtaatttaattatatattcaattggatgatcatgtcaacagtttctttaaaaaatagctgatttctaaaggcctcgactagagagggtcgagaaactcataggtaattaaatgaattatggaccacctgtaaaaacaatctaacataaaaacatgtaatactccctgcggctcaaaatataacaatttggccccgttcgtttcttcggtaaggataggataaaattttaaattctcgtggcacatttttcaaactgctaaacgatacattttgtgaaaaactttatatatgaaagttgatctaaaatatcagattaatccattttttaagtttgtaatatttaaaactcaattaatcacaagttattatcacctcgttttgcgtgaaacacttaatctttatcttcctaaggagattcaaacaccacttttgtagcctttaagatttgccccaaattataacaacttcttcaccaacattctttttccaaccaatcacaaccctccaccattcaatttttccacctacctacacttcgcatccaatcacaaacttctcccatttaattttttttaacttgttaataaccgtcttatattctacaacggaggtaatattacttttttggacctaaaagcagaaaagcacatgtcactggtgcagaaattatttttacaggtggcgcattacccctttacgtgggcgtttctcaacccgcctctaggtgaggcttttagaaatcagctatttttgataggtgcatgaaagaacaccgcacgtgaaacaaatttagtctcagcctgcaaaactacgattttcacaggttttttcataaaccggccgctagttgtgttggataattgaagaataaaataaaattgcagcacctatgcagcattgcatgcccatagggatgaaaactgagcagatatgaacaaataatgccataccatatttgttttttttattttcttccagatatgaaaacgaatatgaatatatcacatatggaaacaaatatgaattatctcaaacacaaataaggataaaatatgatcaggcatgaatacataaacaaatattcccttgaacatgaaagccacctaatagaatcaaataaatgtctaattgatactaaaatatataaagtatagtataatttataaaaatatttataggtctaaataatattaataatgtagactactgattaaagaggtagctaggttgaaggtctagagctagaaagaaatggggtatatttcattcctttagtggatatgcgaatagcatatatatatatatatatatatatatatatatatatatatatatatatatatatatatatatatatatatatatatatatatatgtatccgtatccggactatccgctccaaatggtacccatatttgtcagtactaccatagagacagtgtatctatatgtgtagtggcgatggagagagatacaatggcgggggcgaagccaggatttgagattaggagggtgtggagtgaagataaaccatgagaccaaacaacttatattgatagcaaaggaagtgaaatagttaacgtaaataataagcaatacgtaaactagtccttttaagagaaacttgaattttagctctttaataatatcattgtaagtttgaaactagtctttattgctaaattcttttaatgtaaactattaaataatctcacaaataagtatcatctattttactttgaaaaagatgagaaatcacaaactaattttgtagatcatgtttattgctaatatttttagacttgctaactaactaaactgataatactttcaaagcaaaatttgctacaggacattcaaaaaacgtgtaattagctaggagacaccacaagaatgtgtatttgctatagagcatcgtaaaaaactggtaattagctgatggacaccaatgaaattattttattatatttgaaggaatatgagagagaaacaagcattaaagaccagtttacccttgcctcaaattagttagtcttcactaatcacatattctcatcgccaagaaaagagcaagagagaggagaagacacggctggccacgccaccgtcactctctcgagcgcagcagcagagtcgtgtcgtttcctccgagggcagcagcagtcaccactgccaccgccgctttctcgagcgcagccgtcgccgctcccttcacgctgccgttaccgcgcaccggaccacgcgcaccctctgcgccgtcgtcgccgctccctttctccgcgcataggaaccatcgtcgcatctcccattttccggaagaagcaaccgccgccgctgccgcttcctttctccacgtgcagcagctgtgctgccaccacagctccctccctccgcaagttgccgctgcgccgccatatgaccgtgcgaggcgtggcgtcggcgccggcgggcggaggcggctgttcggtgcgttccggcggctgcgggtgcggtggctagtggcgttgtaccgccgctcgctgcggcggctgcgcgcgtactacaccaaggcggtccaagacttcctcgagggcgcgacggccatgagcacgctgcatgcactcgtaggctgccaccgactgctcgtttggcgccgtgttcacgccgatggtcgtcgtgaaacaataacaccagtggttgccgctcctccttcgctcgcaggacatgaagaaatggagcagtagcaccggtgacggcaggcgagcgaaggagcggcggcgacaggcgagcgcagctggtggagcggcgacggcgggcgagcttaggaggagcggcggcggtggcaggcgagtgtggcgggcggagcggcgacggcgacggcgacggcgggcgagcttaggaggagcaggagcggcgggcgagtgccacgacgacaggcgaagcggcagcgagcaaggttgaaggcagcggttgagagcagagagagaatgagagagggagtaaaggatatggaagaaaaaaagaaaaagaaaaaaaatcaaagggtagaaccgtacttacatagctgtttctctcttcaatttttccagatataataaaataatcccacgggtgtccagcagctaattaccacttttttgtggtgccctacagcaaaaacgcgttcttacggtgtctcctagctaattacacgttttttagatattctgtagcaaaatttgcctactttcaagctacacaaaataaactagataaatacttatcttagctaacttaatatagagtaaaaacatgggggtgtagtggtggtagtgtttggatagaggggtgttggcacctttagcaccccctacctgcgccactgcctccagccacgcctcctcctcgccagtgtcgcccgtgaaagctgctcctatcgttgccctatgcagaccatcgtatacactccgccccgctgattaactccgcctcggccttggcctctgcctccacgccatccccggtcacctcttcctccatggccccctcatccttgtcatcggcgtcatcaccatcctcatcagagttttaaataaataagttgttattttttattgtttttatatgtaaatcattttacatatgctacacaaaacattttgcgatattcagtgtcaaagaaatattttatgatattatcttctgttttaagtgattcccccctcatatgcaaaataaaaaagaagagtagcctttcaaaaagaagaaaaatacatgcatgaaagaaaccttaaaaaatatacagaaacttctatatattttgtgtagagcctagagaaattcatatatttttgaagagaaaaactagcgaagatgtaccgtccattaatggttataagaaaaggacatccttttttatcgcttggatgtaacctttgtgcgtaccatatcctatcttcctatcccttctttctatatagttaaagacccaaagctaaattgtggttgagccacgtcacctgtaaatctcagccattgaatatgatctgaacgcttggtaacgcttcaatcccagcccacttctccttccggcccgtttggttggggggagtttttagaagggattgggagtttagagggatgaggctattaactattttatttggttgggagatatgagaattttggtgggatggggatggggaattgagaaatgaactccctccttttcaatacctggatagggggtggtaattgggagggaattcctcctttacttcgcctaaacaaatctcagccatccgttttcattaatgatctgatctccatctaaactccctatcaatttccaccacctaccaaacaagagactgggatgaaaaatcaaattcacatcttaatctcaccatcaatttcctcgtgtaaactcccaatccccttccctcaagttaccaaacaagccgttcattgccatccgccctaccgataccgccaccagatgtggtcgcgctcccttctcctgcacccgtgctccttctccgccccgcacggcgccgcgctcgcgctcttttctgcttcgcacccgagcgcgcgtgagagagatgcgccgcggagcgctccttcccctcgatcccccgctgtcgctgcgctctcttcttctctgcccccgtgcgcacgcgagagagatgcgccgcgggcccgccgacccccgccgcgccggttccccccatcgcgcgcttctcctccccacgtcgcactgctccccccatcccccacacggcagccacgccgcagcgccgcgcgcctgtagccctagccaggtgcggctgcaggtatcgcgtgatggaggatgcgctgggagccctagcgccatgccggtattcacttccttccttaatcacccgcatttacaatagaaactgccaaatcaattgggtgaggaggcgaaccgccaaatcaattgggtgaggaggtgcagtggttaatacaattcatgtgccccttctgatttgtcttttataattctcttgcaaaccttttgataggcctcttgcaatccggcctctcctcaaatccatacatccctcacatcaaccgttctgtgtgcaagcctcaaccacgcaccccttcatcctacaagggcacatgattgcaatcgagtcatgtaaggttagttgtcgacaacctttatcgattcattgcatgtaagcctattgactgattttatatgtctgaattggttatttgccctgagtactgattttaatttcttaaaaaaaatgtcaatttattctatttggtaaacctgaacttgatatgaaatttgaccggattctatttgagtgtgcattatgatttaaactaatctgaggcagtatgaaaggtctgtcgattggtttctctgaacctaaaagaaattaatccctatcctatacactagctgttgttttagtttgtttatgagagattcgtgatccctgcatcctatacttatacttcctccgttccaaaaaaaggcaaatcctaggtttccgtgtccaactttgacagtccgtcttatatgaaatttttttataatttatattttcattgttgttagatgataaaacatgattaatattttatgcgtgacttgtctttttaatttttttcataattttttcaaataagacggacggtcaaatatttggcacggaaaccagggtttgtcttttttgggacggagggagtatgttctaacacttcaatttatttgagcagttgggaaggacccagaggattgctatatagttgtcctgacatagcgaggagcagcaacttactcggtatgtattttgttcggctcttcgcacacaattcatgtttttcctacgactttctataaatgtaaataaataatctttatcctatgcactggctatttttccaattacttaagaaaaaaaccgtgatgcttgcagcggatacttatatttcctaccactttagtttgtttgagcagttggggagataccagggatcgctacacaagtgtcctgatgtagcgaggaaccgcatacctgctcggtatgtcttctgttcagctcatcctgtgaggcacttcagtacgtgtgaattccacatgatttttgtctcaattaaatttcagtatatattgaggtaaaaaaaaagatcatgcagaacataccgcatttgtcgcagtgaaagaacttatccacaccaccagttctgaaaaaaattgagcatatccaaaattgatcaaactgaataaaacagtaaatgcagaaaataattcatagagatagatttgggacttgcctgcatatgccgcatccatcacagtgatactggttctttgagacctggaacaaaccaaacaaatatatttgtcaggatttatgaaccataattgccacattagaaacttagatgtaacgtagaatcatcatttataatccaaaaatgcttacatcatcatcaaagaagttgcatttttcacagaagtatttccccatgcatgccccacaaccagagcagtactttgtacccgtcgatcaaagcgaacaattttcatgtgatcagcacagaaaaaaaagttagcacactccagaaattctactgttgtacactcgagaaattctactgttgtactgttgcacgcgcaggaaagctatgcactgagtgctgttttcgtttgttaaaaaagaaactatcctatgcactggctatttttccagtttcttaagaaaaaaaaccctgatacttgcagctaatacttatattccattgactttaatttgtttgagcagttggggagataccagagaattgctagataagtgtcctgcatagcgagggatcgcagacctgctcggtacgccttctgttcagctgatcctgtgctattcctaaaaagatcttgctgttcctaaaaaaattctgcttgcaatgtttccagtataagtttgagagattttgtgattgtgactataaatttgcaactccttggacttgaaatgagttttccttgcttggtacttttagcaattaatgatgcaaatatcatatttaattggtcaagtagcagaactactcacttttgaaattatatactatgttatatcctatttggtcaggtagcacaactgcccacttatatcttcattcttccctccataatttttttatacattttaatattatgtgtgcatgtagctaaatctaaaggagtttttgttgcttctaatgttcccaggtcatatgttgaaaggagtaaaacgcagctccacattgttagcttatgaccttgatgccgtttcaaggttttcttacttgagtgcatattttgcgtatcagtttgtttttagaactaaacaatacaatctgattgttcatatttacatgcatatttcatcttttctaatgtgcccgtcgcaatacgcggggtttcatctagtattattggtacctaatacctattaagtggtatttaatcttataaaataagatatataagaagccacatcgtcaataattttaagctatcaaatggtattagtacaaatataacaactgttggatcaagaagctacttatccatctaattcaattatttattagtcgtacatccaccttcctttactcttcctcatagtcactcgtagcacttttacctattttgcacataacaccgtgtttttctcttccaagtctagaaaattagtgctaacttttttcgaatacaatttaaattatattttaagatgttagttttgctttattatgcatgattagatagcaaataatataattattatgtattgtcgacgtttgagatcgcgactacggtatttggacggtatggggatcgttggtatcagggtatatgcgagattgaggtcaaagagatagagacagggatttttatacaggttccggccacttatctgacatgtaatagccctacatcctgttggccgaagccggtgttgctcctttattcatcataatcacaccagtacaataattgggataacttgtctagctgtcgtcgacttggcggcatggataaccaattcgtggtcgacgacagggtagtcttcctcctcgaatacgaactcgtcgagatcagagatggcactagatccctcttgtcggccttcgtaggcaccgtattgggtttgtctaggcttatctctgatgttgatatctagcagcgtattggtttgtgtatatgttgtgtcttgtggcttgtcccctctcttcctagggggcttgtatttatacccataaatgcccccttgtccaaatagaactagggagaccaatatggatacaatccgagtagttcttgtcgtttccatgtagaactctagtcgttcttcgacatggtacatggtgggccctgccgagcttagtcaagtactattaggtatgtggtattcataaccatgacatgcatctttacttgaacctattttcagaacaagtctgagtgaagtagagagatgcaaactatctagctgcaacgatacctatattgtgcataaaaataatattcatatattataacaacacacaattacactttaaaaaataaagcatgaattgtattgtaataacttatgtatacataaatccacattatcatatattttgtgcatacaaagagttgcacctaaccatttaaaacttccactactacagatcctatttttccgtgcgggcgttctgattatcccgtgtggtggtccggcccgtctgcagccacgtgtctgggaaaatcggtattttcgtgtgcgggcgggctgaccgcacgggataatagattatcccgtgcggtcgtgttatacggaccacacgggataatcgtttatcccgtgccttccaattataccgcccgcatgcaacaaaaaaaacaaaaaaataataaaaaaaaccctaccctaaccctagaaacggccgccgccgctcgcgagcagcacgccgccgtcacccgagctcagcgcacccggatccacacttcgtcatcgtcccgcccactgccaagccgcgcggggccccgccgccgtccgcgcccgctgtgcgtgcacgcagagccagcagcatcgcctcgtcgtcatcgttgtcgcgcccgccgccgctcgttcgctcgcggagccgccgcaccgcctccgccagcagccgccgcgccgcctcgtcggcggcggcggcagcggcgctcgatcggtggggaggggaggagaggaaagaggcagagagaggagagaaaagcggcagagagaggggaggggaggagatcgaggagagtaaagggggagagagaataaaaaggaagaagagagagagtgtgtgtgtgaaaaatttgaagtgggtgggagggaaaagtgggagagtatttttcggtgtggtccacttaaaaagcccgcacgcgaaaatcgatttttccgtgcagtcctcttaagtcgaccgcacgggaaaatgcatttttccgtgtgggcaagagcccaggtccgatccacggattttttcaggcggagctacttatggtccgcctgaaaactaccggggccggcgtccagtctagtagtgttcgactttgttcggcaagtatgatacaaacatgggccatacaggtgtctctttctgctagactaatcgcgtgttcaccagcccatagagagcaaccgtacctattccgagcaccacacgttatagtctcccaaattatgggccaaaaaagctggacctatatatacttctaactgtgtgagaaagagcgagagatgaataattcataaatttcacatgttgtcgtgactcgtgaactgaatatcagacgctattatcaactaacacaacaaaatctatcttacaatacactttttaccaagtgtaatcatattgtactattaatctctccattttatatcataagtcgctttaaatttttttctagtccaacctttttgagtttaatcaagtttataaaaaaatattataatatttttaatatgaaataaatatattatcaaaataaattcaatgttacataatgatactatttttttagtgttgtagttgttgataaattttttaataaacttggtcaaacctaaaagaaattgactagaaaaaaataaaaacgactaatggtatgaaacggagggagtagcatttaggctcttcatgtatcgtgacaaaagattgttctgagttttgtctttaaggccgagtttagttacaaacttttttttcaaacttacaactattttatcacatcaaaacttttctacacacataaacttctaacttttccgtcgcatcgttccaatttcaatcaaacttccaattttggtgtgaactaaacacaccctaacagttcaggtagtgctcaaatggttggatgaatggacagtgcacatgtacatacacagttgcttgctaagacatgtaaatacacttagtattttgcttatgtagttcatgcaaatcatgcacagatagtttcctttgtttaatggctatcttgtccattggattgcctatcttataattttataggatttctcatcacattaggcatgcccatttgtgaaaaaaaaatttgctaagcccatgatttttttttttgcaactaatgctacatgtagtaaaatcttcagcagaaaaaaaactacctatgagtattttggtttgtcacatgcacatcacaatagtcatgagctaaataaagtttgtcattttctgaattccaatgtgccttcctttatatgtcaaattcatttttttatgcagaggaccttatacttgcaattaatggtgttttcttctacagaaccctccatcaagctagtaagctaataagtctataacccaagttgacaggaaacaagttgactcccattttttgtcaggactcatgaaagtgaaaaacactttcttaactatgggttcttggattgtaaataatggggaacaaataagattttgggaagataaatggctaggaaatatggcttatagagaaaagtatccatctttatatgctattgtcagaaagagaaattcttctgttgctagtgttatggcttttgttccgctcaatgtttcttttaggagagctttagttggtcagaatttaacactttggtatgaattgtgtgcatctattgttcatattaagttgaataatatttctgattgttttagatggaactatcatcagaatggccaattctcggttagatcaatgtacttatctttaattaacaatggttacattgaaaaaataagttaatttggaagcttaagatgctgcttaagatcaagatctttatgtggtacttgcttaagggagttgtgttaaccaaggataatttagcaagacggaattggaatggtaatttaagatgttgtttttgtatgaaaaatgagtctatccaatatttgttcattgattgtcattttgtaaagtttatttggagagcagttcagttttcttttggtttatatattcctactagcatatctcatggtttttatgattggcttcagggagtggtaaacaaaaagagcaaactgatacttgttggagcatctgttttgtgttgggctttgtggttgagtaggaatgatagggtttttgacaaatcacctaccattacctatatgtaggttatttttaaggcaacatattggcttcgtctgtgggcacagttacaaaagtgtgatgaagatggagaattctaattgttgcatgtcgtaagcttgaaacgatggttatgcaactgtttgccaatcatgaatggaaatttaccaatagactggaataatgttattttgtatagtttggtttccttttaattttggttggtgtgtttgcttttatttggactacactctcttatagagtgctactccctccatcccaaaatgtaagtatttttagctatgaatctggacatctgtatccagattcatagctaaaaattgctatattttgggacggaggtggtagattataataattggctgtagctcttttgtgcaaatgccgggatgttattttattccattatctaaaaaatcaagctagtaaggagttgcgagttgcaacctcccccctcctactctctcttccttggttgtacctttttcatccatgttttcccattagctttcagttcaaatgaaccacggttagtttaccatatagttgttttcaacatgattgtttcttaagcagacaaggaagtttgcgatcaccctaatgagcgcattccgcggtagtgagcagacaagatttttttgcttcttttgcaaacatgaattcagttcctctgcttagattgctatgaaaataccaataggccacttcatagctgtatacctgtatcatgtcaattatcaaaccatgcttgcacatccaagaaaagtgtgtgcagcggattattgcagatatactttgatacagtaagtgaagaggaggaatttggatacatttatatgataaataatttccagtgctatgatttcagctgccaaatttacaattttcatgtacaccgggatattcttcttggatgcattcattaacttcaaactatatatgataaggaatttcagtgttatgatgctacctgccaaatttagattgttcacgttgacaggggatacttttttggatgtatttataattaataaattcaaattctttaacaatttatgtgttatcttctgtgtagataacaatttcaaaatttttcagacgcagaagactccaaagctcctattcctgcaaatgacaggagatactccaaagctgtcatcgacaggcttcctatagcttaaatgcttaattattagagtgttattcacttctgtaaaactgatctttgctcggtcgacccaaaaccataatagttccggaactaaaaataatctttagccccggttaaaaaccccacagctattctatgatctttagtcccagttggtatctttagtcccggttcatcccctgttagagacatgtcagggggccgaggatctttagggactaaagatcactttagtcccggttggtattaccaaccggaactaaaattcaatacgtagtatataatcccaaacacttatcctctcctccacaatcgcaaccacttattcacacagatcgatcctccccttcctcctccccttcccctctcctacaaatattacacagatctttcctcccattcctcctctcctcccctctcctccccctcctcccctttctcctcccggcagtggcgggcaggtggccagcggggccgcgcgcggcggcggccgtggcgggcggcggcaggcggcggcccacattgttttcttttcttttttttataatttgtgattcactaagatgtataatgttgtgattcattgtacatttgtatagatctgagatgtataatctgtgtgatgtattttatttgtttgtaattttttgaggatttgtgatgtactacctccgtttcatattataaaagtttctagcattgcccacattcatataaatattaatgaatttagacattcatatatatttagattcattaacacccatatgaatgtgggcaatgctagaaagtcttataacctgaaacagaggaagtatttgatttgtgtgtataagtaactttaagatttgtgatgtggatttgggatgttactttgatttgaggatttagggtttgatttggggatatgtatgccactcgattcaggagaaaaaaaaagggaccatctggactgccgctaacctctttagttccggttggtgttaccaaccttattatcacccactgagaaaacatttgaagatgcatgcatgttgccacaccttgcatagattcagaatgtcgacctaaaaagagaggtgttcgccacttaaattcagagcttgtaattgcaccaagagtcttaagactaaagtatacgccattcctgaatgactcaagaccaagacttgattgttcaggttcagataggatatcaaagctacatggattttttcttatacaattgcttgtttagagtaattgccctactagacaggagtgggtccactattgattcaagggtattcagatgtatacccaagattttttaataaaaataagtacatatacattacatatatgtattaaaaaataatttaaaaaagcttcaaacagcccaacaagcaatcaaactactctttttgggcctgcttcatcctttggcccattggcgccggcccaaatttctcacccggccactccctctcaggcctcagcccgcactcccagcccactccctttctctccccctcccctaatcctagcttctgcctgttgtggaggcggaggtgcgcggcgcgcggcgggaggcgactcgcaaggcggcgcggcgtgcggcggcgggcggccggctgcggactgcggcgcgtcggccagcaagtcgcgaggcggccggcagtcctgttactcctggacagcagcacaggtagtcggggatggggagtgattgtcgcattatctgattgaagatttgtagtataaatattgaattcactgatttcatgatttattctacacttctacttatctaaatatctagtataattgcttagttggtagaaccattgtttatttgtttagttacattcattgaaagagaattcttcttgcaagttaaggataaggacatcatcacttatttttaaaatatcaagcatcgaaaagttgatttctaaattgtaaaatttcttcccaatttattcttttctatcctttatgtattctatatgttggtactttgatatattaccaattagtatttctataagttaaacaatttcaagtaatgatcaattttatctttgtgtgaacttatgctcgattttattttatatcgctatatattatataattattaatgtgtgatactataaaagctaaggcttttaggtgtatgaacaaatttttttaccctttcctatttcaaatacacaagttgaaaatgttagcccccccactgctactagacaagcttggtctagctcggtctgttactcaggtttcgttgtctagctcatgaatctggtaattccactgtaatgtaagcgcactatactaatactcctactacttctaaaaagaagagagaaaatctgcatgtggggtcctctactgagctgtcaatcaagtaaggtcgaaccgtttggtgacatgatttattttccttaattttacgaaactggagttttccataattttactactatcatttctgtccatacaaaaccatgataccatacagacaacaattttctgtacactgacgttttacatggaattgaagacaaatattaaataatatttctatggcacaagcgtaaatacattggtaatatccttcaaaactagatcaaatcttgctagtacatatgatacgttcgataaaaaatacttgatgatatattataaaaatcgacactgatgaaaccaataatacctactcaggtggtgtttgaatcttctgaagatgaaaatgaagattagatgtttcacgcaaaacgaggtgataataatatgttattaattaagttttaattattataaactttaaaaataaattaatttgatattttagagcaactttcatatagaaagttttcgtacgaaacacatcgtttaacagttttaaaaacgtgccacgataatccgaagtggatggcgcacagttttgacggactcatacagggatgaggtgtgactgaggtggctgtcatgtagtagaggtgcatggaggaggcagcatgggatgaatcggctgcttccatgcgagaaagtcacacttatcacgtttatactgtcgacaatatacctacaattgcagcccctgaaaagaatattacaacccccttagaaaaaagaatgaaaaacgctatatgatgttatacaacccagatttctattaaaaaaaaagataaaacgattactcggatcataattgagggtgtcaaagtatacttttttttctttcatctctaaacactaggtatgagtaatccgcgtacggatgcatcatatatgggccgcattgctacactgggcctaactatggtttggacgatggtcgttccaggcttcggtgccagtggcaaaggcaagaccaaataaccacttccatttttcttttccttcgcaaagaatcaaagtccagttgactagtttacgagttgcataaattccacggatgtgaatcagattccaagcattcaacagcacgtccaacgtacacgacaagacgaaatggttacaactaatttactaatcatcatctgggattagcatttttttttctgcctgccagatgctgagatgatttgctttgctgatcacaaaagaaagaacaaacccaacctacagccagctttgaagccccgggtttgttgctgatgcatggcattttccagactggaaacgcagagcaaaaattcgcagcaacggtcctccccccatgtgagccggtggggcccaccgccgcccgctacacgccatcgcgatcccagcgaggtccagccgtgtagtgagcgagagcgagagagagccgttgtgtatacttaacaatgccaccgttgtatatatacaatccgtgttgcaagaaaatcaatcgacataagcaagggaaatatcagcatctgcaaaaatcatctcagattcgttcgccatggcgaggatcccgttcgccgccatcgtcgtcgccatcctctctttcgccatcgccgcggctgcacaggcgcccgcgccgtctcccaccagcgacggtgagggatcggatccttccatgattcagtttcagctgttgtgattttggcctgatttatttgtgaatgtgtgattcagtttcagctgttgtgattttggcctgatttatttgtgaatgtgtgatgagtttgcagggacgtcggtggatcaagggatcgcatacctgctgatgatcgtggcgctggtgctcacctacctcatccaccctctcgacgcctcctccgcctacaagctcttctgagcttatgcagagatctcttcgtcgccatggtgttccttctccttcttggatctcctcctcctcccttttgatagtctagtggtggatctctcattctcggtgtaattaattagtgggatttttatattctttttcagctcgcgttcgtttgtaatttgggtcggtggtactgcgctgaggatcgatttcgcattgtgtatatcattcatcattctttgctgttctcatatgcatttgtatcatgttgggaaatttgttttatccctaagttttggattggatttgttgcttgctccctactcgacggacgtgagcccattaattgcaattgggcttacggaccagctcggcatgggactgtacggatttgggtcaaatctatatctataacttaatataaatattcgtatttttccggtcgtcacctcatatgtgcggtgtttgttttccccctcgcctccccacaaatcccagtcggaattgcatcacccccatccaaaaaaaatccccaatcgaaattcaatcaatcttcacaatgggaattcaatgaaaccccccgaatcccaattgcactaagaatcgggaaacacatcccaaaattggcacaatcaaatcggatgaacacactgcaagaaaattcaaccaatctttatccccgaaaaatcatcccacatacatacatcacaaaactacactccctcctgccggtggatccatccgcggccgccgccaccgccggcggatccatcaccgttggatctagggcgggagggaggcgagaggggaggagggagccgccgccggcccgcggccgccgccaccgccgatggacccaccctccgacgttgccgacaccgccatcgccgccggatctgggacaggagggaggcgagaggggagaagggagccgccgccgccgccgtatccgcccgtagccgccgccaccaccgccggatccacccgcggctaccgccgccgccgccaccaccgccggatctgccgcgggagggaggctagagggggtggagggagccgccgccgccgaccctagagggagaggaggagggggggcgccgccgccgaccctagagggagaggaggagggggggcgccgccgccgtcgctttgagagaggggatcgggggcgccgctcgccggtcgctgctccgcgccgctgcagccgctcgggggaagagggggggcggcgccgccgtcgtcgctcggcgaggaggggggagaggcagggggaagaagggaaatgaatcttagggttagggttagggtttgggtatatttatttaggttaggattaatctggaccgtccattcgatcggacagctccagctgctcccacgtcgggccgccgacctattgggccaccgaatggaggacgcaaaatagacttcaatggagaaaggaaacaggccagacacatagaatagacaaaagggaggaaatataaactttgctatattcggcccaaacatagaaaggaggattttgatttttttttcaattaaataattgttaaatgatttttgtattattaaaaattagcaattaagctctgataattccaataaaattccaaagagcgtaactaatcatggagaatttaataaaattaaatttaatcatgtcattttatttttcacacttgctttacttgtaaattgatttaattatacacctacctacttaaaaataccaaatattttaattaattacataatgtaaattttttttttaactttttctcaatttttttgttctgtacacttcccgttgcaacgcacgggcacctttgctagtaattctaaaaacaataatagtctttttctcttttttagatacacagaacaaacacagaagctcataatacgcgcacactcatacacttatgagtatctccagaaaattggaccggcatatcttaagattgatgaagtcactacaagtgtctcgctgctgacaggtacgtcgcctatcacaagaaaaataattagctataaatacaaacaccactattaagtataggacttgaatggagctagttccaccacaagtaacctaagctcactttgtaatatattcttcaacacattacaaacgcacacaccaacacatacgccttcgagtgactcgattggtaagctattcttataaacggatctaaggaatcggaccggttaccactatgaatgcctccaaaggaccagatcgtatagtatcgcaattagttggcaaggttccttgtggtacaacttgttcatccgtgttccaattttagctcgccatgtgtgctcatatagagggtggtaaagtagcatctttatctcaagttagcttctgatcttagcaatgatagggagaaaatcagctagacactggcacgggatagatcatctcaaccgggtggcaaacctcatatgtgtcgggggagagctcccgtcacgaaccaaaggtcacagatgtaagaagtcatctgtatcgggcattttaccatcacggatgatagttatctcaatcaggccaaaactaaaacccgtcacaaataggtttgaccctacagatgagtcaaactagggcccgtcaccgattagatcatctgtgacaggctcatacttgactcactagtttgggattgatgaagagagggtgagagaaaagaatggaaccactctcacccctaggccctacgacgtggccaacttgcagaagctaggtcgccgccacaagaggatatgaatctagagtgagcttgcatcaattgcttaggaagattcggcaagaggatgcctagatgacacctccaaggagagaagcgacgaaagaaccgccgccgccatccgtcagggtctcaaagagaaccgagaccgagctttcacctggcagccacacttgaggggttgagatggcccgacaacgccctcaggaggggagtgacgcttgaacgccatcgttgctgatccggccaaggccgggctgggttttcgcccgccgtccaccgcctgccgatctaccactgatgcaccattgctccaccgccatctaaacttccgccagcgcatgggcatcactgcaccggtgccccccaccggccaatctccgcgcactgccaccggttgcacctccaccggcctctcctctcgctgcgccggccaccgtctccaagccagcaaagccttgtcatgtcgcactgccacctcggctgcgcctccacgcaccgcggccacctccgccgcgcctctgtgtgcgctgcctccaccgccgccggccaaccagctagccactactcctcccgctggctgcccgctgtcgccaccatcgccatgagtctctcggccacgcagccacctccgcgagcagcctctgtcgcccccctcccccgggccgtgtcgccggccggccggccagccagccggcactgctcctcccgccagctgcctgctgttgccgtcatcgccgtgagtctcctgggccacgccgccatatcgtgtcggccccagaagcgtcgccgtcgccgccgtcgcccacgaccccgccggcctctccctgccgtcgcgccagcctcctgccgcctgccaccgctcgacgaccgtgcgcctcctcttgccaccgtcaccacgaggtccgccgtcgttggggtcgcccagacccgatctgaccgcagggaggctagatttggcgccgggaaaggcggatccgcatccggtgtgggcggatccgctgcgccgaccgtccggccgccacctcctatgatccgccactgctgagaagcctccggtgtcccccgccgctgggcaacctcgtgaggggagcgtcgcgccgccgccgtccttgtggccgtccggctttgccgacgagccgctcaggcggcggcgagtcgaaggggaggaccagggaggggatcctgtgtgtgctcattcaacagaaaatgatttacggcattcgcaattttcctaaatgccaacaccgactgtacaactacgaaggtaatgagttcaggtcggctggcccttccattgattgctaaagaaacgcaacaagtaagttgaaaacaaagcatgctgcaaaaagatccgaagtttgcaatcatacattgtccaatgctccaaaggtacagtatacaggtagcaacatatatgcaacttacagaaatacagcacatagacattttttagataatgggttaaaccagcctctacatccggatatacacaaccaacagaacatagacatgaacttacagaaaaatggatgtacataggcaacacaacatatacatgaacttacagaaaaaaccacttactgcatatcaatcataaatcccaatgccagcagcaacaaaccgcaaatgacgacagagggaaaatgtgagatacttcaagacatcgagcaactagatctggttacgttgttgctaggaaaacacatcggaagatacttccttacatctgggggaaaaaaattccagatacatgcagttgaaaaccgaaaaaaaattcaagggaagagcacagcgagtgcttgttttagttccagataaaagtataaagaataaagatatcaattaagaggaggccgtgggtgccgcatctacacaaattcgaaaaatttatgatgttcctcctcctcctccatagtcagcaggtcacttttaaagggctgctctacttgctgaagcttcgtgcactgcgatatgtacacatacttcatggatgaaagagcgtgcaatccttcgatggatgatagctccgagcagccaaatagaaacaggtatttgagctgaagatttgtgccggtcggaatggactccatgttacagtactccaaatttagggcgatgagatgagtgaggttctgtagacaggctggaaatgacttatcaagaccaccgcacttgttaatatagagtcgccggagtgatgagggcaaaaccattgcctgttcgcacaccaagttatcgcaccatgagatcttcaggtcctgtaggtgataaagttccgtgaaactaccaacgggtattgattgtagacttctgcagagcctaatctctatggacttgatggatggcagatgttccggggacaagaactgatcaagatttcgcagcatatcacagttgtcaagacatatatactagtgaggcatgaaatggcgttgcttcttctgatactgctgcttgcctgctgcagcattctgccaccaccagtagaaccacaaaaaattgttagtacttcaacacctaatgatgttaaccttagctcttcgagggaaggtaacgaggggattgataggcttctcaagaagatacacttgcgaagctccatcatccttaaagtcggtaggctttctggattaaaccaactaggagaaaagctgtcacccgcaaagctatcgacattaaggcgctgaatccttgacggagggcacaaaccttcggccacaccattgtcatcgttcatcaccctgggtacaggctgatctcgccacagtagaactagtgcctgaaggtattgcttgtcaatgagtctagcctcaacagcctcttccttgctcttaacattatagatagaactgatagttagcgttccactgagctgattcatgcccttcagctcactaatcttccgcccattccctatcccaactgtaaaatgtatcaagttccgtagaagagacatatttccaagcccacttatctctgataatttcggagagcaacccattggcagtgctagacgacgcaagttgattagctttgtgacatccggactaataacttccagactagaactacttgcatcaagcacttgtaagcagtaaaggcaccataatttttctggcaattcttgtacatggctacgagatatatcaagataacggagactgtgcaactcaccaatgctttcaggtaacctgaccagcatgcaaccttttaagctcaaaaataggatattagagagctgattaaaccaggtaatctcaaacatgaggatggttccaaacttaagtgaatgcaatttattcaaatactgaatatctcttgtttggctcagggactcgctgtccacctcgactgacatatagcgaactgcatgcggcattctcctctggttctgatagctcaaatcctgcatcaagaagcacttgtccacggagatggactgcgccatatcatggatcaagtcatgcattacatatctactttgatcaaggcaattggtatcagtttgaagaagaaacctgcctcttaaatcatccaaatacctaatccctatgtcttcaagacgcatgctcccttctggtgcaacgaagccctgtgccacccacatgccaacaatctcatctcgttcgaagctataaccctttggaaacatggagcaaaatgcaaagcaactcttaagttcttgtgggagatgtaagtagctcagttgaagggctggtaatatatcattgtctcgatttggcagctcccatagttccttgttctgaacagtcttccaatgttgcacagtcagctccatattcaacaggcgtccaatagttttggcagccaaaggagacccgcataacctagaagcaatgcttcgaccaatatcatgcaattgaggatatgactcagggcactgtttaccaaatgcacacttcttgaagaactcccaaaatatatctctatccaatccctcgattcggaaaggattacagttgttgctagcgacaagattagcaacatctggagatcttgtagttactaagatcatgcttccttcaaacccatacctcaatggtgcaaaaaatgtttcccattcgtccttggcattaggccacatatcatcaagcactaaaaggaactttcgtctcctcagttgcttcctcaattccacctgaagagcgtctaaactgttcgatgatttgtactctttcctggtgatggactcaatgatctcttttgttatccttttcttgttgaagaggtccgaaatacagacccaaattctcttgccaaagtgagcttccacccttggatcattgtagatgaactgagccagggtagtcttccccaccccaccaatgctaacaatcggcaagacagaaacattgctgacgaatttggcctgagcaagtctaggcctggccctgatactctctctttttagttgcttcgctttggatgctgatgtggcaactgtgcccaccgctgctctctttcatttcgcccgtgcggcaccaccactcctggtgagtggcacgtgcagtgactcaatcatctgatcttgttcattgtcacatccaatcatggaacacacacccaacttctcaatcactaaatctcgctctttgtcacgaccaaacacttgaggcactccaatgactgaacttgtctctggcatgtgttgaactttctccatcttaagacccagaggcttaagcgctctctctaaatcatccacggccttgtcaagcttatcttgagcatcctttatccttgttttgctaccacagatcaagttttttgcacgatacagagaggaagaaaagaatttacctgctcggctacggtcagtgtcctccatcttctgccgcagcacctggtcatcgaacttgcgaagaagatcctcggtgtcatatgtggtgtccttgagctgcgtgagaagcaccgcgagatccttgttcttgaaccttccccactcgccacgattgatgactaagcgagcattgggcaaggatgcccggaggcaggatagatcatcttccagattggtcgctccgtggatgttgatcccagttgagatgatcttttctacggtctccatcaccgccatagtcgtccttggctcctccggatcttgtcttcgtcttctttgatgagtgcgagcctcaagagtgcaaggagattatggcgtgggaagtgaataatgcagcagcattgacctactaagtctaactacagaggcactcctttccacataatgatgcaagttgtgagttttgcatttaatgagttttgcatttaatgctgctgcatttaatgctgcccaagcagcattaactcctttccacataccgatgcaagttttgcatttaatttactaacaaattaaatgcaaaacttgtagatatgactcacttgacaatcattccacgtgatcctgttcaattatctaatcatctctctaagaccttaaccgcactacatattttgcatcttaagattccatatgtctgccagtaaaaacacaagtgcgcaacccacgagagaagaataccttcggatagtagactgtagcgtgtactttgtataaaccttgggtttctgtgaaacattttggcgaaaaatctagagttactagaaaaaattagatatgtttgaaccatgataaaatagaaagtggcatgaatgctatggtatgtttttgtcacctttttgtccgtgacactatcacaagaagtgaacgagcacatggattcccacttgatcgttaagaaagtgggaggaaatgcaattgtggatgcatttgaccaaaaaaggagtgatattaacaaaggagaatttagccaaaaggagatggaaaggaagcactaagtgctgcttttgcaattgtgaagaatcaattcaacatctctttttttattgtcactttgcacattttatgtggaatgctcttttcatgatacttggttttcaagtgccatcctgtattgctaattttctggtggttggtcatggtgcttagtacctaagtttagggaccaactctttgttggagttgtggcaatgtgttggccactttggcttgctatgaatggtatacactagtggagaaactatctttggtcggtctggcaaaatccacaatagttccagttccaaaaagaaccgggactaaagattgtttttagtcccggttataaaaattttgatgatcattaatcccggtttatcccctgtcagatgtttgtcagggggcgaggatctttagtcccggttggtgtcaataaccaggactaaagatcacttatcctctcctccacaattacaacttagacagatcgaatctctcccctctcctaagatctaacctctcttcctcatcctctctcctccacctcctccccttcctcctctcctccccatcctccccttcctcctccccctcctccccttcccatccggcgggccggcggggccacgcccggcggccgtggcgagcggcggcagcggcattgttttttcttttttatttttaaatttgcgattcactgatatgtacaaatttgtgattcattgtttggatctgtgatatatttgatttgtgtgtaattttttaggattttgtgatgtattaaatttgtgtgtataagtaactttatgatttgtgatgtgaatttgggatgttactttgatttggagatttggggatttgcctacttgattcgggtgaaaataaaaaggaaaaaaagaaaaagaaaaggggaccatttggtactgccgttattgtctctttagtcctggttggtaacagcaaccgtcaaccgggactaaagatggatccttactcccggttgaaaaaccgggactaaagtggggttcccaagcgggagtaaagatggtttttccaccaatggtagtctttaacgtcactatttttttgggcgggcaccgggtgggtggggggggcattaggctcaccagtggtctttgcttcttaaggaggaggaggatggtgaggcagtgaggaatggatacaaagaaactggaaacaatcactatggaactgttcttaaaatcggggtggaatgggagaggaagactacaaccttatttggctctggtgaagcgagtaatgtaacgtggattttggttaatttttgtcacctatggtggcatatgttctataattcttttttaagcccaagtgcctgacgttgtatgaccgtggttgtgtaaacccccgttgggtgtataggttgggtttttattaggcaaaatttactacagcacattgaaaaaaacgtgtaattagctcgtggacagcgcaagaatgagaatttgctatcgggcaccacaaaaaacgtgtaattagctcctggacactcagggccttattttaatattttctgtgaatttggagagagaaacactagtgagagtacgattttgccccttccctcacaagtcacaccggccagagcacagcgccgccaccacctccacccgcggtcgtgcgcccacgcaggccgccatcacacgcacatctgcgccgccgctgccgctgcagccagccaatgaacgggcatgccgctgccgccgccggcagctgacgcactcgtgcgccgctgccttctcccccatctgcgccgccgtgccggaagatgaggaagacgacagcgacaaggatgacaggaaggaggaggccgtggagctcggagatgctgcgcatcgactgcgcgtggaagtccgtgaagccaacgagcatccccgccgtgtgcgtccaccgcgagaagctctacgccaacacgcggtatgggatggtgtacgcgttcgccgagctgcgtacgtggagcgcagcttcctggtggagtccccaccaggctctccaccgagcaccggcgaccgccacgggctgatgcaggtggagctgctccggcccgtggccgcagctgaggaggaggggttcaaggtgcgcgtgctggacaagtgcggcgagacgtgggaggaggcggacgacatcggcgacgtggtggtggtcgtggacgcgtccggtgcgggggcggcatctacgcgggagtgccccaggttgaggctgagcaccatgtacttcgccgtcgaccccaccggcgagacgcgcgtgtgcacatacagcctcgccgcagcgggcagctacgtgtcgcccacctctcccgccgtcgtgagcggtcacgctggccgcctctcacaccctttcccaccgacatcgtcacgcccgctcctcgccgctcactgccacgcccgcgtcgccctgcctttcccgttgtcgcgacctagcgccgtcccgcgccgcgccgccagcgcacgcaagccaagccacccctatggtcccaatccaagggcacacttgtctttatttagtgtttctctctcgaaatccacaggaaataataaaataacaccccgagtttccaggagctaattacatgtttttttatgccaggcagcaaattctcgtttttgcggtgtccacgagctaattacacattttttcgatgccatgtagcaaattttgcctttttattaaacccattattataaaaactgggaaggtagtccgcgcatacgcatgggcatatggtttgaattttaattatgaaagttgatgcgtggatgatagttttgaaatatttattgacgctattttaaacatgtgttcgttaataactgttttgggcatattacttgaaaccgtatatcctcaaagttattagaaaaaaaatgtgtcacaataatggagttgcttcatatctatttgtattatgtgcgactctttttcaaaaaaaatttagagttagtctcatttggatgaccctaagttgattttagatatttgaatatagcttttttagttttctaagtcactaaggatgtaaaagcttaatcataaattattttttatcgctaataagctatttagcatataatcagctattggccaaccgatgggcctgctgaatgtttcacgttggagcctatatctatagttgacttgacctatgctgctgatcaatgttacacgatggagcccaccggcctaattgtctggcttattcgtgaaataagccaaatagaatatacataaacgaaaaataatatgtgaataaaacttttatatatatatttttagcaatttaaaagcaaagattgaaaaataaacttcgataaaaaaaacctaaaattaacttctaatttaagattgaaaatttaaatttttactggtaagcataaccataaacgaaaaaaaagatgtcgaagctccttcaagatttttgtgggaggtatcgttaattcgtgatcacatttgcgtcgaagctccttcaagatatctttgacccggcacctacaatcagtacagagcgttaacacggacggaagaagttgcaggatctttcctcagaagcatccttttgccaactaccctaggaattatatattgccaagaaaataactactgttctggtgctgaatgtttcattcaccttgaacttttgtcaactgccgtctccaaaggagagaaaaaataacataaacttttacgaactccagatgctaaaaacttaagatatttcatctcaccattatcttgtattatgtgattcagaaagtaaaaaaggaacagttatgcagtaactaggagtggaagtgcagaatggattccattagacagtgatgattgagagtaaattgaaaagaaacaacttgaagctctagtcctgtggagattatggtaacccatacccactcggccactatattttgattaattggatatagcgggtaatccatgtttatattatctattaggctagaacttaggtgttatgttgccttatatgatacagcacggcctatagtctcggctaaatactaccatgtaatagattaagaaactgatgcctattcggtttggttttcctctttataaccctgttctccaacctatataaggtgggtggaaagtcctccaagagcataaccacacaaataaccagagataaacacagttagatcgtcagatctatacacacccagcggttacaattctcgaaacaggagtagggtattgcttcttatcaatatggcatgaacctgtctaaacctttgtcccctctattcatccactttacaactcatgcgctacacccttttcttatgggttaatcgtatccatgccattgtaaaatatgtcgattcagagaaatgccctacaattcaccaattcttaaccgctccattgaaattttagaaaattaggaccacattttcaatccatctccatcttcttcctcatgtgcacgtgggacccacccatcagattcatcttcttcctctatcctcactttttttatgatctctctccaccgcagtcaggagggagggatggactggtgcggcatggcttggggcatgaactagatgcctatggcggcggtgacggcggacggtggcaggacgaacctaaggaggcgggcgtcaacttcagtgccgccgtggcgtagattgcgcggtggtgggtgaacgggaggagcgacggcgacagggtcgctacagggctccacggtggcagccagggcggggcggtgcacggcatgtgcgtgggtatcgatgcgacgcttgcggaatgccgggcatggagggggcggggtggcatgccctatagcaccagcacgtcgtggtggcgcgggggcagctagaaagaggtggaggttggagccggaggcgaacggggacgttgggccgctgccagggccgaggctgaggtggagccagtccctggcgccgttgtttcctcgacctccgttgctgctgctcctgtcactgctactaccactggtcccggcgacctcctactggtggtggtggtggtggtgggtgttggtggcggtggtcgtctccgttgcgctgcagctagaggtgctggttccgcgtcagcagcgatggggacccacccatcacctccctccctcccgcggtggtggagagagatgagaaaaaaagtgtggaggatggagaaagaagatgaatctgataggtgggtcccacgtgcagatgaggaagaagatggagatggatggaaaatgtgatgatagtggcacggtcctaattttgtaaaatttcaatggcacggttacgaatagacgaattgtagtggcatttctctgaatcagcatatttacaatggcatggatccaattaatccttttcttattgccgatctagaacatcgatagttgactgttgacggtcgttatagaccaatttcgaccgtcaatatatccagaaataagaagtagcaacgcttgcatgcatatttgtttaagtataatctatcagttaacgccaaaatttggtaagcccaaattcatcatcggcctagagtcagtatcggcttcagagtcttagaatcggccgatgggagtcgtcaaatcgccagcagttgtgttcttggtggagttggatcaattaaaggaagcttatctagaagagtccgagttcaaggaggatgtgacatggcagtttatctattaattaggcagtatttgtaagtttccttttatctttaggaatgtgtgtttagtgtccgataaggactttatgttttccttttatctctaggaaagtttctttcttgttctacaaggactagtatttacccatgggtataaatatgtacacccggggttattgtaaattatctcttgatcaataatactactttcggcgcatcgccaccctctttcccgaggtttttacatatcaaccggcagaatttggcacttgacgcggggctgcatcggttcagttcgatctccagcgaaggggtaagtcctacgttccaccagccctggtgaatctgccggctacgttggtgttgttcaaggctgcatcgcttcaatatcttagatcgctctggtttggttgatacatttgcctacctgatatctcaattctatctctagttgcattgtgtctagagatgcatcggtttagttgggactgtctcagttaggtccaatcttctgccttagccgatatatctttacaatcacaatgctgttataaatagattttttatatccatcacattagacaaatctatcggctcatcgagtattagattatcatatacaatctcgtgctgcatcggttaggttcgacctactagattgttgttgataatataagtcttgttaatccgataggttcatgctaatgttttatcagggtgctagctaataagttatctggacgttgcatcggcttacaaagattacatataagttggatttagccgattgcaataaaggtttcattgttgaatctaatcttgtggatttcatgacatcggacctccagccaatgtatatgctttaaccttcggatcagtgcttattctattatatcattgctagccgattggtttctactggattatattgtataattatattgattatcatcagccgattgtctttatatcattatctacattggacatatagccgatagctcagaaccctatcactatcggctggtatcggcatcggctggctatttgatatgttgtttacgtatcttgtcagttgcaggatcaaactgactggcacgcccgcacctcatcaacctttggacctgcactggagctaagcagatctcccaggcctgtgtgtgttttttgcatcaacactatctccacttgtacttcgaattttatttgaatacatagatctccacataaatggaggtgaatcgatggaaaataaccaaacaatcaatcgaagtccgagaagtggcagacttatggatggatgggcttacaaatccaatagaatacctgcaaatagggccaaccactgtgccactggacttaggatccatcgaccgatgcaccagagaagacacatgccaaatggttcagcccagggttcgaccgaacccccagctgcgccgttgatcctctccttccacgtggacgctcgtgatcactttgcaatgacagttgcgaggcattttccaacaattccaaccatcacaaccgtcaatggtaacctataaatggacttcacctcctccatttccaagagcactcttggtaattcttacgaccatagataaatccgcaagcgcacggaatatcgttgcagcacttcaccttcgggtgaccacaaaaggatatcgaactcagggaacgtgtgtaatctacctaaggctaagactatccagggacaacaactattggtaggctagctaggctagagaggactttatatgtgttttaattatctactctaagaaaagttaatttcctatctgttgctttgggcaccgacccctgctggtctgccaacgtagtttctgctatagctctatgatgtatcctaacgtggaggattagtaggactggataaagcgctgtcaccacctgccgtctacctctgacaaatccgtgggatacacaacaaacaaaaggtaatctctaacctatacaccacgcctaagttattaattactactctaatacttgtacatgaacttccttctttatccagagtcttagtactagagcacttagtacgaatactaaataatgaacctgcaaagatggaaatctatcttacttagactaaataattaagagaaaattcatgaaataccatcaataagcaccctaatcccagaaatgccatcgacaaaatcaacttcctaaaaatgccattgcacaagcctctttctcccaaaaatgccatcaccatcaactccacaccgttgcaaccattacttttttataatgaccattttgccctcagtgcaaaatatacccaattttcactgtcaaagaaaaagagagatgaaatgaaattcccggcggtgacaaggcggcgatccatggcggcagcgcagtggaccatagcggcggtggcgcacggcacctgccgcggagaggaggtcgcaggaggagctccggcaaggtcatgacaattgaaggacacggcggcggcggcgtaaacaacacgatgacaacgccggcttcactcagcctcccagctacaaaaaggaagtgcatgtgaagcttctgaggtcctagggatgacacctgcacggggaatcggatggtggctcaacggagaaggaggatttggcggtggtgctcagcggccggagttggggaagacggagtcgatctcccagcttgctccaccgatcttggtggttcttggggcgttttgcagagggggacgaggagaccttcacggcgtagtggcttggctcggggcggacaggttcagccgggcgacgatgacgctgaagcggcggcgaagaccggtgcgcgcctcctcctcgccggcgcctgcggaccccatgccgacgcctgcggcctcctccgcgttggcgcctgcaacctcctctccgcgccccgcgtcaccgccgacacctccttggaccaccgcgccgccaccgggcattgcggcgccaccgctgtggatcaccttctcgcagcagtcgccgaccaagagaggtgcgctgtcaccgggagagccgcctggatcgggtctagtgttagggattttcaccatttcatctcccttttcccttttaccgtgaaatactgggtatgtatatttgtgagtgagggaaatttggtctttgtaaaaaaacataacggttgtaatggtgtggaatcaacgggatgttgacggtgatggcatttttggaagaaatatgcttgtacaatggtatttttgggaagttgcacttgtcgatggcatttctaggataagggtgtttgttgatggcatttcatggattttctcattaattaaataacataagaaaggatcccgaatgcttacttaatagaagaagtttctccgaacccggagtagagtgtaccgacagctccggtactcctctagaattcctcctagaaagctacactcgtcgaggtagaagtcggagagagcaccaaacttccgggcactcatccagagcttcccctcactctacctattttctaatatacaaaagatacaatagagcctcttgatttagctcaaagttgtgtgttttgaagtgaagtgagcttctccttttatagtctccatatgacgttacaactatgggaattgtccaaaacaccctccaacgatcattgggaaaaaatcaggagtgtacacatggaggtgaacgggttcggccgaacccaaaaatccacctcccggtctctcttttggctaggaggttgcttaatgggcacccaacatcatgtactatgatttggcccaattctaagtggttttgattgacatgtgggtcctccaatccatgtaaatgtatcatgattgtccggaggtgtattttgttgcatgacagacgtgttttctccttaatatgcatgcatacttatatttcaccaacactagtggaaatgattagtaataatacctaccactaagttggataccatatattttatttcgttatatgcaagtattgatggtcagatattatgatttaaggaccgtcaacaagttagatggctttgcctctgcttttcaaaaccagctaagttttaacaaaatgctagaaactcaactagctcagatggctactcttgtccctgctaatgaatctaggaggattccagggcaacctgagccctctctagagaactttaatgataaccacaaggggaggaaaatccactcgcgaccagccacatcctaacactgcaggaacaagaaagaacaataaggaggcttcaccatctaacacaaatggagaagaagagacaattcagcgggagaaggctgcgccgcaggagtactgcgacaccaacctgctgccattcccccagcataaccggaagccatccatcgatgagcaattcgctcgctttattgaagcgatccaaaagatccacatcaacatacctattttggatgcgatgcaagtacccatgtacggttgctatctaaaggacattctcaacaacaagcgaccgatgccaaccgcggaagtggtgaaactaatggaggagtgtagcaatgctatactcctccaacttccggagaagaagaaagatctggggtgtcccacgaacaggccttgtgcgaccttgaagcaagcgtgagtgtcataaccaaggatgtcttcgacaaattgaactacacagtgttcgcaccaacactgatgcggctctagctagccgattcctcggtccgttacccagcaggtattgctgaggatgccctagtaaaaattcgggatttcttcatcctggtggactttgtggtcttagacataaactctgacaaggagacgccgctcatcttggggcgtccgttcttaagcatcgtggaagccaacattgatgtaggagctggagaaatccggctcgacctcaatggaaaggaggagaagttcgaattccgaccgagaatagaacaatgctctatggtgaagatcaagtacgggccaaatccacaaaatatccgagaggtcgaagttaaaccctcaaagacggatagcctcattgcattcatgaagaacttcctggagaaggaagcgatgggcaggcaccgtccagatccaaaggtggcatcaagaacgcaagctaaaaagcctgtgacaccagccgccaagaagccacaggatgcacccaagacgtaaaatgactagcaagtgaagaaatcgacacccactctctcacctccggagcagggtgccgcatcatcaagctaagcatgatggaggtatggtcttgctcgtcggactaaaaacgacgttgcccttgccaataggtaatttggtatgtatctcatatttgccttttgcatcaaaacatgtttattttttcaaaattttgcattaggaataaatttgagacaaatttataaaaatcaaattttgagcaaaaataaaataaaattttggccaaattgaacgtggctcccactcaacttatcgttgggagccaacggccaaaagtgggcccagttgggcctaccaggccttgttcggccaaaccggccaggcaacggtcagttgtggcactttcaggggcaacggctagtaggtcccacatgttagttctagccgttttggggcctctataaaaaggaattggctggtggaggagagttcaccccaaattcaacatagtttcactctctcacacactctctcgcgctctcaaattcatctcaaacctagaggagttggtctcaagtttatttcctgcattttgattacatttttagcatctacgagtggctttggtgcaaggctaactggcgggtagaattaatccttgttactagcttaacccccgctcgagtttgtcttgtgctcttgctcattttgtctgcaggcatgaagagacgaatcacgcacttgtttaataattggtcaagctgtcaatcaagccatcaccaagaagagtcgagtgcactttctttcatcgaggtctcgttggaggaagcagacgctttgccaagactgcttagcgactcagacctcaacctcaaaggtgagcgggaaatgcaagcctatcatatgctcaaggatcggccgtttgctcacacaagagcatacgacccagaacttctttagaaaataggtatagatgttgatttctacattgtttggaatgctttaggatgggagaaatttgctgtggtaattaagcaatggttctcgcttacttaccttgcaatttctaggtaccttgctagaagtagatgatggcattttgtcacgctcggaaaatagaacactatattccgtttgtgagtgcataaatccttgtcctatgaggcaaggtacacattacaaagttggtaaataacaaagtatataagcaaaagcataaatagagtactttattacattggcaaccaaagttccaacactaaaagataaacgataaaagccgaaagctatgttgggccaccacaggcgcttgatggcaggcacgagctagacatcaaagccatcatctccaaagtattcctctgctggaagggggaaaatggagcaaggctgagtacaccaccatactttgcaagccatgccgggaaaatgcaaatataatgcaagtgagtacaaagaattcatttataacgttattttgcagaaaactattatttcaaagcatgtaaatatttaactgtatttgaataaaacacgaacctatctctagtcaattattatcaagccgcgctccaacgcgatcttgcctttatgcaggccaaaaagtgataactccaattattcaaatttcaatagaattaaactctaactagggtacattgcttggtttgcccataaccgagggcgtggctattcaaatagattagaggtgtacatcgttacccaccaaacccgtcttcctcacatgttgccatgtgccacatgccaccgcggcatatgacataagctatgacataactcatcgtttggtaccgccctaaacaaagaggaccgacatagacttcccccaccaggtgccctaggtcaagcaaacagtctatgcccccgagcatacagccagagacgtcgaccccatcaagggcttcatccatccctatccgtgtcttccttgtttatgaccgtactagacgatgcattaagcctttcctattagacaggtggttgtacggaatatgctttgcaacagaggcccgaagactgttacttatgacggccgagatgcgactagcgaaaccaagcaccccaagcccagccgaaaacatgtttggggaattttgaaggggaaatatcatgtcaaggttaaacagccactaaaccatattaaccattatttaaaagttattcccaaagtctaattattggaaaacatctaattgtttctatttaagcgaggctaagcatatccctaaatttactagtaagcaccacatacataaagttcccactagttttattttcctagagttatcaaggatcgtaataatacaagtaataaagctaaaacaaggagaatcggtaaggctaaataaaacagtgataagcgcggaaatttaataaagtgaaatgcaataatttaaataaacataattttataaattaggacaacaatatgatcaaaatgacatgacttgccttgctcgctaccaaaatcttcaaaatcaacctcgaggtagagcatctctccggatctgcagcgtctacactgcatacgcaaagaaaaagggctaaaacataaattaaaaccatataagatgcagaaacaaagcactaaaatgggttctttactgattaagggaaaattagcaatttgaacgagtcaattccgagttcaaatagtcaatatatgaccatttgaattttagatgttgtctgaattgcattttgcgaatttgtggattgattttgtaaaggaaacctactgagtgtgcgtgctgaaacagcaaagagagaaaaacagagaagagggagagaggtggcagaggacatggcagtcggtctccaccggcggccatggcgcagcgacacgggagaggtgagggtggcggcgaggctcaccagagcagcggggacggcaatgaaacagtgatggtgacgagcttggttttttgttgatgttcgtcattgtctccgaggtcttgatgttctttttttgttgttagtttcttcttcctctttggtttcattacctggtatatctcaaacatgaggtgttagagccctgttcttcgaagaatcccaggcatctcccgctcatgacatttgcggtcatcgttgttgaaattcttggtgggaaggggtacaacctgagccgtagatagtgaagcattcatggaggatcccaaggatgcgaacactaccgaaggatagcgtgctgctcccactgagcaggagcaggacaagccactcggccatggtgaggttattgtgcactgtgaatgctcctagcaaagccaatcgtttgtgccttcggcttcttcaccatcgcctagcagtcacacgccatacggtttttctccagtctagcagctgtggacatggcgacaacagaattttggcacttagtttccctatcttcttgtctaccttttaggccatttttttagttttctaggagtggttggaataacatggtcatcaactccagcccaaagcacacttggtttgcaccggtaggtaatactagtacaaaaaaaatagaccagactgacggtccaaccggaaaaaaccagactcagagtaatcacggttcggttagataggaagaccggacatgcatttgaaccgctttagaccagatgaactgggaaaaccggcaccggtcaaaacattaggtccgatgttgggccattccaagactaacttaacgctgttgggccataaatgagagtgcccctttggtttttttttgtgcaaaaatagggaacaaaggtgctctagctaggattcaacctcaggtcactgagttggagggaaaagtcactagcctttcgactagcatggaaaatacacataatacatgtaagatacaaccacggttcaaccgtcgggtcaacggttggattggtggaccggtgaaccgagaggtcggccgggtcacccaccggtccggctttttacactatggtaggtatactcatgcttgctttatatagatatgcggaaacgacggagtggacactaccggttgacggtgtgctgctccagctgagtaggacaagccgcttagcagtgattgctcttcccatagccatcgtcgatgcattcagcttcttcgccattgcccagtagacatgaaccgtaggattttctgcaggaaagcaacggtggatgtgggtacggctcaattttggtatttatttttcccatcttcatgtcaaccttttaggcattttttattagttttctaggagcggtttgaaatgatatggtcatcaactccagcccaaagaacgcgtagtttgcagtgataggcatactcatacttgttttatatagagagatgcgaaaataatagagtggacactaccggtggatggtgtgctactcccactgagctggacaagccatgaggtcatgcaccgtgattgctcctgccatagccatcatcggtgccttcagcttcttcttcgccattgcccagcagacatgaatcgtaggattttctctaggcaagcaatggcggacgtggcaacaactaaattttggcatctaatttttgcatcttcctgtctaaaatgtatgcctttttagacaatcattcagttttataaagtgagttttaagcatactaagaaagagcaaagtggtttaaacacaaaataaaaatgtgtcttccagttttcggttgtttgtgtgacaatcataactaggcttttatttttgaaaatatttggtaatagctacaaaataaagaactgctcattcgttgatccttcacacagcaataggacaaagctaagagtacatcctttttagaagagagtggtcgctgatatccaaattccgtaatgaacttgatgaaatttcttgcacatgaatcaaacaatctatcactagtagattttacaaacaagcatgtgttgttcaataaatcaaataccatcacatctagagaaacaattgtaagcttcatatttttctactacatggctcgagatcacgagaaagaatactgcaagcacaagcacatggtcacaacctgcttgagctacgccgtacaaattattcaaagttatatggaggtccctctgttctctatgtctatgtctctgtctttgtcattgtccccgagttattgatgttcttttttgttgttagtttcttcttcctctttggtttcatcacgtggtagatctcaaacatgaggtgggagagccctgttcttcgatgaatcccgagcatctcccgctcatggctttcccgatcatcgttgctgaaattcttggtaggaaggggcacgacctgagccgtagatagtgaggcgttcatggaggagcccaaggatgcgaaaacgacggagtggacactatgggaggatggcgtgctgctcccactgagcaggaggaggacaagccacttggccgtggtgaggttattgtgcactacgaatgctcctagcacaaccaattgtttgtggcttcagcttcatcgccatcgcctagcaggcacgcgctgtatggttttctccaagctagcagctgtggacatgcgatgacggaatgctggcacttagttttcccatcttcttatctaccttttaggcccattattttttagctttctaggagtgcttagaaatggcatggtcatcagctccaacccaaaggacacttggtttgcaccggtagatatactcatacttgctttatatagagatgcggaaacgacggagtggacactaccggtcgatggcgtgctgctcccgctgagtaggacaagccactttgcagtggcaaggtcgtgcaccgtgattgatcctgcgatagccatcgtcggtgcattcatcttcttcttcgccattgcccagcagacatgaatcgtaggattttctccaggcaaacaacggtggatatggaaacaactaaattttggcatttatttttgccatgttcctatctaccatttaggccttatttttcgtatttctctagccgtgcttaccaacgacatggtgatccactccagaccaaagaaagtttggtttgcatagggtggtatactcatactttctttgtatagaggcgtcttggcaaagaaaaatgtgtatgaaaggttgctgttaatgactaaacaaatccattcagttttataaagtgaggtttaagcatactaggggagagcaaagtggtttcaacacaaaataaaaaatgtttcttccagttttcggttgcttgtgtgagaatcataactaggcttttatctttgaaaatatttggtaatagctacaaaataaagaactgctcattcattgatccttgacacagcaataggacaaagctaagagtacatccttttagaagagagtggtcgctgatatccaaattccataatgaacttgatgaaatttcttgcacatgaatcanacaatgtatcactactagatcctacaaacaagcatgtgttgttcaataaatcaaataccatcacatctagagaaacaattgtaagctccatatttttctactacatggctcgagatcacgagaaagaatactgcaagcacaagcacatggtcacaacctgcttgagctacgccgtacaaattattcaaagttacatggaggtccctctgttctctatgtctatgtctctgtctttgtcattgtccccgagttcttgatgttcttttttgttgttagtttcttcttcctctttggtttcatcacgtggtagatctcaaacatgaggtgtgagagccctgttcttcgatgaatcccgagcatctcccgctcatgactttcccaatcatcgttgctgaaattcttggtaggaaggggcacgacctgagccgtagatagtgaggtgttcatggaggagcccaaggatgcgaaaacgacggagtggacactatgggaggatggcgtgctgctcccactgagcaggaggaggacaagccacttggccgtcgtgaggttattgcacactacgaatgctcctagcacagccaatcatttgtgccttcggcttcgccgccagcgcctagcaggcatgaatcgtaggattttctccaggcaaacaatggtggctgtggcgatggctattttttggcatttatttttcccatcttcttgtctaccttttagggattttttattagttttctaggagctgttcgaaacggtatggtcatcaactccagcccaaagaacgcatggtttgcagcgataggcatactcatacttgttttatatagagatacgaaaataacaaagtggacactacaggtcgatggcgtgatactcccactgagctagacaagctgtgaggtcatgcaccgtgattgctcctgccaaagacatcgtcggtgccttcagcttcttcgccattgcccaacagacatgaactgtaggattttctccagacaagcaacggtggacatggaaacaactaaattttggcatttatttttgccatgttcctatctaccatttaggccttatttttcgtatttttctagcagtgcttaccaacgacatggtgatccactccagaccaaagaaagtttggtttgcacagggcggtatactcatactttctttgtatagaggcgtcttggcaaagaaaaatgtgtatgaaaggttgctcttaatgactaaacaaatccattcagttttataaagtgaggtttaagcatactagaggagagcaaagtggtttcaacacaaaataaaaatgtgtcttccagttttcggttgcttgtgtgagaatcataacagaagagaagtgtgctataaatttatagctaattgtagcacagattccaagacgctgtgtatacgagaggtgagactagatattaatggtgtaatatacatgaatttataggtaagaaggaaacatatcctatgcacacaaagcttcccgtgcacaccaactagcaaatatcacagaaaattctacaaaaaaattggacattccctcctaatagtattacacgttcgtgtgaaatcttattttcaaattcattatattttagctgtaacaaaaaaagataaaattctgacagatttttacccttaaaactgtcatatttttttacttttttgttacagctaaaatataatgaatttgaatacggtactttacagatatatgtaatactattaggagggaatgtccaactttttgtagaattttttatgacatttgttagttggtgtgcattgagtatgcacgagaggcttgtgtgcataggatatattcccaggcaagaataggccattagattagctatagatcacta

SEQ ID NO: 9720 - DNA, 75109 bp, Oryza sativa
cctagagtgatggtgtcattctctaggcatgtacggaacattatgttagatagggcttctacaactgaacaatggaaagtaatatttgcttcactcgtttcttttctctcctatttttcctttccccatcatactctttctcctaattttctattttatgttcaaatgaaaagttgaaaacaataattttaagatagaatttgggtgttatagcgtaattacctctctatatatatagaatggggaaattatagtataacacataagacttctccaattcagtctaatctagcagctcgatctgtcattatctcctcaagaactagagagaatatcaacttcaattccgtccaaaaccttgggaattccacaataattggcataaattcagatacttttcactctgtattatgctctagataattgttgtgtatgaatgtttggaagtgtgtaggactgcaaactgtaatcctactgtgtatgtatgttgatctgaaagtgtacatgtatggtactgcaaaatgatgctctgcatcacaaaaataaatgtgtgttccacctggcatgtgtttgtgtttgtattaggtaagtgcttatgtgtttatagtaagcaactgcttatctttagcaccgtttaatttgggattaactcaggaaccttcatccacatgatgcaccactcagcaatcctaacaaatcttcatcccttgccaactgggaaagtagctagaaggtatcatgacaccctcacttcttacatttactatttggacaataattgaggttgagtaggagagaccaaataatggtgctcagcaccaaaaaataagtgtcttccacttcccgggtgtttgtgtgtatatcataagtaagaacctatgtttgtgaatattacgtaagagtttcaaaattaaagaattgccttccgttgtacttgatgcgcaacaaaaccaaactaggagtacatatgctatgatcattgagaagagagcgctcaatcatatccaaattgtgtagtgaacttgatgaaaattgttacacctccatcaaaaagtctaccagtagtagagtttgcaaaatgtggcatcctttgcttgttagatcaaatacgatctcatctagagtagtaactgtaagcttatcatgacgccctcgctgcttatgtctaccattgggacaatggttgaggttgtataggagagaacaaaatggtcctcaacaccaaacaaaaaaatgtgtcttccatttttgggtgcttgtgtgcttatcataagtgtctatctttgcgaatgttaggtaagtgtctcaaaatgaagaattgtccttccattgatccttgatgcatgacaatatgtagtggagagaatatgacgatcatcttgtccaatccccgatccatatggaaccttctagaaatttccattatgctgtttccattctattgaaggcaacaataatttttgatcttggttacatgctcaaaattagactactgaagcatagttcttgcccaaatcagaaaaatacaatcccaatttcttatatcaacaaacaaaaatagcagtcgcacgtacctcgtaagtactaattctgcacatcggcacactgcacaaaatcataagctagctagctagccatatgtatccatggagctatttagatctagactaatttttatatatgggatgaaatctcgcatctgatgtcctcttacactcacacagataaaccgatatagagaattaatcataaacccatcagaaccatcaaacaattaacaatcgaaaattaaacatgcatacgagcaaagctagatatcttgaagtattattattgcagaaaaatattgctgcaataatgactagatcatggacataaggtagtagaacctcatccttcacttgagtcccgagcacctcctgctcatcatattatacctcctcatcacggagatacttggtggaaatggacacagcttgcaccatggccggcagggcattcacttatcaattttatttatagcattactgccagtttgtaataaaaactagcagtgatattgctgccggttttatttgtgagtggataaaaggatttgtcgagtcggtgtggatgtgtgattaagtattgatccctcaggctcttcctctagcatgtttctccctttcactgtcagccttccaccattgtcgtgtgttagatgtgtattagataggttgtatttattgttttatgtcttttggctttccatgttcctgtcttttggttttccctgtatctgtatatatatttgggctattgccctctgatgtatacaagtcgtattcataacatggtatcagagcatggtttagacttctcatcttcttagatttttctctctcggcttctccatgatttgatttgaggattatcggcctcttcatcttgaagccatgatgttcctcttgatctagtatggtgtcgctgagaatcatccatctctgctccccaacatcatcaatttcttcagaacagtgtagagggttggtggttgtcctcatcaccggctatcgtcgcttctcatcgccggccgccgtcgctcgtcgcgggcccccggccgccgtcgcccctcgtcgccggcctctggtggcgggactccggccgccgtcgcccctcgtcgcgggcctccagccgccgcccctcgtcaccggcctccggtcgtcgccgctcgtcgcggccgccgtcgcccctcgtcgcgggcgcctccgcctgggttgtagggcgccgtcgcttggcgtctgtttccccgatccggatctggatcgggaggtttaaaaaaaagaaaaagaaaaaaaagaaagaaagaaagaaaaaggcttctctggctctgctactgttgtgctctgatcgcacgtggtggctctatattttgggctgaggcattagaaaaaaaaacttgctgccgcttgttctgtttgctctctcgccgtcgcttcttccttcttgatgatgtcgtctttatccggcactgtgtctgttcctcattgcccagttctttttgatggttgcaactacagccattgggctcagcacatgcgtcttcatatgcgtggtcagcgtctttgggatgttttatctagtgagctaccctgtcctccttgccctattgctccaactatgccttcacttgcaagtcaagctactgatgacgatagagaaaaggctaaagagcagtttgatgatgccatggaaaattatcagagtcagtttgctttatacaaggcttggttggatgaggatgctcgagcttctgctattcttgtagctagtatggagattcatcttactggtgaggtggttactcttacttcagcccatctcatgtggacacacctacatgatcgttatgctcctactagtgatgctctttatcttgctatggtgcgtcaggagcagtctttgcagcagggggatagtacggtagatgagttctatacacagttatcctctatttggcgtcagcttgattctttgggaccgactatttgtcatacctatccgtgttgtcagcgtcagcgttctcacatggatcttcgtcggatctacgattttctcacacgtctccgatccgagtatgagtccactcgtgcacagttactttctcggcatccgcgtgttactatcatggaagctcttacggagattcgttctgaggagattcgtcttcgagaggcgggtattctaccacttccttcttcagtgttagctgttcgtactgtggcttcttcggcttcttcgacaccggctgttcattctacagtttcttcctcttcttcatcggcgcgtcctcctaccacagttgtaccatctactaggggtcaccttcactgcacctattgtgataaagatggacatgtggagtcattttgcttcaggaagaagaaggatttacgtcgtggcaattcttcgaagggtactagtggttcttctcagaagagttctggaggttcagattcacaggaaattcttatgttacttcgtcgccttactgcttctgctgcgacaggttctgttggttctgtggctctaccttctgcacagtctggttctgctgttcttggttcttcatcttctactgagggatcatcttctgcttcaggtactattccatggattctagattctggtgcttccttccatatgactcatgatagatctagtctttcatctatatgttctcctttagttcctactactgttcatactgccgatggtactcctcttgctattgttggtcgtgggactctttctatttcttcctttagtgtccctgctgtttcttacgttcccaaattggccatgcaactcatgtcagccggccaacttacggatcatggctgtcgtgtaattcttgattctgactcttgttgtgtccaggatcatcgcacgggtctcctggttggtactggccctcgccgccgtgattctcagcgtctttgggagcttgactggcttcgtcttccttccgctgcgcctgctagtcttcttgcttccactgcttcctctacggtgtcttttgctcagtggcatcatcggttgggacatctttgtggttctcgtctgtcggctttagttcgccgtggtcttttagggtctgtgtcaggagctgtctctttaaatcaatgtcaaggttgtaagcttggaaagcaaatacaacttccctatcattctagtgagtctgtatctaagcgtccttttgatcttgttcattctgatgtgtggggcccagccccttttgtttccaaaggaggtcatcgctattatatcatatttatagatgacttttctcgtcatacttggatttacttcatgactcatcgctctgaagttttggctatttataaatcttttgctcgcatgattcgcactcactttgattctcccatccgcgtgtttcgtgctgattctgctggtgagtacctttctagagagttgcgtgtttttctttccgagcagggtactctttctcaattttcttgtccgggtgctcatgctcagaatggtgtagcggaacgtaaacatcgtcatcttcttgagactgctcgtgctcttatgattgcttcttctgttcctcctcatttttgggctgaggttgtttccactgctaattacttgatcaacatccaaccttcctctgctctacagggtgggattcctattgagcatctttgtggccagcctcctgattattctaatctgcgtcttttcggttgtgcttgctatgtgcttcttgcaccacgtgagcgtacaaagttgacggcttagtctgttgagtgtgtttttctgggtatagtgctgaacataagggttatcgttgttgggatcctgtaggacggcggatgcggatttcacgggatgttacttttgatgagtcccagctccacatcctctcccgatgactctcttctgtttctcacttttcctgatactcctgttcgtgctagcattccttctcctgtctcttcctctcagctggcaccttcttctgagaattctgcatcttcttatgtgcctcctcttacccaggtttatagtcgtaaacctcgtatccaggagccttctctggatgcttctccggttgctcctcctcgatacaattttcgtgatcgtaatttagttacgattcgtccagaggatcgctatggttatgttgctacagttcttgctgaaccttgttcttatcgtgatgctgttgtccatcaggaatggcaacatgcgatggcagaggagcttgctgcacttgagcgtactggtacttgggatcttgttcccttaccttctcatgctcgtcccatcactggtaagtggatctataaggtcaagactcgctctgatggaactcttgaacgctataaggctcgccttgtggcgcgtggtttccaacaagaacatggtcgtgactatgatgaaacttttgctcctgtggctcacatgactactgttcgaacacttcttgcaatagcttctgctcgtcattgcaatatatcgcaacttgatgtcaagaatgcttttctcaatggggaattgcatgaagaggtttacatgcggccacctcaaggctatttagttccagagggtatggtttgtcgtcttcgacgctctctttatggcctcaagcaggctcctcgtgcttggtttcaacggttttcctctgttgtcctggatgctggtttctcagctagtgctcatgatcctgctctctttgttcacacttcaccccgcagtcgcacaattctacttctctatgtggatgatatgctaatcacaggtgacgatgcggagtttattacttttgttaaagcacgtctcagtgagcagtttcttatgactgatcttggtcctctttgttattttcttggcattgagatttcctctactcctgaaggatttcatttctctcaagccaagtatattcaggatcttctggatagggcctctctcactgatcaacgcacagttgaaactcccatggagcttaatcttcatctttctgccactgatggtgaaccgttagctgatcccactcgctatcgtcatattgtagggagtcttgtttatcttggtgtcactcgtcctgatatttcatactctgtgcacattctgagccaatttgtttctgcccccacacaaattcactatagtcatcttcttcgtgtcctccgttatcttcgtggaactatctcgcgttgtcttttctttccacgctccacatctttacaacttcagggtaattctgatgctacttgggccagtgattcctccgatcgtcgctctctttctgctttttgtgtttttcttggtggttccctcattgcttggaagactaagaaacaaacagcagtttctcgttctagtgcagaggctgagttaagagctatggcccttttgacagcagaggttacttggctacgatggttacttgaggattttagtgtttctgtgacttcaccgacttctttattgtcggacagtacaggtgctattagtattgctcgtgatcctatcaaacatgagcttactaagcatattggtgtggatgcctcgtatacccgcacacaggtacaggatcaggtggttgctctttagtacgtgccttccgagttgcagttagctaatttctttaccaaggcacaaactagagctcaacacaggttctatctctccaaactcagtgttgttgatccaccctgagtttgagggggggtgttagatgtgtattagataggttgtatttattgttttatgtcttttggctttccatgttcctgtcttttggttctccttgtatctatatatatatttgggctattgccctctgatgtatacaagtcgtattcataacatcgtgcacctccccttcccatcactgtctttggccctctcgttagcctattgttgcatctccttctccctagatcagttatcgttgcctctccctctcccctgatatgtcgccttcgcctctctctctctctctatctcttctcagattcgccaccatcaccctccctctctctctagatctgccactcctctccctttctcaatccctaatgactccatcaacctcggtgcttgtggttagggtcatcagatctggcggcagggccactagatctagatgttgtgccacctcttccattgccgacaggaaggaggccatgggcggaaaagggaggggagcatggtgacttggcaatggcgagaagagggagagtaggcgagacggaaaggggagggtggtgggtcggtgacaatgaggaagctagggaggagggagagcggactacgtgggggcctacaccatgctgccgcagctcaaggcccctgctccgcctaggggcctgcaccgtgctgcccagcacctcattgccagcacaagctgcaacttgcaaggagaactgctgctatggccaccacctcatcaccagcaaaaaaaatacgtgcacaaggtcagtttactatcatgtgctgctcgtttcataatttttactgtgattttggagaaagatgacttttcctgaaatataggttaaaatgatggtgccattgtgtaggaaaatatggaacattatattagatagggcttctccaagtaaagcatttaaagtaaattttcctttctcttatggttctttaccatcataccttttctcctatttctctattttggaccaaaatggtgcccacaaaaagaaaaacaaagtgtcttccacatcctacatgttcgtgagtttatcatcactaggtgtctacctttgcgaatgttaggtagtagtttcaaaattaatgaattgccctttcattgatccttggtatgcaacaagaccaagttaggagtacaaatgctaaaggtccttgagaagagagcggtcaatcatgtccaaatcatgtagtgagcttggtgaaatttcttgcacctccatcaaacaaagtatatcagtagaaaactttgcaaagctgggcatgcgatattcgatagatcaaataccatcatctagactaacaatagtttaggttgaaacaaaaaatgtgtcttccacttctcaggtgattgtgtgcatatcataagcatgtgtctacctttgcaaatgttaggtaagtctttcaaattaaagaatttcccatgcatcttttgttcctcgatacatgacaatatatcacaagcgactatgatgatcagtttgtccaatccctattccattttgaaccttctagagtcctctatattcctatctacattttattgaacgcaacaagaagttcttaccataatgatctcaattgcattcccaaaattagactattgaagcatagttctggctcataccagataaatacaatccaaaattcttccagcaacaaacaaaaatagcactcgcatgtgcctcataattactaattccgcatatcagcacaccgcacaaaatccaaaattttatatatggggactataatctcccttctaatcccctctcacactcacacagatcagctaatgtagagaattttagccataaatccatcagaaccatgaaacaattaaccatcagaaattaaacatgcatgcatgattatctacaagcaaacctagatatcccaaagtattattgttgcaaagaaaatattgctgttgatctggttcaagatcacaacatgatctcctagaggaatacaacactgcagacaatggtagctgacatatatgtgttatcctccctaaggattgctggttggcctccatacatctgtcacatacttacataccgggttgaaaattccggaatgaaaatttggaaatttccgaaacttcgggtctattggtgggtcccgatagacagtgagctccggtcaaaaatttcggcaaacactgttcatggcaaaatccccaattttctggtaaaaatccccagtgtccgatcccctcctcactcacctttatccgccgtcctcccccaacagctcctcccatcattccagcacaagcgagcagcaccagcggcggttgctcgaaccagaggcagacgggtggctggagtggctggcggtggctccgcggctctccggtgtgacgacgacaacacaagccacacggcagcgcgggcctcgcatcctcatgctggagtgccagcgacggctccgcggcttcggctcgacggcgacacaagccgcagacctcgcatccttgtgtttggttggagtggccggcggcggcgcggctgtcgggcgccgccgcgacgacgacagaaggcacgcaagccgcagaggacgcgacgatacaatccttgcgtttcattctccgatcctgtccaaattctgtaattttggattggatggactcaatgcatgtttatattctgatatatgtcaaatttcagtaatttttgttgttcaaattcaaattttgtttggaaattttgttcgaaatttccgaaatatttctgaaatcttgttatttcgctgacccccgaaaaatttccctttcccgatagattgaaccctgcttacataccatccgtatcgagaaagtagagaggaaaagttaagcccaacaaagaaaggagaagctgcaaaagagagacagagatagagggcagaggggaatgtaaattaagagagaatatttaatgttggatccatagttggataaaatggattgcaatatatactagtttctatttaaagtatccattttttatgtgccaagtatagacactcttaacagtgtctataattgggaatgctcttatgttgttagatgtttgtgtccttgtatatatcattatttggtcactagtagaaacttagaatacctagagtattatgctctgcactgcaaaaaaatatatatatgttccacctagcatgtgtttgtgtttatggtaagcatgtgcttatgtgtttatggtaagcaactgtgtgtatttgccacatttagttttatttttggattaactcggaaaccacaattcacaggattcaaccacccatcaatcgtgacatatcttcatcccttgtcaaccaggaaagtaaccaaaatgtatcatcctactctcacaggtcgctgcttatgtttaccactggggtggtgcttgaggtgaattagatagcaaagcagtgtccagcacaaagcaagggcccctttgaatcaaaggatttatgtaggaatttcataggattcaaatcctataggaaattttcctatttggccctttgattcaaaggattgaagctttccaaatcctatgaaattcctatggaatgacacattgcatgtagattttggaggaaatttagcaagagctccaacctcttggaaaatttcctttgagtctatctctctcatccgattcctgcgtttttcttgcgctccaatcaaacgaccattcctgtgtttttcctgtgttttgcaatcctctgttttacacttcaattcctgtcagaatcctatgtttttcctattcctccgttttttctaccctgcgattcaaatgggccctaaatgtgtcttctacttcctgactatttgtgtgtttatcataagttagtgcctatcttcgtgaatgttagataagagtttccaaataaagaattgcccttcaattgtttttttttttactggggaaaactaccagggctttgcctagtagtgtaattttatcagagagaaaatatgtacaaggttacatggaaaacactaaaaaattacaaagttttcattgagaagaatgtgatcaatcatatccaaattttctagcgagcatgatgaaatttcttccacatccatcaaacagactatcaatagtagattttgcaagactaggcatgcattgttcagtagatcaagcactattgtgtctagggcaacactagtaagctccaaagtttttaggtacatgatatgtgtgactgaggaacagaacttgttgctgccgatgacactatgcttagtcatggtgttacatgatacatgctatgtctaacttagtagccatatatgcaatagatgtatgttgtagtgaaagggcatagcttagagaggtgtagaatactgtagtctttgttatcattcacttcttcctcttcttcattttcatcacctggtagatctcctacatgaggcagtagagcctcttcattcaccaagtactgagcacctcctactagtcatattccggctcctcgttgccgagatacttggtaggaaggggaccaactctattggggcatccacgtaggagcctaagggcatgcaaatggtggagtgggcgccactggacgatgatatgttgttccagctaaggaggtcaagccacttggatgcagcgagctcacgcaccatgaaggctcctaccatggccatcatcggcaccttcagcttgtttgtcaccatcacctagcaacagcataccgtagggttttcccgggtagtgatggatgtggcaaggacaaattttttcctttttttctttggctctcaattttcacttattctaatatactttttagtctttatttttgttttttctacaagcagatggcaatggcacggtgaccaattccaacccaaagctgagctagtttactccgattactatgcttgtactcacttatatagtgttgcccgcattttcctagcgttgtccatccctccacctaggttgagtctagtctggcttagaggttaggcatccagctgtttggttgtttgcgtgagcttagcctggctagcattaaattttgtttggttgattgtgtgagagagacggtttagaacatatttcattttgttcgatgcataatgtgtgagtgcagttacctatttagttggatgataaggttactgctaccatttataggccaaaatactttggaaaatattaaaatcaccttcttcaaattcaatcactatatatcatacaaaaacataaactgtagcttccatacatagtactaatcctcttggttactagatatttgaagcaatcaaactagtgacaaaaaaaagagagaaaaggacaactaaaaaagagaaggaaaaagaggaggcttcgttgagttcaccaccattgcctcccgctgtgctctggcccaccgctcgccgccatcgccatcacgacagccagatctggtggtcatgagctcgtgcctgcttgattcggctgtcctgctactggagagggtagctggaggtgttggagggctctagcagggacaacgacgtgaggaccagatggagggcgacagtgtggaactgatgaagggcaatgatggcaaactaacggcaaggttatgtcgacaatgacagcaatgccccttgagcctccagatctatgatcctctcaagccctccttcctctcgccatcctcctttctccatgatctagatgaactagagatcttgggcgccagattttcagcagtggagctcttcgcccctaatccagctcgtcgcagctaacgaaggtggcaggagggaactggttggtgacttcattgcaaaaccagcaaaccctagttttatattttgggggacaaattactaggcggacaatgtggtgactggtgacccaatgtcagcccctggtacgcggtggtgaaactcatggacacacggatgcagggtgggctgtgctactacacgcgtcaggccaggatgagcagtgaagcttgatccggccattcctgatcagtctagctgcgggcattttgaatctgttgggactgtcttggacatgtgcaggcaaccaaacaagtagccagttgcatgcaaagatgcaagtcaggccgatacaaccaaccgaacatgtcctatattcatgtgttttaatccttctttttttgacatgaatttctttcctattccctcgattttcctgtactatatttttccaatcctgtgttccaaacaagcactaaaacctttaagaagagagcagtcaattatatccaaattgtgtagtgaacttgatgaaatttgttgcacctccatgaaactgtctatcagtagctgattttgtaaagttggttatgtgttattcagtagatcaaatgccgtcccatcttgagtaacaatagtaagctctaaattttcaggtattatggtgcctctcgctgctaccattgaaataatacttgaggttgaatagaagagaataaaatggtgctcagcaccaaaaaaaatgtgtcttccacttctagggtgcttgtgtgaataccataagcaagtgtctatctttgtgaatgctaggtaagtctttcaaacaaaacagttgcccttctgttgatccttgatgcatggcaatatatgatggagcgactatgatgatcggccttctagattcttctatattcctgtttccattagactattgaaattagaatatttcttacaataataatgtcaattacatgcccgaaattagactattaaagcatagttcttgctaagaccagataaatacaatccaaaattcttttagcaaccaacaaaaatagcacttgcatgtgcctcataattactaattctgcatattggcacaccgcacaaaatacaattttttttatataacgggattataatcacccttgtaatcccctctaacactcacacagatcagctaatacaaagaattgcccataaatccatctgaaccatggaacaattaaccatgagaaattaaacatgcatgcatgattaactacaagcaaagctagataacccaaagtattattattgcagagaaaaaattgctgttgatctggctcaagatcacaacaagatctcctagaggaatacaacactgcaagcacaaaaagaaaacacaagcaggtccgcctcttttgtacttcgttctcatctttgtcttctttgcgttgttctgtcctcatgtatttgttgccactggtttcttcttcttctttggcttcatcgcctagtagcttattcttctccatcaccccgcagccatgcaccttacggttttatccaagtagatgtggatgtagccattgctgattttttttttccttgtatctctgctctctttctttggctctcaggtttcccatcttttatctactttttaggcttgtttttccattttttctaggatcagctagcaaaactccaacctaaagccgacctggcttgtgccgctcgttgtactcatactcactttatatatggcagtattggcaaataaaaatgtttggaaggcagatagtagtgactaaagatatcgtaattaaaaaataaaatgtctcttaaaaactaatctgatggaagatgaatgttgtggtcctttcgatatactcacacttgtttaccggttttcatcctgtatacatgtataccaactatactgcattaataaataataaagtatgatgaatgtcagtaatcggaataatatatactagttgaatgcccgtgcgttgctacgggaaaaattatttgtatcataagtataaatcacaccatgtcacctactaccttagggccaggattgttttcgtctgccaagacctccgcctaatctctcatcactaccaggaagtgtaagccaaagaggcgtcgtgcttacacattattctacaacaatattatgctcaccctcctgagcatgtgcagtgcacatttgcacaacatatatacactagagaatattataagcacttgtaaaatttggaaatattgtcatatacaaattcatggcccattgccaaaagactcgaaaataaaaacccaacaaaaatatttataaattctatacaatcactttgatgtataaagatctttgcaagtagtacatttgctatttccttaatataaccattggcatgacaaaactttcaattccctataaaaataatttacttcaactatgatggttccacactattctgtcaaggagaacagagaggagagagcagagagatgaagagagggaagatggggagagagaggaggaagaagaggatgggagatcaccggcaccctcaccggggacgagctccctccgcagcctctgctcctcatggcatgtggcggcaggtgggacgtcggccgtctctacacatccccacacgacgcacgcgacaggtaggatgaggaagaaaggagaggggagagaggaggaatgagagaggatgacatgtggggcctacgtgggccccacatttattattattttgtgtgctgctcacatgtgggcccactgtttttattatttttctaggatcgaattaccacctaagcgccacaccaatgcacgtgtcacgaagacctagtcaaaccaaccaagtaggcgccacgttagccaaaaccaccgagaaatcatgtttacactgattttgatagtgaccagttatatctggttttgggttaaagatgaaaatgggattcggtctaaagttaacactggtagagaaaccatctttggtcggtcgacccaaatccataatagtcccggttccattaaaaaccgggactcatttttagtcccgattaataagaggaagatctttagtcccagttgttgttaccaaccgggactaaaaatcatctttagtcccggttggtaactccaacccggactaaaattcatttttagtcccggttgatttcatgtcaggccgtgtcagggctctaggatctttaatcccggttagtaacaccaatcgggactaaaaacgttccgattggtgttactaaccgggaataaaaatcaaaacacactatataatctatagtaccgatcatcttttcccgtccacataacaaactccttcctctatctcttttttttcctctctaacttcttatctctttccttatctctaactcccctcctctccttccttttttccttcaccacacagtgaagaagcgtgcaggaagccggcgcggcggctgcggcgggcggccagcgcggcggcgccgagggccatgcggaggcggcctgcacggcggcgcggggggccgcacggtggcgcggaggggaggaggggaggcggcagtggctgctggccgaattgttttttctttttttttttgagatgtgaatctgtgatgtatttttgtgtgagatgtgaatctgtgacgaattttttagaaccctgtgatgtaatttttttaagagtttgtgatgtatttagagatgatatatttttttaagagtttgtgatgtatttggagatgatttatttgagaatttgaggatttggagatgttctgtgatatgtgatgatttggatatgggaggggatgatgtgaaatcaatattcaatattaaaaacagaaaaaaagaaaaaatatctttagttccggttgatgttactaaccgggactaaagatgctccccacatcaaccgggactaaagatggggattttagtcccggttggtaacatcaaccgggactaaagatcgatttttagtcccagttatttgaactgggactaaagatagcgatctttagtcccggattcgtagtcccggttagaaaaccggtactacaagggggttataaaccgggactaaacaacacttctccataccaaatgaacttattcctttctcctgttcacatcgaagtcgcgcctgtgcatcgcgagctcatgagtcatgcacgagtagttcacgaccggctgaattccaagactcggattcctcgtctcccctctttaacctgaaactaagatgtgtttcctgcgacccttctcagaacctgattagttcccacgcagaaactttttattccgtcatattaaatgtttagacacatgcatagagtattaaatatagaaaaaaactaatcacgctgattgcgtgtaaattgcgagacgaatcttttaagcctaattgctccatgatttgataatgtggtgctacaataaatatttgctaatgacggattaattaggcttaataaattcatctcgcagtttacagacggaatatgtaatttgttttgttattagtctatgtttaatacttcaaatgtgtgtctgtatatctgatgtgacacgccaaaacttttcgttcgcaaactaaagaaggcctcattctcttatccatccaaatgatgctctctcctcttccaccaacaacagcagtctgcagctcatagctgccattcaacaatggagatctttctatcctcttatgtttacttactgctggtcagtcaggatataggtatatcaatgcatctgcttctttcgggctccatcctttttattcgctggctgatttggtttcttgcacactacccaatttcaatccacaaagaaggctctggtagctaatgaatttctttcttttattatagacacttgcctgacaagattgcaagactccagtgtataaacatgtgcaggtcattgcagtagcactcaaagatgagttttatataggaacaaacatgatcaaggtgagtatatatttttctaaaatcatctcagaatgtcaatttcaaggagaataatattcttcagttttctgtccagtatctaagcatctccctaaaattcgtcatgaatgaattggctacagcagtggcaaaagggttcgaccatgaaaattgttcttcttattttattaattgtttttataacctacctttctctaggatattttcatttttcactttgtaatgtgaagcaaagtcaggtagcggtctcaatagcacaaatctatttatctataatagctgaaaaatatcatctgtaatgacttaggcgtccgttatagtacaataggtacataatgtgacatgtcatctgtaacggttggtcgaccattacagatgtgtgtcatatgtaacggctcggaaccatgagtcgttatagatgtaaaaataattaggcaaaaaaaattacggttcacatcttgtgaaccgtcatagatagcccgttacagttgtgagaatctgctagtgtctattggtggtctttttttttattaatgttctcaatctgtcaatatagtcggcactagcgggcatgattcgccagcaagcgtgattattcaatgtacagaacgcaccaactgaagaagagaatgagctgtttggtccagtcagtctcatgctcccattgacacaaagtttattgcattgtataattatttaccgctttcatccaaatgttctctgaaaagaagatctaagtgcatgctatctttatctgttgtccaattacatatatgtacacatgaatatctacaaatctccgtttaatgcgtggtatatcgtctaattcttttataaggataacgaccctccaaaatttcttatttttctttcaatccaaaggaggcacaaaagggcagaaagagcttttggtgtcattggaaaaaaaaactatttcaataggtttgacgaccccacttagattttaattgaaaggagtcatacatagacccattttggaagcttaattaatattctaataagcaactggttggtatttagcttttaagagtttcaaaacactaggtatcccaaattttaacttctagtctatttcatagattttgtagctacgtattttgagaagctaggtaaaaatcggaagtgttgaagccgaagaatttgaggtgttatgttttttcttaagcttatgtttcccagccaaaatttgaacatatatataaaagttttattcacaaattatttttcgtttgcaaatatgtcgtaccacgaataaacccaaggcatgggggctttgagacaagttgctaaaagctgccttaaacaggtccataagtcatatagaagaccaatatgtaggatttgggggggtgcctgcaaatcaggcgcccgattttttttccaaaatcggatgctgtttcaccaagtagataaaaaatgtttcactaaataggttaaaaatgtttcagtcttttaaaaagcaaaaacacaaccaaatcaccttatgaaacattttgctacagcgtatgaaataacggtttccaaaaaaatcggatgttgtttcaccctatataaaaataatgtttcaagtttcaacaaataacgaaacgatgtttcaaatcttaaaaaaatgtgaaacacggtcagatcgttagatgaaaaaatttggttcaacatatacaacaaacgatttaaagccattgcaacacttaaacccatgtatattaacaaaccacgtgtccatcaagatgaaattattaaacattatcaaaaatctgctgtaacatttgatccatacatagtgaaacatcataagaacactagctgaaacattgttggtaaaaaaatgaaacagatcctccttaatagggcgtttccgttatatctggatggctgttgcaaaagacgcgtggtggggcatgcgagcgtgggctgcgcggggcgcccaatctttttgggcacccgagcactggcaatttcgaagatttggtgagtggttattcattcaaaatcctaaggatcttgcaataacgaaatcatgtggaatagaaccctccaaaatctcataaatgtactccaattaacaataatagtacatcacagagtcaatcagtggtgctagtacagtaacattttcaataataaaaataatacaagaaaactcctgtaataaagcacacctatatcactacatgtaaccacttaagcaagcaggtgagcactgcaaaatcgccaatcccaaccgcgccactgtcggtgtcggcatcggcgctggaggacctcgagctcgaaatcttgcctcccatggcctccacctcgaggcggtggtggtggtggccgtgggcgacgccgccgcccttctcctcctccgcctcgcggcaccacaagggggaggggtgggggctgggcgggcccgcgctggtgaaggccgtcgggtggctcctcctcgccggcctcctcttccgtgtgctctgctccttcccctcctccacctcttcgccggagatcagcgaaggtgcgagctctctcgtttcctgatcttgaatgcggatgcagtgggaaaggggattgggagggtttaatgctgtcggtgggtttggggggcctgcgagattcggtgcatttcgacatattttgctgttgttggagcgaacattagtggttttcttgggtgtcttcggttccatgcctccacgagttagagattttgatgccacttgaatcttgctgcgggttggaccaaatgattagtctgaatttgttttgttccgttcatcctatctcgtggaatggcgtgcaaattttgttttgctgtgttagtaggaaaacatttcgaattggtgaacgcttttttcttttttgtttctcaaattctgggtagcgctttttccggcgggtttggtggggaaagctccgaataaactttctctgatggagcagtttggcagttacagatctcatgcttgtgcaattgcgattggacttttcttttttcttatcctccaagtggaaatatttaatctcttctctatggaagactagagattcagttctttttattctttaagaaccagaaatctcgaaaacaatatttcctttatatacgtttgcttcgtatggggaagacaaataagaaagctgtctgttttgatcttgtcaaccactgcttagtaaatatctgtgcaaagaatataaatatgcccttcaaatgtagccagtaaattagttcttcagctaaaacatgaaacaaaattaactcttctgttcatctgtcatatgcaaatgttgtctcactacttttagttcctatcctgtacttattcacattatttgatttgttatattgtcctaagtgggcttctgcaattttaaattgtactgtctatttttatgagaatgatactattcgtagtaatcttgaaatttttttagttcttgttgcatattattcccattagaaatcacttggtaggatctcagtaacacgtagaatgcccatccacagtcaaccatgcatttactcacggcatgttgacttttgacatatgtgagtggtaatttgtaaacaattggctgtagcagaatttgcttatcttgacaagctggagcaactaaagtactggtcgttaaggaaggattgtggctatggtgccaagcatgtgttgcttctccaagttttcttttggttgtgactgaatagttaggatgtaatatttatggaaatagttttgatggcaaatttgtatgaatgaacacttgaagcacaaatgacaaacttcttaaactctttcactagttcgaatgggtaaatgagaaaagtggctgatctatatatccacaatttcctgaaacctaaaatgtagtagtattttgtgaacattgtgagtcctcaactattcaagtattcattcacaagttcaagacctgctattgtaccaacctaattcctgtgataaagatctgccttcccacttttgttccaacaacaaacagatattttgttgaactggaaatagttgatgttttatgaatctattactgcttgtgtatctaaaagaagattttagggctactttccaccacagtacgtttaggatacttgacataagaaacaacgtataaattgtgatgtttctttccgtagtgctcttgtcttgcatctcatataggatatttcttttgtagggaaatgtaacctttttgatggtgaatggataccaaatccctctggcccagcctataccaacaaaacttgtcgatttattgatggtcaccagaactgtatgttgaatggtagacctgacatgtcatatttacactggaggtggaaaccatatgagtgtgaactgccacaatttgatgaagtgagatttctaagtgctatgaggaacaaatcctggggtctgattggtgactccattcttcgtaatcaagttcagtcactgctttgccttttgtctaaggtaaaagttatgaacattacatattttcactaattcactttcccaaccctgttatgaagcaatgttcatgctttccttgaataatcatgttcctctgtgcacctttcctaattcttaaatataacttaataagggatgatatatgatagcaagcaagaataccagataagtttcatgttaccttccatgcatactgaacattatccccattagtgttatacagataaccatcctgagcagacctgcttgctgttttatttaggctgaagaacctattgaagtgtaccatgacaaggaatacagaaacaggagatggcacttccaatcatacaacttcaccgtgtcactcgtctggagtcccttcctcaccaaatctgaggtatttgaaaatgagaatgggcaatccacctctgaaatccagcttcaccttgacatacttgacccaatctggacaagtcagtatgagaccttcgactatgttgttattgccggtggacaatggtttctcaaggtcgcggtctactgggagaatgatagggtgataggctgccattactgtcaggacaagaagttacgtgaacttggatttgaacacctctatcgcaggactctgcaacaaatcttcagattcattgcatcttcaaaccacaaaccagctgttctcttcaggacttgggcacccgatcacttcgagaacgcggaatggttcaacgggggaacttgtagccgggttttgccttacaagaagggagagtacagcggaaaagacatggatcgtatcatgagaccaattgaacttgaggagttcaggaatgccatggcggcactaggtggttcgcggaactctgcgaatctgaagctcttggatacctacagcatttcgtccatgagacctgatggccatgttgggccttacaggtatccattcctgaaaggtgacaaggatgccaaatcagttcagaatgattgcctgcattggtgtgtaccaggccctatcgacgcttggaatgatctcgttatgaagatggtattgggctgatgaagcctctgagataatactgaaagagtaaaatgcaccagcggtccttaaacttgtcaagaggtttcacttaggtccacgaacttgcaaagcgcacatcgaggtccctaaacttggtttattatatcatcctggtctaaagccacgtttgaccgtggtcttgtctacgtggcatgccacgtggacgatgacatggattttttgaaattttttctccctccttccttcttttttttctcttttatgaaaagacgatgacatggatgacgtgtacaaggcattttcgtcttttcgacaaggaagaaagagaaaaaaagaattaagaagggagaaaaaaataaaaaaattccatgtcatcatccacatggcgtgccacgtaagcaagatcgcggttaaacgcggctttggaccgggatgatacaataaaccaagtttagggacctcgatgtgcgctttgcaagttcgtggacctaagtgaaacctcctgacaagtttaaggaccgccggtgcattttactcatactgaaaatgcagggtttgtttcaagcacattctgcaaatctcgaatcagggtcagtttcctgtgctcggtcgtgtactggtttaaccgaaatttgtaactagtaaaacctaaattttgtggttgtaaatcatatttcggttttgggccgggaagtggcttattgtttaatgtgtgcggctgtaacttttggaagtcaaatctgtttgcctgctctcatctttatgtgaaaattcagggcatgcagtaggagaaagttctttttgataataacatatatctggtcaaaggttattacagcattgcaacattaagttgctaagttgaaacaattaagttcagatgtcttgaatcgtccgcgatcgctaatcggcgcgccaccagcgcgcgtttcaggcccataaggcccagcaccggcgcgcgcctccttccacgctttttttttcgtttttctttagcgatttttttcgttttcttttccacttttttctgattatttttttaatctttagcatgttttgagtttgaaagtttttaaattttgagttaaaaagtttcaaatctaaacttgaaagtttttaaatcttgacttgaaagttttcaaatctcgatttgaaagttttcaaatttttcaaatctggacttgaaagttttcgaatctcaaagttgaaagttttcgaatctcgagttgaaagttttcaaatctcaaattgaaagttttcaaatttttcaaatctggacttaaaagtttttgaatctaagttgacagttttgaaaatttgactttaaagtttaaaatttaaatcgaaaattttcaaatctaacttaaaaaattttcaatctattagtaaaaaaatcttcagaatctttcctaattactatcattagtgttaagtatattaactaatagaggtagttaaatatattaactaatagtgttaatagaggtagttaataggggagaagtgctcgctagcggcgcgcacgcgctagcttggtgccccctgaatcatctgcctcggccctcggcaatgtcagattctcaaaaaggcttgtaatctgttcatagcagtgctggtcacgtgcttgttgggcctaggcatgcccttggaaggataatgccctactatttttaatgggtcccaccagtattattctactcactttttatttcctctctcttctctgcctttcccgctagtggaggaagctgaggctccgggctgaatgccggcccaagcagtgatagcgtcctcaagcacaagcgtcgggcaaagtagaagtatataggtagtacgtggtcgtcctcaccaccagcctaccaccaccaactccatcgattcttctccgctgccaccaccttcccatccccatccatggaatagatcgggcgctacaacctctcttcatcagggccagaagatgaggacgatggtgccgccgagcttgctagatccggcatggggctcggcggatctggccttgagggtggtggagtaagaaaaagctggatgacggcatcaccgagctcgccagttccgccgagagcaccgacttcatttcccgccaccatcttcccttctcctcacatgtgtctctccccaggttgccaccaacgccccgtcgagctcgtggtggtgaccttgcttacaacggccactcgttggatgcctgtcaccgcctacatgtgttgtggaggcgtcgcatggggccacaccctctcccaacgcactgctcgagtcgtgcctcgtcgcgccctaacaaatccctgacaaggaacataggtctcgacttgtttctgcagtcttcacatggtaataggagaggcaaacatggcatgaaatctcttacatgagaggctggggctgaacgacagttaggcacactgtaaaagccctaatgaacacgtaacaaatccccaaagtagtcatttataccaaagctataaggattcgcttaggccataacagaacaaccttagtggaaattcataacttagctacactccaaaattcataaatttagtaagagaaaaaacatcgacacgattacaaatcgagcatttgaatttcctaaaaattgagtgttgtttcactactcgtaaagaaaatatttcacccaatagattagacagtaaacacatttaaactatgattgaaacattttggtgtaacatatgaaacatcgagtttcacgctattaaaacaccaacaaatccatatgaatcaatgacaatgttatgagacaccgtcaaaattttcataacaacattttaatccaatacaaagtgaaacatcaaaagttcatagcgcatccatgctaccggcggtgaggcatcggtgtccatgccgacctcctggaagaagagaaaagaagggacgcaccacctatattcgcaagcttgacacgaaagtcactgcatgctgccgcatccacatcatatttttcgacgccggtcactacgctgctgtcgagcgacgcccacgggaccagacctccctttcccctagcttccagcaacacaacaaccatagatgttcatttggctaagttgtcatgacagaagaagagagagggagggagagagtgagagagatgggatgaaactagtggataggaatgaatagattaccgttcatcgactaaaacaaatctgagccatcggattgaatcggaggcctggatgaccaggatgtgtgtgggtgtgggcatctgatttttgcctagcataggatgcccgggcgggagcattctaaaaaaagaaaagaaaaaaaaagtatctaaagaactttcgtaattttttttgggtcaaaaactttcagacgtaactaaagtataattaaaatgtaattatattttaactgcattgtaactataagtgtaactacgatattactatgtgtagatagcattgggtttttatgtgtaacatgtataaaaatttctttctagcaattttctctcttaatgcatagaataaatctcgaggtgatccgatgtttataaatctgaaagttctagggacataaaactttcataagttttctaccaaatctgaaaaaaaaaatggtataacaacaaaaatcaacaaaaaagatgtagtcagtccaagtcaatctcggatgcactcctcgcacaaagttgatttttcggacaagtttgatacatcgattcggatttaggagcacgtcacgtagcgagaaaatttcgatcgaaataataatccctaaaactttcatagaaaaacaaaagattattttgtgcttcaactcaggcatataatcgctttgtgcttgtctgcttagccacctgtatttagtcagattggcagcagcttaatccgtcggctaaattagtaccagcgaaacttgctggtcatattgttgacggcctgaatctgcagctccaggtcacggatctgcctgcgcttcgccgccgcgagcacgagctcctcggcgcgcgcgtccttctcctcctccgccgcgagcagccgcgcctcggcgtcgtcggcccgggcctcggcatcccgcctccgcgcctccaccgccgcccgctccgccacggccacggccagcgcgcgctccagggtgcccacctcctcctccaggttcgccgccgcctcccccaccagcagcctccgccgcagcagcgccgccgtgccctcctcgccggcgtcgtcctccgccgccgccgccgccgacgccgcgccgcccctgagcgaggccagcaccgacgagaagcatgacagcggcatgtttttgagtcgcgttgagaaaacgaaaatccaaagacggcggcacgtagagaaattaattacgttgggaaaaagtgatgagcccatgggcttttgataggccgattattacgaaggaatacgagtccgattacgatgggaagtaagacgaggtgtcccggtctgaatcgaattacaccggtctgaatcgaatacgttgtttatacgcccgaacaaagtgagcgaaagtggttccgagtcggatagtatcgcggagaaaaaaagagttccgctatacatacgattattttttatacgatgtttgtacgatgaaacgtctctcctaacatttgtagtgacgaaacagatccctccttcactgcaaagcccatatccaaagcccaggctcctcctgacgacctggcctgctttctcgttggtctggttgcacatccaaccaaagcaatcttctttctaatcatatcttaagcaatattcttcctaataatatgttatatagtaattgtactcagcactcatttatcatgtggcaggttaagcaaattactcatacatatatgttccttgcaccttgcactatcaaatagaattcccttctttggttcttgtaacatagcttcctctgttgattgctcatttgaaacaaacttctcaatttcttggtcatctgattcattttggacctcctcaataataaaatcatctttgtctgatatggcaatatcatcttctacttcattggtagataaattggtctccattactgaaacatgtaaattgaaacaatggcatgttttgcaaagcaaaaattcagattcattctataataaaaaagaagcatttcatggccatggacattacccaggaccaaaaaagaaagagagggagactagtgtaccaaaaaagatgattgcgaagctaaaggaattcaggcaaataagatggcatacctatgtcttcgtatgccgtatgctctctggattaaatgcagaattgcagatgcgctgataacatggaatagggaaagtcaggtttagggtttaacaaaggaagatgtaaagttagatgcaaagaggctaattgggctttagggcccatgacgctcttgactgccgtgtgcgcatgcgccgtgcgcttgagttaggttccctgccgtcggcgttgttacgtttgatggtaccaatatcgtacaaaaaattcgtatgcgtagcattttccagaaaaaaattgaaaatattttttagtttggacgcggataggcgcggctgccatgcttgggccgggcggctgggccgagagggaaagagggagggaggcccgggagagagagaggagaggaagaagagagggagggaagagagacttgggccgcgggccgagggagaggagggggactttgggccggactgggcccaaaggaggaaggagggtttatttttagtttttctttttaataaactctaataattgttttttttcttaataactattttccgtgctctgaaaatacaagtaaaatttgagggcaccttttagaccaaggaggatttaacggaaattctccgggcaacacgaatttttcttgtatgtattttagtgtttgtcaatttcttttcgaattttaattaattctattattccttttagagaatgatttttaattcgggatgaatttatcaggacgtgacattggtgataaggtggaggagagaagttaggagagagagagaatgagccacccccttatggcatagcttgtgtgcttcaattgtgcatattgatatgacagaagaaagtgatagttttagatggaactttcatcaaaatggtcaattcacagtttgatctatgtatttagctttaataataatggttatattgagaggaataagattaattggaaacttaagatgcctctcaagattaagatttttacgtggtatctacttaaaggaattgtgttaactaaggataatttggctaggaggaattgaaatggtagtttaagatgtttttttataaaaaatgaaaccatctaccatctattcttcgattgctatttttcgagatttctttggagttactttggtttacatcctccacaaagtatatctcatatgtttgggaattggcttgttggtgttgataaaaaaattaagaatcttattcttgttggagcatccgctttatgttgggttctttggcttagtaggaatgacatggtttttgatatatcaccatcaaaattttatttgcaggtacttttcagggcaacgtaattgctccattgttgggcttaattataaaggtgtgaagaagatatcagcttaattaatgatggcatgtcgtaaacttgagtcaacgattatgcaactctttgttaactttggatggaggttctcaaatagaattaaatagttgtgggatctttatcttgtgtcagtatatattagttgtgcttgtttgaaattttcattggactcactatgtgagtttgctattgtgtgaactatgtaataattggttgtagctcgtttgagcaaatgccgggatattttattccattatcaaaaaaagggggcaatctctatataatctctaagaaaagtgcaatatgttgcacttgctatcttttaattaatgagaagatgacatgacttaaattagatgtggtatttacatctactacaaaacttgtcctaagtactgcacatgaaccaacccggggtattgaagtaataaaatttattgttttgcagacaggtggtaggcattgatggtaggcaagaaggtagaagttggtttattttgggacaaacttcaatctctataagttgttttatttcgggatagagggagtagcaccgtacaagatgacctgggtatgcagacttattaattaacaaagtaaaacacgttagtgtgggcatgtcggatcgtcgcgcgcacacgcgtaaatttatgataacatgatagccggcaggtagatccaaaatataggaaggagcatgtctaaaataattagccatggatggcgcgcaaggtagctgcttcattaattcagttgcgcacccagatcatgtcgtcctgaggcaggaagtggcagatggccacgctcccgggcgccacgccgagcctcttgtatgcctccgccaccgcgccgtgcccgtccacgtccccgtggcacgcggccaccgcctgcgcccttgagcccgtgcaacccgaacacggcgtacgcgtacggcatcccgtggcatgccaccatgtcgccgccgggcaccgccacgggcctcacggcctccaccctgtacgcctgcctcggcgtcggcgtcaacgtgctgatcacctccgtggacacggcgtggacgtcgcgggtgccgaggctggacgcgacgaactcgaccatggactcgagcgacgtggcgcagtagtgcttgtgcttggtcgtctcgccggcgagccgcgcggcctcgcactcggcgagcgtggaccacatggcgtcggcggtcggcgagacggccgggatggagagctgggagaggatctccgggagcctttcggaggcgaacgggacggactcggcgcggccgcgggggagcagcgcggcgccggcggtggcgcgggtgaagtggagcgtcatcttggagcccgggaagaggtccttctcgaggaagaacacgttgcccaccgtgtcctccttcgaagctgagcccactgagctcgctgggctgatgaggtcgcgaatggcgccgggcatcggcgaggtcgggagcgcgatcttccagtacatctccgccggcgacgcggcatggctggctcccgcggcggcgacctaaattgcagtcagaaacaagttgaattgaaaacaatcagagccaaaagttgcaactagaataagtaaaaattgtattatgttcaatctctaaataatatatctctctctcccaacttaatttatctctgttctagctcaaaactactaaaccatacaaagagcgatatatatgtgcttctgctcaccaaaaggagtaggacagcagcgagtgacctagccatgctaattaacgagctatcaaggacacaagtatatgatctaattcactgataagagtgaaactgagcacaagcagttcatagcttttgggagctatttatggagggatgctggaagaatacgaacaaataatacattgcattggccccactggattatgcagaacaaaacaaatatgtcatgtaggaaagatgctatatcgcattcacgatcatgccggatacctctattattgagcaactaagaagttagcccgcatgcatcctaggctgcatttgagacatttataagtaataggttgattgtgttaaaatgtcgtatttgttactatatagcaaaatataggtatatggattttatatcatcggtttgattataaacagagcaatagttagattagaaatcagacctggagcttataattgtaaactatttctcttttagtaatacaaaatagcaacggaagaggaatgaaaagcgtagagctcgagccaaagagggaaggagtaggtgtgtagtgatgggcacaggtgagggtaatgtggaggggattttttctttgtaatttttccaagtgattgaagtgaaagacaattattagatgctattttcctaggatttgtaagattttttttaaagatgtgatacaaatcctagaaaagtaacatctaataattggttttcacttaaatcacttagaaaaattacaaaaaatgaatcccctccacatcacgctcgcatgcgtctatcactacacaccggcctactccttcatttcctctctagctcgcgagctctacgcttctcatttctctccccttcctattttatactccctccatcccataatataaggcatggtcaaacttggcacagtctttaaaagattaaatctttgacttaaatttctcatatactataaggtttattgcaacaaaattataaccatcttaaagtaaatttaaatatcaatctaatgatattaatttcaacaaacaaaacttaatttatattgtaatagttgttggtcaaatgtttttaaagttgaatattggaatgtgtgcatgccttatattatgggatagagggagtataactaaaagaaaaataatctatattataagctccatgtctgatttttaatctaactattgctctgtttataatcaaatcaacgatataagatacatatgtctatattttgctatataacaaatacaaaatttaacacaatcttttcgggagtattgtgtacagccgtgcaacatcgtcgtagtttatatatttcaccggacaagatgcatggatgaatcttacatgcagacttattaacatgctgccacacgtatagtggcatgtcgatcgatcgggccgtcgcacacacatatatgcatgataagacatgatacgcacatagctccaaattgtaggaaggagctagctttgagatcacacaatttttatcccctttcacgcgcgcgcgctcagttgcgcacccagagcatgtcgtcctgtggcaggaagtggcacaccggcacgctcccgggcgccacgccgagcctcttgtacgcctccgccaccctgggcgccgcgtcggtgtggcacgccgcgagcgcctccgccttggtcccgtcggcgccggccagcgtcaccgtgtacgccgccgccgtggtcgtgtggcacccgaacacggcgtacgcgtaggccatgccgtggcacgccaccatgtcgccgccggacaccggcacgggcctcacggcctccaccctgtacgcctgcctcggcgtcggccctgccctgtcgacctccgtggacacggcgtgcacgtcgcgggtgccgaggctggacgcggcgaactccaccatggactcgagcgacgtcgcgcagcgcttggcctcaccggcctgcggcgcggcctcgcactcggcgagggtggacctcatggcgtcggcggccggggagccggcggggacggagagctgggagaggatctccgggagcttttcggaggcgaacgggacggagtcggcgcggccgcggggcaacagcgcggcgccggcggtggcgcgggtgaagtggagcgtcatcttggagcccgggaagaggtccttctcgaggaagaacacgttgttcaccgtgtcctccttcgaagctgaggccgctgagctcactgggttgatgaggtcgcgaatggcgccgggcatcggcaaggtcgggagcgcgatcttccagtacagctccgccggcgacgcggcatgtcggatgcctcatgcctctattattgagcagaggctgatagtgtaacaacaataatcatagtgtggcctggggttacccgactccctatcggtattctttgaatgatccaacatgcatgtctatttctagtaaatttatggattcgccaatagagcaattttagtttggctcagttctatcgatggatgagtccatgagaagttagttttttttacaagctgttcaaatagttatgaatgttttttttttcaaaaaattacagaagtatgttattaattgtatcgcatgtttattgaaaaacacgcatgatcaaattcaatatatgcatggtgtaaaaaaaacaaatcaaatagtaaaagttaccatatatagttccacaattcaatttttttctcgatatagatattgaatttgaacttgtattaaaagacatatataacaggctgccataggcaacaaattaaatgaatcacaaggaacactcgacgaatacaatccctgtcagtatttgttatggccacagataaatccgcaagcacacaaaccgatatagcatttcatctcagagtattgcaagtgtattgaatcacaggaaacgtatgtttataatccaacaaatatgatttttctaaggacaacaattaaatgataggcttaagagagataggatttgatgaggacatcccagctacacttgacgtaaacaagggtgatggtttacgtcatacatcacattaagaaaatgaagatgacataaaccaagttgatagattacgtctcagcaagaatgatcaagcttatcatgatctaattacgcacagccgtgctaggaaaatacaacaagaggtgaactcgctctttgctcaacttaacccaaattttagtgagaattttatactacctaaatgctctacctttgtattgctaaggtttacacccgaggacatcatcactacaccaaggaagatgggttacgttgaggacgacaaggattacgccgaggaggattcagcccattcccaaccagcagctttttacaccaacaagaagatggtttacgctgcaacggctcaacttccaaggcttatgcgacccagccaatcaagagacgggaagcatggaatacatgattggaaagagggacaagtatagtttcgaacgcatcaaaccccacctcaatatcattctccaatcaaaagttatggcatttttactgaaggctgcgcaggagctgtagggctgtgtgcaaacccgagaaaactctttgcattctcatttttgttagccttgaccaccagaacgtggcttcttatgttcacaccttagctaggagggatgttcctagtataaatacccctctactccatccattagacaacttttgttcaattgaaaacctcatatatgagagattcctgaagactgcataagtgtcttacccctttgttcttgtgagttcttttggacttgcgagaaggctcctctggtgccccctagttcgtgctctacggcttctagttcagctgcaccatattgtgtggattagtcccggattgtggttctgtgattgctcggtttgacgggtcggagtccagggggcttcggatcattctcaccctcaccacttggtcgcatccaaccttggtaggtataaagctagttattccggatcgtggttctatgattgctcggtgtgacggatcggagtccgggaggcttcggattgttctcaccctcaccacttcatcgcatccgaccttggtaggtataaagatagttatcctcttgctgctcgtagctagttaccctcttgtgtttcggtttacgccggcactctgtcttgaacctactgctgtgaagatcgggccacccctcgcgagtgtgttcgtatcaggattcctatatgtaaataatcttagttaagttaaggtaaaactctattagtttcttcgagcaacggttcactcctggtctaccaagggactccagcatgtatctctatgatgtacccgaacgtgaaggattaagaaagacggacatgattgtcaccacatgttggctgttgcctacgtttgcattccatggagcacacaataaatgaaggtaacttctaacctagacaacacctctacaacattgattacaactcggccaagaactttcttctttatctacaatcttagtactagagcacttagtataaatactaagcgatgaacctgtcgcaaagataaaaatatatcatacttaaataagaaaagtaaataccaaagaaaatcatgaatacttacttatataaaagacaaaatcgtcgaggtacaagataggagagagtgccgacatctccggcaatcctccagtacaccccatggagagaatgtcgacatctccagcactcctccaaaactcggagagaactccgatattttgggcacttctttcggagcttcccctcattctcttcctatattctaactctactatagagtaggctaaatataaaagtgagttgtactcaactttctggtgttttgagagtgggaacttctcctccttatgtagcctgggaatcaagcataaccgccataggggaggcctgaggaagcgacatgtggaagctgtggcagtgatcagtcacactcttggttcgaccgaaccatggttcagagggaatcactttcaccgcctttcttcctcattttcgccttagtcattgtcctatgggtcctcatgacggtgcatagtaaattggcttcaattatgttagcttcatatgattagttggcccatggatcttctgctagcgtttgagtggccggaggtggttttcttcgcatggcaggtggttttcttccataattacatgcatacaaatattcaccaacactcgtgaaaatggttaataataaatcctatcactaggtttaatatttcattgatttgcttttatacaggaattgatagttatatttggtattaaaggactatcaacaattccgaaacatgagaaggtattacctctcatcgagagggcctaaacctgtctaaacctttgtcccgataatcaatccacgtttagatcttgtatttgtatactacccattttagcattgttgatatacgacaccgacagttggcgcgccaggtaggggttgcattgagtttttcagtgacaatcatgatgaaatcatcttcaggagttgtcaaattcgtcttccctccaaggcaaacattttgttttggcggtttcatctttctcaccgacaacttctgcaagcatttgttgacggttgttagcgatcagtttcaaccgtcaatattaccataatagacgagaactagttatgcttgcaatgcatatttaagttagaataataatattccaccagtattaggtttactaaccttttgcagagaataacaataaagtggagaagaatcgacatcaaatcagacgatcagtcaatcggatgatgtcgagaatcagacttatgtatgaatgggccaagaactcagaaatgacacgatgaattgggccaaagttcacaagtctacaacagggatcaagagaggaggccgccaaccgaactgtgggctggttgggccaacccctggttcgaccgaacccccctctccgccgtttgatccagggattggagggacggctgagatgagtccccaatgacggttggtgggtattaccgacctttccaaccgtcataaccgtcagtctcaagctatataaacccctcactctctccatttcttcagacacttcaagcaagagctctctcatattctctcaagttagtttagtattatcaagctagtggagtaggaatagaatagaaatcagagtccggaagtctttggaagtgttcgggtatggctctagtagctctcctttcctcttttgtaagccttgtactttatttagaatattcttatttatacatttctggtaatgaaatacgttccaagtctatgaatgccaactttattttatattcatgttatactgattatactgctagcttatctgggagatgcataggtacgggtataatgtttgcttatgcaattactctatgtcaggatgataatattagagtagtatctggtagtttaagcgtggtgtctagattattgggtatcattatttggggttatatactgcggataagaggtgggccgctgatggtgatagcttgttaacgactaaatttggtaatttaggtatcggagatgaagataaaattgaagcggaatccaagatggagatcattccggaaacagagcaagaatcggctaaagtccgaatcggctacgatcaagatcgacagagttcgagtcggagaaggttggccaattaagccgattccgacaatgtgactcggtacacattgtcgggttgagttaatgtgcttcatgaggattgccatgcatggattgagtcctgaaaaggcaattgtatctattaattagggtatttcttgtaatttccttagagataagtttgggcaaaagtctgccgcaaagacttatggtatcttagagtttgttagagatgagagtcgtgtccgacatggacatattttgtaatctcgggtataaatagaccccgagccccatgtaatacaaaaacacacgttcaatacaatctcggcgcatcaccacccttttactttcattttgttttgacgagttcttgctttcgggttgagctgcatcagttgcgatcttcaactagaggtaaaacttgttatggcggcttgcgttctcgggattagtgcttccatcgttatgatactcaaatcttgcttatgtaatttgtcgagttatcatatttcctatataatatttgacaatattgctatttaaccttcaatcggctaacatctattattagaaggcagccgattaggttaaataccaatgttggctcagattatatagggtatctaccactctatgaaacaaccagcggcttgattgtctatatattgtccttcttttcatacttatagctgcatcagttgagtttgaccttataagtcgtgattagaatcttaatctctagcctgttttctggttgcggattatggtagcgtcagggtttcagccgatcttacctaatttagctttatactttatgtgcttaactgatatgctagatctgccctttatattacgatcttattacagcaaagtatgttaagcttctgtttgatatattttgcttgctctaatatcttaacatagagttgtatcggagtattagccgatatgtgctagatctatctgatcggctatgctatgaacatctataatctcattattaatatatacttcgatctaagtgattcatactgtctcggcatgacgtccgatctatcctaatcacttgatttaagtatatatcaacataaggattatataccattaatatctacagccgatcgaatagatttagttctttcttacttattcatgattgccgatcgattcaaatatgacatcggctcaaagttaaatgatatgtcatcggcgcctggccgatcggttatcatttatggatttaaccatggtttctttgtctttatttcttgttgattgcaggatcaaatcaactggcacgctcacgaacctaaagacaagctttttggacctgcactggagttaagcagatctcccaggcctcatgttttctcttcaacatagctcagtacgggtattcctgcgcgcgtgtatatagtcctaagttaattttctggggagggtactcctccgtatttagccccggttgtatggtcatgacgggctatcgtaaggaactcggcagtcaggggtggcttctcgaagtactaggagggcatcagaaagagggtattagctagttaatcatataactagaatgtatgtatactatgtatactagaagtataggaatagattcttttctattttctttccacttagcttagataatttagtatgagaatgagtagttctatgcttgtgtgtcattctaccctatgtattatactaactcctgcttagactatgattattacaagtaatatataaattattagtacggttctctctactataatcttcccacggaattaaacaaatacgatacccttggaatactctcgggtgaaatgctacaattgtatatatgtgcgcttgcggataaactctgtaaccataatatacctggagtatttctgcaccattgccgagaattatatttctagtaatttcgttaagaaataccaataagcatttctggcgctgttgccggggattatatttctaataatgtcattaagaaataccaacagcatccaattggcggggttcgagacttcctcggtcccttttgatctctcaaatacagttgtggcctactccaggtcggatttccatggcttggcctcaaactggtctggggagtcaacgccacctgcttacctagacagcatctccaacaacgcggaaaactaccccaaaattctgatgcaactccctccgcttctcgctgcgacggttcaggacccactccatcctcgtgaattcaatctaggcatgattcgaccatgtccagacatgggcccaggaaggtgggcatcttgattcgttcgctcgatgactcctgcaacatcacggagatggtctatgacctcaaccactcggaagactatgccagattcagcatggaaacaatctacagctccaagtactccaacgattataccctactcagggaagtctttctagttggagcgccaaaagaggacgagcaggcccgcatccactaggaagcggaggaggagcacctacgtaaagaggagaaagaccgcttgcggaaacaatgtaacctaatgcatcgaggatgcacgacacatgacagcatcatccagactgcagcagaatagcgttgttgttgtaacgctacttgacaccctaatcgatgccttagacaatgccatgactccgacgctcgacaagatcgatgccatgatggtcactacggccgcacaacaggaaaaggagctagaggcactcagcgaccaagccaaccaccagaggagtctattaccaagacaccaagaatccatcgggcaaccgaccaagcaaacggccatctcttcacccttcaaaggatagccggtcagccgagagcagttggggccacacagcctcaaatcttcaatgccacgaggagaataacataacacattcttcagttgaaaaccgtgataacaatcatcgtgaagatgaccaccatgaaagcgaccgtagacaggaagacgaccacgggcaccgggaaggcgaagacctcaggattgaacaacaccgttgtcactgagagagagaagaccaggatcgccgcagttcatcactcaccccatcgatccatatcacctaattatggtgatgaaggaatagcaacttttagctgagacctacgtcgagtggactggctggctgacttcaaaccaactggtatcgagaagtacgatggcaaaaccggccctgagtcatgtctcaccatttacaccttggccattcgcgcaacaggagaagatatcaaagccatggtgaactacttgcatgtggcacttactgattcagtaagaagttggcttttggggcttcggtatcggtttgttgcaaattttcaaggcacctacgtgaggcccgggatacagttagatgtttaccatgtcatacaacagaaaaatgaattattaaaggactacatcctatcgacggtggatacctgtagactagataaatggggtactggggtatgttggtacaaggatctacacaatacgacatcaaaatagacaagagacaaggattatactggttcaggccactcgtaaggtaatagccctaattcaatttatatggaattgatatggaagaccacagaatacaaagagaactgatgaacttgttaatacagacgagatccttatcgagattattcgacgagacctcccggcggcttcggcttgagtccttcggcttcgtagactatggtgggtgtgttggcgctatgattcgatgattctgaacccctctaggggtatgctttttataccgcgagttgttttagtctccaagtagaactcagagataacgaaccctgcacgatatagaatattattcccacgagtaggactccgataatctccagcccgtgaggatattttccatgctatctcgtatatttccttatcgcatacagaaacatatcgtaggatacgggtatgccaatcttgtatatttggtaaatcgtaggatagtaggtatgccttatccgtaaccctgacacatctgacgtttctttgagacaagcaacaagattccagaagacacggacaatgtcatcatcgctacttttcaaaaaggaatctgtgacgaaaatctcatcggcaagttcacccgcaaaccgccacttaccgtcatgaagctcttcaaaacagccaattcatacgccaattcagccgaagccatcaatgttgtgcgggaggacaagcaatcaagtactccacatctggtgaataataataatgagtattacaagaaggatcgcaatcgaacacctgaaaacttggtggccgcaacgtcttattttcagtcacattgtcggcgtgctagaaaattacaaccgaatcttgaacgggccctgtccaaatcacccaaattccaaacactctgctaaggactgtttcacattcaagaaatttgttgaagacaatgctaagcagttgaagctaacagctggaaaaggaacttcaggacagaacaaggacaatactggtgaagctaatccggatggtttccaagacccagagttgagctaaaccacatctttggtcgccctttagcttataagttcaagagaaagaagctgatcgatcattatcaacgtaatacactcagcaaatatcaattcccaaaatagtagtagggcattacctctcatattgagagcttaaacttgtctaaacttttgtccctacagtccatcaacttttagatctcacgtgcttcccctttaaagtatcgcctatatagaacgtcgacggtttatcaatttttcgaattcaccaatgccagtgccgtgccatccaaaaccactacaaatattctcgaggttgaaaattaaattctataattgaaattatggttagagagtctgtctaaataaagtctagtgttgatctagagtattggacctccataaatgtttacgattggaacacaatatttgtcctagtcaataggtgggaagtaattcggcaagtaggtactggtattagatatataaagagtttatgaggatgtttgtccatccaatcaacatatatcgtagtttttccaaacacacatgaatcttgtatgaatttatgttatatattattattactctatttttattatataatggctatatgttattaatataaatattaaatctatgctacttaaaaattaaaaaataagagttgctttcatcgtccttaaaaaaaccaggcgaaaaaaacggacaaaaaaaaccaaatctgtcctatccaaataaatgggtgaaaaaaaccgggcgaaaaaaaagaaaaaccaaacctgtctgataaaaaaaggcgaaaataagaaaataaaaaaatttctgtcaacgcggtaaaaaaaggtgaaaaaaatataaaaagaatatgtctgattccaaagaaaaagaaattacatgtgacgcggtaaaaaaatcaaatcctattatatgtggcacggttaaaaaaatgcgacgcggtaaaaaaaacaaatcgaatccgattctatcgatgcagtaaaagaaaaatcaagcataaaaaaaatgaatatgtccgattccacaaaaataggaaacaatctcccatccgtttccactacttctatctatctactctaacaatctcccatcatccgtgcaaaataaatcgggcgaaaaaaatcatccgaaaacaaaatcgggcggaaaaagacggacgaaaaaaaagggtgaaaaaaatcctattctgtgtaaagaaaagggcgaaaaaaaaataaaagaaccaatctgtccgattaaaaaaagaattaggcaaaaaaaacccagcgaaaaaaatcaggtgaaaaaaaaccgggcaaaaaaacaacgacgattccgtgtaaagaaaggcgaaaaaaaatcaatctgtccgattaaaaaaaaggaatggaaaaaaaaccgggcgaaaaaaaatcaatctgtccgattaaaaaaaagagtcgggaaagaaactgagcgaaaaaatcaggtgaaaaaacagggaaaaaacgaatccgattccgtgaacgcagtaaaaaaaggtgaaaaaaaataaaaaaacgaattctgtccaattaaaaaaaataattatatgtgacgcggtaaaaaaattcgaatcctattatacgtaacacggtattatatatctatatcttctctatctctatctatgctacttaaaaattgaaacgtttccatcgttcgtaataacgaaaaaagggcgaaaaaaaatattaaaacaaaaaagaaagtccgattcaatttactttcgttgtccctgaaaatcttatcttatcttaaaaggtccaggccgctcggtgctcatcgttgtttgcacgcccacctagccggaccaccgatgtcgtggcacagctttgcgccgcccttgggtgcaccctcagcaggcgaagcaggagccgctcgttggtcaacaccgcacgcacgcactagctcaccggactgctatcgccgccttcgtcgtcgttccgctcgttcgtcaccggagagaagagatttgggagctagggttttgcccctctcttccggtcggcacttcatccatcatggggacaatcggagccgtccattagatcgaacggctcagatttgcccagcgttgggcctctaccgctgctgattacgctacgcccaatgggccgccgaagtacatcgaaccatccccgcatatgtgggccgcgctcagctgctcggcttgcgggctgtcgaattgactcagctcgccgaagatgggccagcccaagtttgggttggctaggaagacctgggccgaaagcaaatttgatcaaacaatgtggctcatattttttaaatcaaagtccgtcggataagctcctaagtaggctcgaaaaataaatataagactaaatcataaattctatgctaattcatcaaattagactcggttctacctatttgttaatatatcaaattagacttagatttttaccgatttgaggttttcaaggtgtcacactatcaaatggtgttttacccgttgcaacgcatggacactattgctagttaaacttaaaatataaaatttcatgatatcccgatactacgatacgatcctacaatccgatactactttaagaaaaatgatactatctagaatcccgatgctaacaaccttgtgtgtagatagcattgggattttacgcgtgacatgtttaaaaatttcattctagcaatattttctcttaatgcataaatctcgagatgatccgatggtcacaaatctgaaagttttagggacagtaaacttatgaatgttttctagcaaatttggaaaaaaaaggtataataacaacaaaaatcaaccaaaaaagatttagcactcctcacacatagttgattttttggacaagtttgatacatcgattcggatttaggagcacatcacgtagcgagaaaatttcgatcgaaatagtaatcccatagaaaaacaaaagattattttgtgcttcaactcaggcatataatcgctttgggcttgtctgcttagccacctgtatttagtcagattggcagcagcttaatccgtcggctaaattagtaatttagtaccagcgaaacttgctggtcatattgttgacggcctgaatctgcaactcgaggacgcggatctgcctgcgcttcgccgccgcctccgccgccgcgatcacgagctcctcgacgcgcgcatccttctcctccgccgccgcgagcacccgcgcctcggcgtcgtcggcgcgggcctcggcgtccagcctccgcgcctccaccgccgcccgctccgccacggccacggccagcgcgcgctccagggcgcccacctcctcctccaggttcgccgccacctcccccaccagcagcctccgccgcagcagcgccgccgtcccctcctcgccggcgtcgtcctccgccgccgcagcagcgccgcctctgagcgaggccagcaccgacgagaagcatgacaacggcatgttaatccaaagacggcggcacgtagagaaattagtcaaattatggaaagtgatgagcccacgggcttttgataggccgattattatgaaggaatccgagtccaattacgctgcgaagtaggccgtggtgtcccggtctgaaatagattacgtttatacgcccagcccaaacaagggagcgaaaatggttccgactgtggctcggatagtatcgcggatgtaacagaaaacctagacaatggtatcccgttgaaacaagatactcttttatgagacagtaaatgatacctgttgtggtacagttgcatggtacccgatacctgtgatacctgttactcggtacctttgatacctaggacctgatacctgtgatacccgtacaagacaatagttaatatgtctattccgttgcaacgggatcctgttttgtagcagccctccggatgcaaatatggaatattgtaccacttaccgatggagagagactacagaacgggatcccgttagaatggaaaattttaagtgacttattccctgtcttccagtgagcttccacatgcgttcccctgacacctggtaccttgggtatcagagtatctgatacctggtaccgactggtacctaggtatcacagactttggtatctgggtatcaggactgatacctggtagagaagataccgggactggggtgccgggatcgccggcttcttttgcttctgcggtggtggtggtggcggtggagccacctgcgctcattgtagctccctcatcctcctctggcgcagcggtagccaccacagctctgcacccacgcacccactagctcctacttggttcttgcggcaggagtcctcggtgacgcacggtggaggcagagcaggggtgaccagcggcggctgttccctatccctgacgatggcgatagcctagcgtgggcgccatgcccatccgatgagaagaccgacgagggcggggagccagagcggtgcagcaagggaggcgatcttgagggtgacctcgccgaggccgtgccatcgtcatcctccttggccgccatagacgacgacccctttctaccgtccggcttcatctccaccttcttggccttctcccaaaagagagagagtggaggggagatggagacagaggggagtgagggattcggattatcccgtggagaacgggatccagtgctatagatttttctcattattcatcaatggataggtaagaaaactgtcgacatattttcttttagaaatgtgtcacatttttttatccattagcctttaggcagtggcggaggggttgcctcacttaatcatgtgtccataccaatggagtcatatagaattttcatgtaatattgtactaaataattgcgcctcccatcaattattaaaagagataaatcaatatgtgatgtcaattgtatcaaaagaggagtacaacgattaaaagtactaaccaatatgagtgaatccattataccagcctagtagcacctgttcggcttggtggtctgcaatgcacgcgttgggctttacatcttcgtagcttaattctccatctaggggtacacatacatgagccaggggtgcccacatggtaattaatcactaattttactttcctacccgggttcttaggaacccctcgggactgcatagcttcgctccagctttaggcactgctctctctatcctgcagaaaaccaatctagtattcaatggaacgtttcttatttaaatttattgtattagaatatttcatttaaagtatgttgttttttagatggaggaagtagtgttgtagcagcgttattgtgacatactccctccgtcgtaaaaaagataatttaagattagatgtgacatattctaatactttttatataaagtcgttgtattaagatatgttatatttattcccaggtttattttgtgtttgacggaaggagtatcgttttcaagaaagtgctaaagcggttacgatagccaatcaatccactcccaacctggactcgctattccaccttttggctaaacgtgcccatgcactcattacaaacgaacaagtctcgacacgtaggctctattcagattcaaacttttttttaaagaaattttaacttttccgtcactacgtacctcttttccttctctcggtgacaactgactacagcaatgacgcaacgtcgcctggacatactagcctcgccacaacttcaaatgccccacgacatccacacacatgcaatccatcgagtacactccactgcgcacatccagccgagctagctcgcgcgcgcgacacagctctcctcggcgagacggcgacgtcgtcgtcgccgtcgttcggtcctacgtcggcgggcatgggaggtggccgtggtggagctccggcgacggcgagcgcgcgtgcgcggcggcctcatcagcctcgcgtgctgctgctgtgcagcccgtgcttgggccacctcatcccgttcgccgagctcgcgcgccgcctcgtcgccgaccacggcctcgccgccacgctgctcttcgcctccgcgaggtctcccccctcggagcagtacctcgccgtggcggcgtccgtcctggccgagggcgtcgacctcgtcgcgctgccagcgccggcgcccgcggacgcgctcccgggtgacgcctcggtgcgcgagcgcgccgcgcatgcggtcgcccgcagcgtcccgcgcgtccgcgacgtcgcccggtcgctcgccgcgacggcgcccctcgccgcgctcgtggtggacatgatcggcgccccggcgcgcgccgtcgccgaggagctcggggtgccgttctacatgttcttcacctcgccgtggatgctgctgtcgctcttcctgcacctcccgtcgctcgacgccgacgcggcgcgcgccggcggcgagcaccgcgacgcgacggagccgatccgcctgcccggctgcgtgccgatccacgcgcacgatctgcccagctcgatgctcgccgaccggagcagcgcaacgtacgccgggctcctggccatggccagggacgccgcgagggccgatggcgtcctcgtgaacacgttccgcgagctcgagccggccatcggcgacggcgcggacggcgtcaagctgccgccggttcacgcggtcggaccgctgatctggaccagaccggtcgccatggaacgggaccatgagtgcctgagctggctgaaccagcagccacgtggatccgtggtctacgtgtcgtttgggagcggtggcacgcttacgtggcagcagacagctgagctggcgctcggattggagcttagtcagcacaggttcatttgggctatcaagaggcccgaccaagatacatcgagtggagcattctttggaacagctaatagtagaggtgaagaagaaggaatggattttttgcccgagggattcattgagaggactagaggggtggggcttctggtgccgtcgtgggccccgcagacatcgatactcgggcatgcatcaattgggtgtttcttgacgcactgcggatggaactctacgctagagagtgtttccaatggagtcccgatgatcgcatggccactctatgcggagcaaaagatgaatgcagcaatgatggaggttcaagcaaaggtagccatccggattaatgtcggaaatgaaaggtttataatgaatgaagagattgcaaatacgataaaacgagtgatgaaaggggaggaggcagaaatgttgaagatgcggattggtgaactcaatgataaagcagtgtatgcattgagcagaggttgttcaatcctcgcacaagtcacacatgtgtggaaatctacggttggttaaaaatgaaatgatcagtggaaatcattttgtactgtgtttttcatattgcaaatttgctttggttgaccttgtgaaatttaatgcagactatttgcactacatccggatcaatcaaatatataaccaatagatgattatatacttggtctcgagggcagggacaaggctaaaatagtttaggacacttcgattgtcttaaatcaccttgaaaattttagagaaaattcataattcattagttcagctccagccgagccctaagtattaagtaatttctagtccgccctgtttggtctggttcatatatagacaggtaaagtctacattattaacgtctcaataagttgttttagaaaaatgcgtttctcattcgcaaaacatggtatttgattgagcaaaggttgttcaatccttgcacaagtcacatgtgtggaaatctaccgtgtgacttgcacattggcaaaacaaaggtaattgatataaagtcaacattaaagtctccagtgtgactttcgctgttgcaaaacatggtattttattgagtaaacttaacattaaagtcgacattttacagtttccatcggttgtcttagaatcgtgcgctttcgcaaaacatggtaaaaaaaaaagtctgaaaaggcatgttaagaaatgccagtaatttttatctgttaaatatatgataaatatgcctatcgtataggcatgaaaatagagcggatacggacgcataatgcccatatcatatttggtttcattttttttgccggatatggaaacgaatacggatagctcaaatacggaaacaaatacggattatctcgaatacgaataagaatgaaatatgatcggatacgaatacggaaacaaatatttctcagaacatgaaaagcaacccaacttctaatagaaacaaatatcaacatatataattagctcatattatataaactgtagtataatttataaatattttttaaaaattaaataatattaatagtgtggactagtgttaagagatgaatcactattaaattttaaaaaaggtatattaaaggttatagagttataaagaaatatggtatgtctaatggcttctacatgtatctgaattattatccgtatctgacggaaatcccgatatcatattcgtattcaggagaaaatatccgtattcgtatctgcatccaaactaaccgagaattatccgatccaaaagtatccgtattcgtttttcttcgtagcggacggaaactatccgttccgttttcatcctactctcgtaacctccaaaatttgtttgttctttatgagtgacggtgattttcttcttaacttcactggcgagtagagagcagagactgtatgcacggtagtggtactacgtatttcagatgatcactcgcaagagacgatgaacctccagccatatattcgcggccaaccaattcgttagttgtaattgttctaaaaaaatcgttgtaattggtcggtgtgccagtttttttttttttgtgtgtgtacaatgaatttgaaagctcactagtcaactctgattaattgccttgatggaattcatagattatataatatactagatcctagagattcacaactttttcaaagcacatgtatctcttcctcgtaggagcaattttcttattttggtgataacactgtatagttgactacaacattgtttttcaattcatagtactgtactgcagtaaaaaatagttgtcagattttacattaagatgtctaaggtttgactgacaatatgtttaatcaatcaatttttttagatttttaatcagatgtactttactaatatataatatattacctttaaaactactcactttttgttgttgctttaacaaatagagtaaattttaccatactataagttttatgtccaagttacacaaaatcacatgggttttggtatatgatgtataaccctgggtattacagttcaaaaggattacaaaactacaccattatctaatttaacttgttattgtagcaaaataaaaatgctagtatgcgacgagtcaaagaagttgtaaatttgatatataattttaaactcctaaataatggtggatcaaagaatactttgtcaaattaattaatgtgtggttttataaaactatattatgggttatgtagcatgtgccatgaaccatgtggttttatgtaagttggatcataatacttgtgattttataaaatttacttaaaaataactattaaaattcaccagttctgggtcaaaactaaaaggttattcaaaattcaatcgtatatatatatagtaacaagtgtaaactggtactattataaccactggataacacatgctaacatcgcaggctgccaccgaccttgtccctctcttgctaccttcttctaatccccaccttgccttatccttcagcgtaaagattcctttgtagaaatactttatgactttcgttgagaagtgaattttagtatatgacgccgttgactttttgtccaacgtttgaccattcgtcttattcaaaaaatttaagtaattatcatttattttattgtgacttgattcgtcatcaaatgttctttaaacatgacataaatattttcatatttgcacaaaaaatttaaataaaataaaaggtcaaacgttagttgaaaagtcaacgacatcgtacattaaaatatggagggagtatttatttgttgaaaatgattgcttaaacatgtgtgcacaagataaaagtgccaagtgaacataaacagagggtacacagtctttggtctactaatttagaacgtcatttgcactgtttactgcattatattttgggtaatgaaatgaaactagtactatatatggagtatgtggtaatgtcgcggtgtcatctgatattaaaaggaaacaaccaaaagaggttaggttaatatatattttggcgataaaacatagaataagatagttcttggtcagctcgttaatgtattctttcaagaactacatcacaccactattaaacttagtgtaaaataacaagagtcggtagcagggtgatatatacataagatcgaaacatatggtcatcgaggtcagcttgtcgtgaacaagtgcctcccatgatgtagcacataccggtatgcagcaaaggatgacggccgggcacgacagtgcggtagaggatgacgaaaatgtggtgtgatggtccagatgcgacggcagcgataggggaatgggtgtgacggtgaggacaaccgatggatgcgttgtgtgaagtaaaggacgagggtgttgagtgatgaaaagggtgtgtgatttgcgggattcatggggaatgacatggggatggaaaggacgtgttcaggggacgccagctacatacgaggtgggattgtggaaagtgaagacaatcggagacgctttagatggaccgtccaatgcaagtctaaatattggatgacaccccttatcctcttgagcacactttttcccactctttctctctctttcccatatctctatgtcatttatacgactctaccatatctcatctagagcagcggcgactcttaagctcagtggtggctcagcgtgaccagcttggcctcaacggcacgacgaactcaacctcaacatttttggggcagtgaggttggcctcggcttcctctgatagtgcaccatgacggcgatgacctctacgacctctccttcctcgatggtggtgcggtcagcgtcgtcttaattctcaacggcagcacggtacaacggcaacaaggttggccttgacttcctcgatggtggtagggttggcctcagctttcaccatgggccgttagcagcacagaagagagctccggtgctgagcccggcaatggccaaccactcacgggagaggaggaaggaggatcgggtactttttttttacgatttttttatgcttcagtccacatttttttggtgtttcattttgttggatcaaaatgtctaggtgggtattatggtggtgtttcacatatttctgtctttgtgtgtgtaatccgtggatgtctcaataaataaaatgtaacaccccaggtagccacatacctagagtgtcacaccaaactacactcaaaaaccactaactcccaaaattattagaaatttcagcagagtcacctaaaaatacagacatccacgacaggtagttataaaataactcaataacgataaaaaccacacaatccaacccatcctagctctacaaattccacgtaaaaataaggaccagaactttaaatgaccttcataagttctacgcaaaacttatctaagtagaaacataatctaaaactaaattttaatagtgtgcaataataatgtgtagttcaagggtgctactcccgtcccgtgccgatcaatatcattaggtacctaaaaaccaaattaaacacaagagtgagtaaaaatactccgcaagtataatattgaactagtaaaacatacacaggtttaatgcaataagaaaaccaatatgaaacatttgtcttcctttaatttaaaacgaaggaggcaaaaagtagtagttccctcccgggcaggtgtgaatatcctcttagcattaccgataagccgagcaagtgtgatcagctcttctcaaggatcatgaatgaagatccaaattgcattcccatgactacgcatggtacttgaataatgtaaacaaaaacttccgccagaagaatgaaacatgaataacgttgtgaacttgaacatgaagtgaaatatgaatacgtagcataataccaaaaccacataattgataatagaaaactttgaataataattggataaatgaaaccaaacaaagtaacacagtttatccatcacacaagtccatcttatacttgccttaactccttcaataatccgactcaactcctccaacattggaaccctccacacctgtggagcaaaactacgcataaactactatatctaactaataatagttacaaggatatttgctaaaatcgaaacccagttcatataaatttttgcccatttgtattaaatagcctatagctcttccattactgttttatgcgtaactcacaaaccgtctaatggaacctagcaaataatacaacttcggacatctagaaaaaattgtctaccactttcatgttgagcacaaaatcagattatgcctctgaaaatcccagattaaggaaaacgaattgctgtcctgatttccggacccggtcggcagtactgtttttgttgtttatcccaaactgtttgtcggaattgagtgaaaccagcggcgttagaaagatatcgacgatgactacaaactttatttaggacaactaacctgaatcacgatggtttaataccagatttgaaaatactattgttagcccataatcaacaactaagaaaacactcaaccggcaattaatcgatttccacgtgaaaattgtatttctatggactaagaggagttacctcttacccttacagaggagaaatcgaatttgagatcaatttgtgaaaacccagaaaatccccaacttttgcctctcttccctttttccttcttttctcctcctgctttccccgcttcctgaaactcctgttctctgttcgttccagaagcacagcaacagaccagcatcagtagcagcagcggggaacgttaacagaaacagaaacgtcaccaaggagtcgagcaggagtggcgctggacggcgatggctaaacctgtggcgacggcgcagcagcgattggggtgatggcggctagggtttgtagcggctgcagggttatcgatctcttccccttttctcctttttttctttttttttcagttggttaaatagatatcctgatgaagatcgaatggcccaaattaatttaatcaccagtacttcgttcggactccgattattataaactcatagtctattttgcactactcggcgagctctacgcatccacggttcctgatcgcctattcgaacaacggtttaaaaattaaacttttgcgcgtttatgctaatattccccgaaatatactattttgaaactcggggcattacatgaaacctaaagtttcaaacgctacactaaaatgtttcacggcgcgagtcaattgggtttcattgtttctatttgccgaaatatttctgtttgagaacagaaatattttcatttatgaaatgacacatttttttcctgattgatgaaacatttgaaacattttgttcatcaagtagtgtaacatgtgaaacatttcgtaacaatattgtgcaacaacatccgatgttttgcataatatcggacgtccgatttgtagcgctccccgaagacaattttaagcgttgggtttcacacaaataatctaaaagtgttgagtgatgaatgaagaatgaaagaatgtaaaaatgataaatgagttagtgatttattggatagatattaaatactagttgtagttattcggggacatccggtgaaaacgagctaagtattggaaaccggtaaaaatcatacttaaaagtttcataaattcatgaaaaaaaatactagatctaggtgtagatatgaaatacattctcaccaaatctcaacttcaaacttaactttgtttaggagtaacaaaaagacaaattttaagtgaataataacatgacactattcacctaaaatttgtttcttttttttctctaatgaagtagagtttagagttgaaatttggtgagaatgtatttcatatctacacctatctctagtattttttcatgaatttacaaaacttttagatattattttcatgagtttcgaacacttaactcgttttcaccggatatgttctcgtagtttatatacgttcatgatgacaaataactttgcttgaaattgaagttaagagcacttgacagtgcagtgagaagagatatatagtttcaactaagtctcgtgttcaatcccgaatacactcatattttttttctcaaaaatgtttgaagagacgactcttactctaaatctctcttttttttaaaaaaaaaatactccctccattccataatataagacacaaccgcttttattagatgttccataatataaggcatgcatgcaagcatgcaatttactatgacatcttctctattaaattactactccctctgtcccacaatataagggattttgagtttttgtttgcaacgtttgatcactcgtcttatcaatttttttttgcaaatataaaaaatgaaaagttgtgcttaaaatactgtaaataataaagtaagtcacaaataaaataaataataatttcaaaattttttgaataaaacgagtggtcaaacgttgcaagcaaaaactcaaaatcctttatattatgggacggagggagtacttttttaaatcctccactctcatgttatctaatcctattggatacatgcattatatttattaggatgatccaaactacaagatgataatctttggattaatggtggttgtgtcttatattttggaatggagggacttatattttggaattgagggagtacatgagagttaagaaaagacaaagtctcaatcataagaccatagtaaggactgcggcccagtggaaacggatatccgcaggtaaaatgccatttttcatggctggaactgagaaggatatccattctactccagaagtccagaatcgaataagtaaaagacaaaatcaaaaattcagaccaaaaaaaaaatcagagaaatgaaaagaggctgagcaacaactcacctcacggcggcaatgggcctcctcgtccacctccccaacctcgccggcgcccgccgcccatcgccgtgcggcggccaccggagggcccgcggcggcgcgcggttctcggtgtccgccgcggcgcccggcgggggcgtcaaggaggaagaggaagaggaagaggaggaggaggagaaggggacgagggggaaggagagaatagtgattcgggtgtcggacccggtgcgggagaggcggctcccgccgccgctcttctcgtccccggacgccccctcgccggcggcggggcggcggcggaggaagggggaggacgaggacgacggggaggaccggcggcggcggtaccacgtcaacgtcggggacgccatccgggcgctgcgggaggagctccccgccgcgttctaccgggagcccagcttccatatctacaggttcgtgaatcgtgagtcgtcgacctagattcccatgctttcccttgtcgggggatgatgatgattgttgatttgcgttgacggtgaaactgtggcgtagatttgacccttttctcagcgcacgagtggcactctaatgtgctctcttaagtcaaaaattggggagagaaaaatggtgatttctagtatactttatgaggtgttcttaggccgaattggagagatgatttgcaaaatttttgatgttttagtcgtgtcgtggccatagctaaaggattgttatcaggacttagataacatagtcaagtgcgatagagtctttctcagtggtttagtggtgtggttagaaaggctatgagttataaaaagtcaatcactcattatcttgttggtaaaagtactggcctcattatttttaattattaatttaaactaggaaggtagcccgcgcagatgcgcgggcaccttatttagtgatatttgaaattttgtaacgaatgtttatatataggattgtttttaaaaaatattttttactcttctaaatctatgtttatcaatatttttttggattgttttgaaagtcggtttcaatcactggatgtacggacacgcgttaagaaggtacatgctcctggacatttgtctatatgcttatgtgactatggaggtaaggtggaccaacatggacgtcgggtcctttaagggggtttatgtgacatcctagtgcaattaggatgtggtctatgttttttttatttaaaggatatgatctgtgttgtccataagcattgtgtgcacttgtgtccataagaatgaaagtgtaagtgatgtgatagcgtaagtgagcgtgccagttggatgcatgctgagctgccttgttttgaaggacgggttgttacaaattgtaaacaaattaaatcacttaaatttataagaaaaatgtctcaacaatagagttggttcatatgaaactatcattttatactactgtgtttttttaatttaaacttttaagtaatattttttccttgtatactaaacatgtctttgtagattttaggacaataatttaagaaattttctattaaaaatatgataatatgacttctttatctaattaaagacatactcacgtacttatatttacttctactacctacatccataaatcgaaggattcaaattttatcctaaaatataagagatttttaatactactcatttcatccaaccatttttcatttaattgttatccaacattactctaaccatcttctaactctttaaataccccttatttaatgatggatatcttagttttttttttcattcctccttaattcctataaaattttagaatccattataggatggagatatatagtaataaaaaagagcttcattcatagacatatttatttgtacctttgagattgatttagctttacatatttgtataggtaaatagacttcgtatgcaagttgagaaatataattaagttggtagaaagtcgttagatatctaatggtataaagtaattagtacacaaattttattaaaacattaaggtggattttttggggggtaatttttaggatcttttggttaacaattgttgtaaggaaaacaaagaggcgttggattcgtctcgtccatgaggagggaactgtatacatgtgttgtacatacgcactctgacgaactgatcgtttggtagggtttttttaagatatagatctaacagtttataacggtttaaaataagatccatcggtttgggtaaaataattttttttccttagaatttcttatacttactttaatttattagagcgtcgtgtggtagcttagaaatgtttataggaagccatgtatacagcttaagagcatttgtaagatatctaatggacttttagtatataataatagataattcatgtcatattaattaatatatcaattaataattaattttttttataatttttttatgggttcgccactgaaaagaaatggtatatatcaaagtgatatccggataattttttcttacttcgtcactgaagggtatattcatccaagtgacataataatttctatatagaaacatatgtaccaagagattatttttatatactgtgtatttggttgttagcttaaaaaataggaaagaactcggagagacacagaagggaagagtcagagggagggggtggaatggggtacgtacatacatgtgaacgcattatgttttcttttcggaacatataatacctattgaaacgggaacgtgcagatttttttcttgaagataagatttaatggtgaaaaaatttaattgtttaaaatattgggtctaccggtctaaatgaaagtgccacgtagcgatgtaggagcttttacaggagtgccaccggacataaattaagtacaatgagatagataatcgtacatatgatgcctataatgtctatccacttaccataattatcaccgttttcactctatattagttagaaaccatagttaataaatagctaatttttatcggtttaagtcattggattatttatagtttatagttaaagaaatatgttattttgaattttattgtgactttttagtatcatttaaacaaatattaaaaaaatgaaaaaaatgatatatatttgaccggctgaaaaactacatatcaaatatcatatgtcgtattctattgtgcactaaattaattatagccaaagtaagtcatgaatgtaaaatcacaacaaaataaatgataattacgtattttcttttagtcaaacgaatgataaaagatactatcaaatataaaaaggtcaatagtgtaaagaccggaggtaatataaatatattatgagggaaataaaaaaaagagggtgaatgaggagaaaagaaatgaggagtccggtacctacggtacctgtgtacgtacgtgtgaggttcacgtacacgagagagagagaggagagggagagattaaattctgtttttaatctaattaaatctaatggtctaaaataatggacccaccaatttaaatgaaaatcgatggctcgatattcctaatctattagaacgccacgtggcgatttaggagcgtttataggaatgccacatggcggtatgagagcgtttgtagtatgtttaatggacttttagtatataatagacttgtggaactatgagagaattattggtgtggatgccaaaaacacaaaatgtcacaataaaactttggtatcaaggtgttcttcttgctactactaattgagcaaagcaaaatttcaattttattcttagccacaaaatattatggttttcttagtccacacatgctgtctgtgaagcaccaagtatggaaccagcacccgattacttcaatatcctttaccccaactttgccgcctgtatttcttattcaaagttattatttccagactacaaaaaaggcccattttgtttgttataaaccacgctcaagttaagtttagcattaatcctcagcttattttgaatggattcaaattttcctaattacatttgatatacctctagagggtatcagaatccatacgcacattaccaataaggtaaggagacattacaaattgtaaaatacagaacgaaatgtttggcatcaatagcattatttcctctctttttttttttgcctgaagaagatacacttactcattaagaaatgtatggaggccattgcttatatcaacaaaataatgtggtaacttcttagattagcatgttatttgtacacaaactggttgtgtcaaggttttctgcagccaaatgagggttgatgatgtcagattgtcagatgcagcccattatggtaccatgaaagttacaatatgggattccatggggcagcagctacatacaacttgctagctcatcaacagatggccaacaaatgagaactctctgcctgttttcatttacttcgcacgttaacttactactccctccgtttcatattataagtcgttttgacttttttctagtcaattttttttctagtttgacttagtttatataaacatatagcaacatttttaaaacaaaacaagcatactgtcaaaatatattctatattgcatttactaaaactaatttggtgttgtagatgttgcttttttttttacaaatttaatcaaacctaaagaaatttgattaggaaaaaagtcgaagcgacttataatatgaaacggagggagaattaaattgtgactactactaatttcatatttattctgtttagatgaatggaagtcaccgttggatttgtgatgcaatgcactttagtactattggtaaaagaacaacatatggtttacatagcaaaaacaagtgtcaagtatttggaaacggaggtcaagtatttggaaacggagggagtgtttggttaggttggtcatatacagaaatacaactgattgactggtggttaagcaatgaataaataactcattcaagactgcccatggttttctttctttggaaggctattctagggctactcccataatctgtactcctttgactaggattgttttatttttgaagtcacctttgcttcaataaatctccttttgtttatcttgttagccacatttttagttttgtacttctatgttagcttctggcttttatcgttcaagctacttgaaagatgttctccattctgcttgataacaatgtcctgtgctcatccatggttagcgatgctatctctggtccatgacaaataaaccttttaggtcaatgagcaaacaggtgtaaatattgatatataagcacatatcggttagaaaatctactcatcacagtaatagaattaggatagtacttgatatcgaacaacttgcttgtatgtcatgcacactgcatattggcgttcatgtatgaagaaatcaaggagtggccactcatgcatgctagtgggtatgtggaataccagatcagctcagcattaaaattctttgtgaagtcttatgcaacataaaacaaattcttgctagttgtattcaagcaaacttacaaatatcaagacctcaaggttgatttttagcagaatttagctatgtaccagaacaaattttatctatcatggtatattcatttctgaaagaagatgcaatccttgttagttcctaacctgctgtgatactgcctccagagatgatattgtcttcaaagatcctatcaataatttcacgggtattgataactacaaaaggatattctgggctctacggtttactgggcaaattttcttcaaagcactatggatcgacattatcagcatatggcagcctgtcgaggatgtaatcatgatccgctggattgtccatggcattcctagagttctctcggatggccctggcagatttgaaggcacctcagagtataagtttgacaagaatgggaagatctatgagcataaggttgataatgttgccaagaacacaccaacgaaatttaaggtcttgccagtcgtagagctcatcagatcacttggatgcccatctactccaaaaccaacatattttgagacgtcgtccctacagctaatatcgctcttgccattctggttcaaattgacttggatgagatgctacttgtcattgtaccttatcctagcaaatttatcaaaaggatgaggatcgatggttgaggtccaacccaatgcctctaaattttgcccttccattgtatggtagtgtatacctttgagcagctcgccaatacctacatgtaaacgattttgtttgtgtacagctcaaagtttctgtctaggaatgtaggcatagctgaagttattccaagatcttggctgagttttgtaagctgtatattgccccctacctgggtatgtaatcaacagacgaggcaagtaaggaaatcttacatgcttgcacgttgcctgatactgaactttttgctatcgaattgcaaaaggttttataccaaaccaattaagtgcttgggctgtgttcctgtgaatgatctgaagatattttgggtattatgatcaatgagcagtgaagttcagttacagatctaagatgtcactgtcctttttttggtctcaaggaaggggtcaaggaaagcctgcctttccatcactgtctgtcactggcggagagtatagaaagtcgtcagcggttgcattatccataactatgatcttgtctaatgtctatgtcagccaggaagactggtttgtaatttgttacttatctcttgaagctttgcatgcaaaactgggttgtacttgaaacttctgatattacaactgaaccttgcaatctttattagtagcagatatggatctgaatcatacaaactagcatcaaatcaattagcacatgatgaagctgactatgaactcaactgaacacctctttcaaaacatgtgccatactgccattccacatgtagtacctttccaattcttgtttttcataatttggaagctactaaccccgataaccctgcctccaaaatccatactgctattagtgatgtagtaccttccatttcttgtttttcctaatgttttctcatgtaataattcgtgatatttgggttaatttgagacaggcttttggttggtgtgtctatgtccataaaataaatcattaatcataagcttttctaagaagaattggcagacctgaattacaagatcagtagaacttgatcagcatgatctcttacaaccttatacttaagagtgaaaagaaacaaacaaatgaacatgatgaacatatatcatatatatggatcatagctcacagcaacacaaccaaactagacaagacaagtacgtagtaaagtatgctttgcaaagccctgtttgaaacgcgagaatttcagagagatttcaccgagaatagtttgaattccgacgcgatccaaacaaaaattcttgcgtccaaatacaggagcctagcctagttgtactcgatcagaagcaggggaatcccccgctgatgaccgccgccgacatgccggactccctgcagaggcagtccagcttccaccctggcagctcgccgccgccgccggagcccggcctcttctcgctcgacgcggcggtggacaacggcaagccaccggacgatggcgtcctgcccgcctcgcaggaggccgcagcgccgccgctcgccgacgccgggacgacggcgtcgtgggtgggctgagatgatgatctctccggcttgctgctcttgttggcctccatggatggctaatggctttcgcctccttcttcctcggttttcttggtttggttggtttgcttgcgaattgcgagatcgcgtgcttcgctagcgagcgactgtgtgcttggttggtgcgatggaggagagggtggtgctattacaagggtgtagactgtagagaggataaggatgtgcatgaataccatcaacgagatacacggtttcgccgccacgtcaataataaatggtagtaggttggagaaagaaactagtattgtactccctccctccgtttcacaatgtaagtcattctattctaatattttccatattcatattgatgctatatacattcattaacatcattacgttgtgaaacagaggaagtagtagtaacatggtgaagatcaaagttagaatatactagaaaacaagaaaaccattagcataatatataataattaattgagtttaaattattacataatttgaaaattaaattatctgatattttatataaaaagttttcgtacgaaatacaccatttaatattttaaaatgtgtgctaatgaaaaccaaggtgaaattttatatctttataaaaaggaacatggttataagtgaaaattttcttcttcacgttataattaatttctttgaaaggcgagacttgtttttaaaataaaaaaaaaactagatatcaggtggtgggagggcctatacgagattctgttttttcctctagtgccttcgctttttttccatatgcacatatttcaccgttactattttcgttgaagctcaattcatctcatctaagttcaaagttgcatcctatgaaaactatccaaatttgaatatcacattcaaaatgttacatttcctacgtaaagctgtgggtggggtacaaagttttatggtttctaaatgaaaattttccactctatagttttttttttgagaactccactctatagtttgatatgtattctctaatcaaaatggttctcgtatttactagaaattttcaatcagttttctacttttcttttttattttacaaacctctctcaagtagttatcaagtgagtttagcaaagaaaccgtcagtactgagatacaaactattctattcgtcttaaaataatatagctaccatatagttatattatggagtatatattagctaccagatagttatatatattttagaatggagtaagtacgatacacgatgtatatagagtacacgtggtcttctacgatggtctgactcaaaccattggcgccgagggagagctcgtgcgtgcttgcgaattggacttggccgcccatcgctgtagtgtgggaggagaagctaattcttataaaaaaaaatcacacctatttagtatcaattagagtgacgttgaatgctgcaagaaatgcactccagttgaatggggtaaggtgatgatgtgctgctgatgtgcagatggcttgtctttgtatcgacagaagggtctggacatagaggatcaagtcaattatgtcagctcttactagattaataaagagacgatgttgatatatacttggcagatggactgtactcagtgtgacaatctgctcatgttgtgtgcagtctgaagggagaagcagatagagaatagcagccacaaaagatattggtttacagttagtaaaataattttcgacctcctaacgaggggaaaaccatttgcttgcctaagaggaaccaatcctttgtatcaaagctcttcatgaggattcagtactgtttacagatagtgccccaaatacaaatgctgctaacttgtcgactgaatgaatgacacaatttattgtcaaaacaaccaagacaacacaagggggagagtcatttgtacttttaccccatgcaggtggtgcacataaaaactttaggaacacaagttacacagcactgctcttgcagttaaagaaatattaaaattcaaattaacatctagttactttttgttgacatatacgccgcaaaagtatagccaggacagtttgcccaggtaccctctttctgctatagcctacaaattctatagaagcatctaaaaaacgtgtaaaaagaataaatcagatcatggtcctcaagatgttcaataaaacactagtcatcaacattgtatttcagaccttctggtcaagctcagactgtgatgacagtatattgtgtttctgtgttttctcgctgggtgctgagtaaacctggcgctctttgcctcctggtttcgatgaagcattcccataccaaatcatgccaataacagcaaggatcatgccaatcgcaacatggaagttaaggccctcttttccaaagaaaagaaagcccaaggtcaacacaagaaccgtcttcatgtggcctagaacttggaacgagactgctgtaaatcttccgatgcatatgaattggctaaggttggtcccaacagcaattatgcacgacagtatgatgaagaactacaatgcaggtagatgaaaaaaagaaaatgttaggccctgccacgataaaaatagtaatggtcatggcaacaacagattataaaaaatatatcctccaaatctgtcacatgctcctttctattttattcatagttgaaagaaatgcttgtctaagaagcatctatagtatgcacatacaatatttttaatggcctaaccttataaagcaataaagcattaccagtaaggcgttttttagttcatacacttctctactattagacacagcttccgtatttcaatgacacatctttttagtcagaggaatttacatggttgtttcataaatttataattggttgatgtgtgatattgggtatgtaaaagctatccatgtgcaattctgtgtttatgcatgattacaccttttgaatatgacatatttacaagaattttgacacaataagcatgcacaaaggagatagaaagagacattgccagtacagaacaatgcaacaagtacttcagaaaacacatttcttaaaagaacatgttaaaggtagcggtaaccttataccaaacattatttatcatagtcctcattgctttcaagcctacttgaaattcttgaaccaaaccaagggcctcatcgtttgccctatggcttataagccaaagccaaaatttgaattttaaaacttgattttgaatttgactttgattcttttttaacgtagtttttttttcaactttggcttttcaatcactaagaacatatatacaaaagttttactcacatatcattttttaatcgctaataagccgttatggcttataataaggccctattcttttcttgttgtcttttctccaacaagagttggatgaagattaagattttcgtggcacgcttttcaaactgctaaacggtgtgtttcgtgcgaaaactttttatatgaaagttgctctaaaatatcatattaatatatttttcaagtttataataattaaaactcaatcaatcatacgttaatgacacctcgttttgcgtaaaaaacttaatcttcatcttcatcttcatttttaggacaaaagaacaccacctaagactagaccgaccgatgggaacccaagcagaaaaatgtttcaagttccaggatatactaccatatttcatggtaattaatatttacctggtgaaattatcagtagagctatatgggtttctaatgatcagtttataacaagataaacagagaatcaccgcataccgtaactattgctgtgtaattgaaagtatcaactcttttgttggtcagccagaagtccacgaaaggccccagtactagtaaagatgctgcctgagctggagcagtatgacccaagaggttgaatgagccaagcgagtacttcctttgaaggtgatgaacatactgcagcacagaagcaaagaaacaaaacaagtaatagtgttaagaaaatttgccatgaaagtgcgtagaaaagggacaagacttctattagcagacaaacgagcaatatccaaatatttgaagatcttttactaactaaacatttcttttctacacgattaatcagaacagtagttagatggaagctaatacattctttagctcaccaaacctacaacaaaggggacaaaattcaggtttataggatgaggcaaaatacacatgagttcacattaatggcttggaaattctgtagaagggaacaccacatactattttttttcaggtttgaatattaccaacttgggagcaaaagtatcaaagtagagacttagttaatacaggagaattctcagtatgtaggaatggggacaacaaaggcacaatctaggagtggcaatactcacatgctgttgtagtgcagtgctccaaaccgctattatggcagctatgagcccttgtgaattcacactaacatcagtcacagtacacacggcaacacctactagaacaaccattatactgaactttgtatctcttgagtatcggactttatcaaacaggatttccagaaagcacaaaactggaatgatgcataacttggcaatctgaaaaaggcatgaggagcaaattagtatatgcatccaattctaaaagtgaacattaaaggacttagttactttcttcacctggtagaatccaacagagttccacatcaaactaacattcatcccaacaattgataggtttgcaaaaaagacaaattttattagttctggcactggtaagtaggacggttgaatatatcccagccatttcattactaatgtcatcaaagtcgtggttgcaaaatgcagtccagtcaatgttgtagctgtacaagcaatagcacccccatattagtacaagcatgtgttcagtagctgagtttgttacagattcatctttccaagtgatcacacatatgagtaaataataaagcattatcaatttatcgtaccaaaactaaaaccatgtgtagccattaaggccttgttgaccatgatgataccaacagatgtcacaatgttgaacatccaagctccagcatctaatgctgcttttctctctgccttgcttccaggtgccatgttctcttgtcatgtagaatctaatccaatttggattttggagtatcacaatctacattagaaacatattttaattaagacatgagtttaataatataagcatatataaatgcacatagaaaaaacaagtgaaatcaatacgagtcactagtcactaaccctaaaatatattgagaaaactatttttctaccatagcagggacatgaaattagggaaatattgccacaaaagaagatctttatcaactatcatcctataaagatcagatcaaaattatgaaaataacaccaccgtttagttcatgtgttctctgtggctctgttagtgctgagaaatttacattacaagttcactgttttcagtaatgaatgggcgagggagagagagagagagagagattcagatttggagaagaggaaagagagaggtggctatcaggtgggaccaaccatcaagtgaatgtaacaactaacagaatgatattttgttaatctaacgccttttgcaacgtcacattccaacttgtggattttgcaattgtgttactataatttcatgttctgcggttcttaatttctcaaatactgtaatagtactgtttgattttttctggatctgaaatttcggaccttctgaaattcaaaggcatgcaataactaatgaatttgagcacaggtaaaagattcacattaatgctctttttttgttctgttgcaatctaagcattaatgctcataatggagaacctcaaaacaagagaatgctcaacaaaaacagtataatgcctttcctgaataccctgtaatttgtttggcataacaaatggtcatgcaatagacaaataatctaccagagtcatagacctatcttaaggcaagaagtgtggaatcatatttgcactaactaggtttcaggataattatgtggaatactctacatttcagtaatttttattgagcatcctctcattatgttcttccctattttcaacattaaactgtagactgttaatagaagggcatatagcacagtaattatactagaagtgctggactaacatgatacacggaagcctgcgtctgtcaagaacaggccaaatatcttgtgggggaagagggaacattagtaggaacagagaaaacaaccctcaagctgaggagggctcatccctgcatgttgtcgggcggctctgatcggccgatcagctaatgctagagtgtggctgaaaagccctttgtgatacttctcattaattaatttatctcctataaacactagcaacctttataacaaaacaaaaacaacaaggtgccgactcatgaactaggagatatacgataattagtaaaacggagatagctaattagcaatgcaatcaaattaaactggtaaattgagaagagataagaaacaaaacaaatctttcatctggctgtagacctacgcctctgagacttgcacccaaaccgacagtgcacattccataaacaagcacatcattatactcctcttgaaaggaggagctgtggttgatctacactacacccatcccctcacttgagaagaaatttcgtgtctagatctatgcaggtgcggatctaacgtgggagggctcaaatttccgtggaaacaaactgccagtaacacacatcaacactgcggccacacaggcaacaagaagccgcaaatcgggacgaactggaagaattaattacttaaaaattggagcgcaatgaatcgattcgatccaaccaccccgaatgtatttcccaatctacctacagacgccagcacacagcacgtgaaggcgcgcgcaaaggatgagggagggaggatacgagatgagaatggatacctccgactccaaattcggctcgagcgagcgagcgcgaggccggagaaggctagggaaggcgaggaggaggaggagccgcgactcctccgaacctgctcgccggccgcgcggcggcgcgggggagaaggctcgccgtagctccgccggaaggagggagagagagagagagagagagagagagagagtagaggtgaagtttgagggtctctgcagcgttggattggatcgatagatagaagggatcgaattgggtttcctgttttgctagtgtgacagcaattgcaggatcaagaacacaaggccaagattgctcatggtgacgagagtgaaatggaatgggtcatgtatatgtttttttttaagggaatgtctatatttgttcgcagaaaatctcaccaaccatgtttcaaattttgaaccgttggatatgctttaagattcgtgcggagcccttaaccctaactatctccctctaattccactctctctcgcgcattccgccgccaccgctcccatcacgcatttcgccaccactgcctgatcctcggccgccaccgccccaccacccgtctcgtcggctgcccggagggcatcaacagcgccagcgagaccccctccccccccgccggcctccttcctcctcgagccatcggtggcgagatgcccctgccatcaaagccggtccaccacccttctccatccccgtggctctggcactgccaccgactgccaccgacgcctcatcgtccgcccgattcgttgcctcacatgggcatccctctaaagccggtgaacccccctcttccccatccccctcccacccctatcccactcccgagatcctaacctgtagggtcctctgtcgtgctttcaccggcgttggagaaaaagagggtgccggagttggaggagaaggtctagagcacgaatcatgaagctcatccagtggctaaaaatctgcaagatttgggcatgcattttctcccgactgaaggttagcaattcccttttttattaatttatttttgccggtaacgtgaatgtggaaagagaatttggtgttccttattacctcccaaaataagggcacatctattatttatttaaaatttatcctataaataaaaaattagaataaatgcacctatattatttatataaaaattaaatagtggtaaggtagagcttatcttattatagcgctgcctaggaaaagcttgggcctgtttgtgttagctgcactttctttcagaatcagaagttcctttaaaaggtatagctgaaaatgaactagaaagaaagccataagtgaaagatttttagaagctggctaccagctaactgcttcttagaatcttaaactctactaaacatgcccttatatgtatagtggctttgaagtttatatattaaattatggtgtttaaaaattttattaatatttttatacaataattaaaaataatttattcaaatattatcaacgtaattatacatcgagtttgaaatatcaaagcttcgagaaatctagagctgcgttaaacaggacctaaatataatccacatagctaatgggaagcaaaccttaggagcacagtggtcattacacaagagttactagtctattcatgttattgctattgctataagaaatgcatttatttattttgtgaccgagccaatagaccatgggtgtgtataaatattgagcgtagggatgagattacaaagtgcatagttgggttaatattgagcaatacggggaaaatcatataacgaatgaaactcaatgctaaaaaatatgtgaaaaaactcaacacatttttctattcttgtgcctatttagttaaattttcgtatattgggaaaataattataccttcgcatgtagtggcaaaggcagcgtgggggcttggggggtctttatacccctacccctaatgattcattagagcccccattaaaacctccctaaaatttaaatctatatatctattaaaggggaggagattgttagaaggcccaaaaggctgagaagccccactataattttttcctgctccgccactgttcgcatggtgcttgtctgctgcatgccttcacaaaacaaattacggagtagagaaaatggacagtatggacatagcaacgagataaaatggacagtatggccatacatcctctatttttgtttaatgataacccaaaaaccagctctatataaacacccaccgttactggtcatgcttccccatgcttccattgcccacacacccagcctgccaatccaacccctgaagatcaaaaaaaaaaaaaagggaagacggcactttccaaatcttacaaattttggtacattggattgctacaagattagtacagactcccctaatcctgagttcctaccccccc

SEQ ID NO: 9721 - DNA, 133037 bp, Oryza sativa
ccccccccccctcacctcaccattgccgagtcaccacactcccctccttcctcctaccatgaccacgttgctgttgtgatggatgaggtggcacatgcaacatctggatctggtggcgttgctccagatctgatgacccccatataggatctgatggaccctttaactgtaactagttccccaatagggaaggggtgaagatctctcgggatgatgtcacccgtgctttgcatggtggttcctgattcaagctgatgataaactggagctaacaaagatacataccaacttgcactattttgttccctccttttcagccttatctttatctttataaaactgaatatgctactgaaataggcattctaactaacgaggaatgactaactaatcctatctcaatacctgcacgcacacacatctaatttacataagagtatttcatatactacactaatgacagtgtctatacttgccacattaaatgggtgctctagatagaagcaagtattattgtcatctttaataaccaacatagatattgtcaatggaagattatccttcatcaggtctgaagaaacatcttcaagaactcaacttttggaagttgactaacaggatgagccacaacatcttcccagtacacacctgcaattgtatcatcctgatcaaatacagaacaaattgcttcaccatgtctaccactgatgccgtcacttggaaatcagattgggttgatatcaccctaagcccatcttacagaatctttcctctgagtaaccaatatgccttcaaatttgccctctgtcatacccaagcattgcttgaaaatcatctatctaaatagcataccagctctttgcatcacagtgattgaactaattgaccttttcatctatatatgccctgctgctaccataagaaacaaaagaaccaccatggtatatctcatcagtgaatttgccatcagtatgagctgcattgcacgttacggcatcctaattagcaatgttgaaccctagataatgaactacatacttaaatcgacaaataactcaaccaaacagaccatattgaaagaataaaaatttcatcaaccaaatttacctacgtatgaatctaactacaataggcacaagatacatggagatttcaatgtctcttccaaaggcggttccccttcaacccagaacaacgtcctccacatgactaccattgggcgaaggccaagccagagaatccactccctttccatgagcacggaaaccctatctcatcagtgatcacctccttcacactctccgacggtcacctctactaaggcaaagaagacgaagtggtggcagaattgaaaatagagagaaatagaggggactagagaaaaaaaggcagggcacaggcagcgccacacatgtcgcaagagagcgcgttggctaccgggcttcgaggcttcatcgagccagcaatcgatgggccacggcatcgaggaagtcgaagcgacgggtagtatgcacaaagttgagggtggcagagctcaacatggttggtgtgtgcaatcacacaaggaagaattgaacaccatgcaatagccgatggatgggtcgacctaggaaatatgggaatagaattagaattatactaggtgattccccgtgttttgctgcgggaattactaactaatatttattgtctttttgtaatattagttattaactacaaataaaattggtttatccaaccatgtttggagagaaataaatttagtacactcggtaagagattgtagatgaaatattagttggtcaagatttgcattgtaggaagcgggaggtaggaaaaattgataaaaagtttttgtttattagtataaatcacaaaagaaactaaattatatcccgcactttgaaaatatatggacaaatatatgtgaagtattacaaaataatggatagatatgtttaagaactgtagaaatgatgagaggtatagatatatttgatgctgatggtcctttcatgtgatgggccgtatattttcagggccctatagtgagatttatcccccaccccggtcctatgtgacgtctgggccatgactcgatggcaccgtagggcaagctggccagcatcagggtttatcggaggctgcaagctggcgcgtgcgcgccagcagcgagtactcctcccctcacttagtcttaactaactatattagttaatatatttaacactaatgatagtaattaggaaagattttaaagatttttttgagatatttttactaacagattgaaaatttttgaagttagatttgaaaactttcgatttaagtttcaaattttaaagtcaaattttaaaaactttcaactcagatttgaaaacttttaacttgagatttgaaaactttcaactcagattcgaaaactttcaactcgagaatcgagattcgaaaactttcaagtccaaatttgaaaaatttgaaaactttcaactcgagatttgaaaactttcaactcgagattcgaaaacttccagatttaaaattttgaaaattttcaaatcgagatttgaaaactttcaactcgagatttgaaaactttcaagttcagatttaaaaattttcaactcaaaaattaaaaactttcaaactcaaaacatgctaaacataaaaacaaacaagaaaaaagtggaaaaagaaaaagaaaaaaagttaaaacaaaaggaaaaaaaaacctaagcgctccgcgtgcgtgcctgcaacgcgtacgcgctatttagctttctcgcggtttatcaatggtagacgtaaaatctaaagatatttcttgtctgcggttttgatctggtatcgagattgtcaaccctgcctagaggtttcctactttcctggtccatatggggaatttgccacccaatacaatgtctgttcttcgccatgaataaaaagttatcattacatgttaaaaagtccattaaaaatacataatacatagtatatatacttttgtttaatgaccgtactaaacaaaatcttctatggaacttaacagttaacaatgattatggggatccgtacccctgccaagtgccaacagaaaggaaaacattgggtattctcttgcaagcagaaactacgatccccatcctacctgtgtatgtgcaagaaagtacaacttatgcaaatatctgagatatgtatacttcaaagatacttgacaaaatggtacatgcatgcattcatgcatatcgtgttcaacatatctactgataatgtggcgctgaaaaaaaaaaactattactgcgggactcgacagtttatttgtttatctgatgaatgcacaaactgaactaatggacagacggaaataaacgagtactatgtttgagcattaaatttgttgtcgaaagacaactgcatacgtcgaaaaacgtggttactcaacagtggttgaaaggaaacgaagtgtattgaattttgaattgttttctttcttttttcccctccccccattacatggccctaggggactatttatagccccattacaggttcttactattagggtttaggttgtacaggggaatttacatgattacccttacgaaaaggacatttacaggggtacataatattataggggctcatgggcccctgatgggccgtctggcgatcgccggccctatagcccctaggcttgttgggccggaaaggcttcctcggccctcgcgggggcgaacttgccatagtgaagtcgtcttccttcggcagatagtcttcgccttgcacccttccctgagacgcctctggcctggcaaggcactcgtacgactcttcgcctcacgccgttcttgctccatagccttcgccacgggtttcggcagatttggtcgaagggcctcatgccatccgccaacaagcccctcacggacaagggtgagattggagcttcggccgagaccgtgcaaaccatgtggtatggtatgcggtgccccctttcgaccgatgctcctgccgaaacctacattatttctgcgaatgaagtttgttacttgtgcggctggtattattttgccgcgcttcgcctcctgcgattggtggttatatattttcttttcccgggccgaacggaacagtattgggctttcccttcgtgggctttttactgtgccgctcggacggtgggaatttaccgtttcgcctacccttgcgacacgtggcgctttattactggtgggtaggcgaacggtcgcccgggtgagctatatattcccaccgctctttccttttcaccgccacacttgccattttaccgcgtgcgctctcttcctccgtttctttcttccacagcatctcttgacccctcaagcgtttcgcccgttctctttcttcgccatcgcaaacgcaccgttcgccatgacccctcgcaagccaaaccctgcttcggcaaaagagccagatcccggccgagtcaatgacgacagcaccacctttttgggggtttctcttatggacgacgtcgagctggcgaagctggtcagctctggggcgttggttgaggggtaggctttcgccccagggaaagccgtggtgccgaaaccaatcgacaatcggacggtggtgttcgccgtcttttttgatgcagggctacggtttccctgcaacgtgttgttgccggagatccttcgcctcttcaaggtggagcttccacagctgagcccgtcggcgcttgttcggatcgctattttcgactgggcatgccggacttccgggtttgagcctaacgccgagcttttcggcgccatattcttcgccaccgtgaactcgaagacggtgattaccccaactgggacaaagaagaccgagttcaggagtgtgaacttcaacgttcatcctgagcggtccgatctctggccggtgaacgctgccatgtcgaagtgggaccgccattggatggctaggtggttctatcactccatccccttcgaggctggttctgactcggcgaaagccctccggtgccggcgcagggcgatcgcgccgaaccggaaacccaagatcaccgtggacggcgctatggaggcgcggttcgttctgctgcgcaaagtttgctcccgccttagctgccgtgacttggtagaggaattctgtatgcttcgcatctttcccctctcccaggcatggcaagtcacggttgatcaaggcgaagaggttgacggtttgccgaacctgattcttcctgaggggacgaacagtaagactgttcttttgctatatactgctgtgctttgttattttgctttgtctgacttttaacatggctacacacttttacttttgcagtgttgaccctcgaccaggctgaaaccgaagcccgcaggatgatcggcgacgtatcggtcgtcgagtatagccaactgctaacacgacaagtagggatgaaaacggagcggatagtttccgtccgctccggataaaaacggatacggatacctttcggatcggataattctcggatagttcggatatggatacgaatacagatattttctaccggatacgaatacgaatatggtaccagggtttccgtcggatatggataataattcggatatccggtgaatagtgttattcggatatccgcaggacccatgagacataccccatttatttctaactctataaccttcaatatacctttatagattttaatagtagtttatctcttaacactagtccatactattaatattatttaaattttaaaaaatatttataaattatacctcattttatataaaatgagctaattatatatgttgatatttgtttctattagaagttgagttggttttcgtgttccgagaaaaaattgtttccgtattcgtgtccgatcatattcgattcttattcgtattcgagataatccgtatttatttccgtattcgagctatcagtattcgttttcgtatccggtaaaaaaatatgaaaacgaatatggtatgagcattatccgtccgtatccgctctgttgtcatccctaacgacaagcgtctgggcgggcgaaccgggtttataacagcgagttgcctcctcgggcaaacccccacaaagcggacgacgatgcagggccttcgcgaaagcgaatgcgcgggcaagtgaagcttgcccctaggaagcgaagggtccctgcttcgtcggactccgacgccgacaacgaggacgatgccgaagaacgcgacggcgagaatgaaggagaggaggaggccgtggccgataaggccgcgaaagaggcgatcgaagatcgcgtcgatacccccggctacactcctaccccaagtccaggtcacaacgagaccggggtggagtcgaacagctccctccttcgacgaaaggatttggaaggggcgaaggctctagttgcgttctcctcgggcacggtggcgaagggaggtccggtgaagaagatctccaaaaagaaaggactcgtcaacatcgcccgcattttcagcgacgacgagtcttctgacgagactccgacttcgcctgctggccgtagtttggacctttcgactgctccccttgctccgctcggcgttgctggggcaggcagtagcaccgccgccggggcttccgcctccgccgaacggatcgtgtcggctacggcgagggttttcgggagccctgtgcatgagccagctatttcgccactggtcaaggcgaaggggaagtgtgcggccgccgaagcatctgcctcggagtattcccttgcagcgccccactttgcccctggtgacttcgagactcgggcagaccttattccctttgtggagggtgtgagcaaccttgtcttgcccgccggcaccccgagcctgttcaccgaacttaacaagttcgacgaggggtgttccaccattaaaagtttggcggttcgggtatgccttttcttccttcttcgttttcctcctcttccctcttttttttacgtctcacaattagccttttgttcttttcgcccgctcctatctttcatctagattcttgcggctcactgttcgacggagcgaaccgtgcgggcccgttttgacggttttaagagccgtcttcgggccaaggatgatgaaataagccgcaagaacttggaggtggaggccctggcccacaccctcaaggaggcgaaaactgaagtcaaacgccttcagtccgaattggataaggggaaagaggccagggccgaggttgatcgcctcaaggccgaactggagaaggagaaggcccattcggcggtgctcatcgattactacaaccttactgagccgaagatggaggctctttgccagaaggctagcagggccgaagcgagcgccgcggaggagtcgcagcggttttcgcgagagatggcgaagaccaccgaatctgcgagaatggcttgccaaacgctccgcctcgcccttaccgacatggacgcgaaggtgcggggggtccctgccgaggatgcctcagccttcgacttctccgagtggacccagcaggctggcggatcggtttcggactgcgccaccgcgtacggcgattgctgtgcgcgtgtatcggcggccttcaccttaggccttttgcagcagttcggctgtgagcacgttgccgagttccctacctatgcgaagggggactgggagattagtgcgcagaacattttgaccgctcttcgcgcgtggcgaaaacagttttggcagaaagacggccggtccgctgccaaggcgcaccttctggagcaactggcgaaggcggaggcggtagatcggtgcgaagaagagggcgcggtgggcaaagaggttggaggcgatgcccaggatcacccagaggtgtgaggccctccaccctttctttagagttttgtagtttttctccctcttttgcgtttgcctagagaggcgaatgatgtatattcagcaagttgccaccaaaccttaaaaaaggcttttttgtatatttggaatgtatgacacaatgttaaattcttttttgatgatcgaagtctttagcatattattatttcgctcatttcgcattatgccatacctcccccttctttcgcctattcttactatataagctgtgttttgctttttctgcgctgtctatcagggggttcgccaaaagttgtgcattcggcccccttccgggagctggcgaagtcaaaacgagaaatttgtggcattgaaggacctgccgaaggtgcgatgtccatttcgccctgtttatcgcaaaatggagataaacggtcagagctataaggttatcaaagttgccaactggctacgagcgcaccccgggcgaaccttagaagattacgatcttgttcattcaagacgtttggaggatatggctcgcttttggcgaaaccatcagaagactaaacgtcaggaaacgatctttcagcgtcgttacagtttagtctgtgtttcgccccctactcctcttaaggttgtgtatgatattagtagtgatgacgaacctagttcgtctgaccattccttagagagggataatgattacgggggcgaagatgtaatttacttgtagagtgaattgtatcgtgttgtgaaccttctattcttcgattatttttttgaagttaataaagaacgtgctttatttccttttcgttatttttcgcatcatcacattttgtgcttttgttaggtcggaacatgccggcccctttgcgtatattagcgaaataggtgtactgtcttttcagtttttcgtcgttcgttttcgatctgtagcattctgtgtcgaaagagacgcttttgcttttatgttgatcgaatcgtaacgtcattcggctagttatttttcgagacaagctgttgcggtttcaacgttcggcgagcgatgcttcggccgattcgtttctcccccctggcttttttcgctgatcaggcgtttgccttggggtttttccacaaattatcaatcacgcgaaaaaaaataaaaagaaggcgtaggacacagagattttatactggttcgggcctccatggtggataatagccctacatccagtttttttttcctttttttctctcttattttttttctttgccgaaaggcttacatagtgccgaagggcttacatgactgtatgtacatttttacaagttggcgatttgggtgccacccattctaggcatagaagcgcttgagagaggcggcgttccaggaatagtcgaactcctcgccttcgagtgtcgctaggcgaaaagatcccgtcctagacttgtgtttgatgaggtacggtccttcccactttgattcaagcttaccaaccgctactgggttcaccttcttccttaggacaagataaccaggcatcagctccgtgggtcgaacttttttgttgtaagttgccgaagtgcttgtggcgtacttgtgcatgtgctcgagcacttcgacccttaccccttccaagagttcgagcgatacttcgcgcccctcttcgcccccagagaatataacgcttggtgagttagcccctagctctgctggggtcattgcctcatcgccataaagaagcataaacgggctaaacttggttgatcttgtgggggtcgtccgaagggcccagagaaccgatagcaattcctctggccatttgcctttcgctgccccctcgagttttttctttagtgcttctaggatcttgccatttgtacgtttggccgccccatttgactgcgggtgcgcgaccgacgcgaacctgatttccaggttaagcccttcgcacatttctctgaacttatcagagtcaaattgcttgtcgttgttagtaatgaactcttttggcactccaaaacggcaaacaatgtttttccatacaaacttctgtactgctgccgaagtgattgctccaaggggttcggcttcaatccatcgagagaaatattccacagctacaattgtgaatttatacccgtttcgcgccaccgggaacggcccgatgatgtccagtccccatctggcgaagggccatattggcgcaatgggctgcagatcatactggggcgcggtttggcttcggccatgacgctggcaactttcgcacttcttgatttgctcaacacagactttcaacacagtgggccaataaactccttgtctaaatactttggaggccactgttcttgcagcctggtgcgcgccacatagtccctggtgtatttcctttgccatttcttcgccttcggcaaaagagatgcaacaaagtaagggttgaagtaccccggagcggtaaagctgacccgagaccatcttatacttcgtggctctaagttgcaaacgctttgcttttgcttcgtctaccggaagccagccagtttcaaggtgtttcacaaatggggttcgccagtcatatgggtcttcgcccagtttctcctggtcgattgccatgacttccgagctgtccatggacacacttggagcatgtaggacttcgaaaaagatgccaggcgaatgtgggccaccacaagcagcggatttcgccagggcgtctgcttcctcgttctggcttctaggtaagtgttcgaccgttatgccagtgaagtatttttccatgaaccgaacagcctccagatacctcttcattccttcttcttttgcttcgaaggagttgtcaacatgacctgctaccaacttggagtcgattcgaattagcaagcgccggactcctagtgctttcgcctttcttaggcccaggaaaacggcttcgtattctgctgcgttgttggttgtgtcgaactgcagtcttgctgcgtaccgaatcggcacatcattcggcgaaaagaggactgccgcaatacctgcccccctgtgcgaccacgagccatcagagcacatcacccagaattgttcggcgggctcggggtcgagggcaagtaccggtgtccattcagctacgaagtcagctagcacttgagacttgatagcagagcgtgcaacaaaatgcaagtcgaacggggatagctctgccgcccacttgctgagccggcccgtgacttccttgcctcggagtatttcgcccaaggggtactgtgatggcactatgactttgtgggcctggaagtagtgcttaagctggcacgaggccatcactagggcgtaagcgagcttttccatttcgatgtatcttgtcttcgctccttgcagtgcttcggagacgaagtagaccggtttctgtccgaactctgtttcttggacgagtgcagcactgactgccaccggcgaagctgctaagtataatagcagttcgcttcctgggggtgggcttatcagggctggcgggctttgcaagtattgctttagctcgtcgaatgttgcctggcactctggggtccaatcaaactttcccgcgcccaggagggtcttgaagaagggcaaacctctttcggctgcctttgagaggaatcgactgagtgccgcaattcggcctgcaagcttttgtacttcatgtacgcttgacggaggcttcatttgctggatggcatcgattttctcgggattcgcctcgatgcctctttcggaaacaaggaaacccaacaacttgcctgcgcaagctgtcgaatgtctcctgcagatcaatcgcatggtcgaaagccttgcggctttttacgacgatgtcgtcgacataagcttccacattccgccccaactgctcaccaaggactttgtacaccagtctggcgaaggttgctcctgcattccttaagccgaaaggcatcctgaggtgacaaaatgtgccaaacggagtgatgaaggatgctttggggatgtcaagcgggttcatgtggatctggtggtagtcggaatatgcgtccaggaaactcatgagctcgcatccagctgttgaatccacgagctggtcgatccgtggcaaggggaagtcgtctttcggatacgctttgtttaggtctgagaaatcgacacacatgcgccatttgccatttgacttccgcaccaacactggattcaccaaccactccggatggtcaatctcttggattacccctgccctgagcaatttttgtacctcggctttcgccgcttcttggcggtcggcagacatcttgcgcaacttctgttttcttggcttaatgtccagcttgaccgccaggtgatgcatgatgagatctgccggaacaccccccacctcgtcagggctccaggcgaatgtgtcgatgttcttcttgagcacctctaggatactctcaacttcttcttcgcccatgtcgccccccagtgatacaagctttgtggggtcggcatcatcaatctgcactttcgttatcttgccgtgaggggtgggctttggcatgttcttcggctgttcatgcggttcggtctcaacgctgtgcactgctctgttgattatggctagatcgcttttcgaagcggccgaagactgaagccccttgactactatcacccctgccaggccgggcatcttgagcttgaggtaattgtggtgggaaatggcttcaaacttgttcagggttgcacggccgaagatggcgttgtagttgtacgggatgtcgacgacgtcgaacagtatttgctcttcacgtctgttctcccccgagccaaaggctatcagcaagagtgcttggccgagtacttgaactgcttctccgccgaaaccgcggagtgatgctggtgctggggtaagtgcttgggtaggcaaccccatcttggcatatgcttcggcaaagataacttcggccgaactccctccgtcgaccagtattcgtcggacctcgaaactagattacgaaaggatcttgatgcgggaacataactccttctgcgtcttccggcccaaaagaaattagctggtttagatattgcggcgccccttcgcccgccgaagtgatgctgtggaccatacggatctgcatcttcttctgccgcttggacaactggcttggcgggtcggcccttgtaatcacttggattatccttcgctgtgcatcttggcgttgtttggctgggggtgtttgctcctgaactgcttcgcggggtgcttcgacagttgttccctgctgcagccttgggtcttacgcgttgccacattgcctaatgtttcggcattgctccgtggtgtgcgaagagcgtccgtgaaaggcgcagtagaggtcttttcggaccttcttgcgggctggctgctgatggttgcttgcttgctgggcgtctcatgatatatgcctgcatatacatttgcgtataaaaagacacaatgaggttcagttacaataaaaggctgaccaagattatctatccaccctgacaattttgttttggctagtttcagagcctaaatatttcgttgttattatggagtagtttcatatgataaggagcaattctgctgagatatatgtttggagaaaattcatacttagttgcttacctgacttgatgcctgtaagaaagcaagccgaggagccaatggagtttcaaagaatcagatcggaggcggtgaaactggcgagaagggcgacgagcggcggagtggcgcgcgacggcggactggcagcgttagggtttggagagtgatggaggcggcgtgaggagcgagaggtggagggggcggggcgtgggttggaggcgcagtggagcgagaggtgggggaccgatggcccgcgatgcggtgccgggggaggggagcggaggaatttcgcgatcggaacaggaaggaaagtgcgcgtgattcgggggcgctgctgggtgagggaaggcgatgggtacgcgggagacgttagattgagatgagataatctggactgttgagtgacaaatgaaagaatgagtgataagtgatgagtgaaaccatttgttgaactatagggtagatagataactctataatatttatgtattctaaaccaaaaatataaatattcacaggatatttttagttggtggcgcacccattttataatatatggttgaaaataagactatttgtcctccctgaacttcatgttgtgccatgccaaggcggcagcccaaacatgacccaactattgggtcgggccaacacgggcccgacaccattcgggccgtgctatgcctaggccgtaccaaagcggcgtgccatgggctaggccgcgggccataaggccatctaaagttcaggaatgtgctgctgattttttttattagagcatgtgttaatgggattgtgagtatgatgttgcgggtagtgatatgtgtttgtgtgtctctgccacgtttcgaaaaaacaactgatatactccagtatacaaagattgcatttcaaggtagttctcatcttaaacaagatccgatgcgtccatccatgatcacaaggctgggaacattcctccctcgtaacacctacactacacgtatgagctgaacccaccgctcagtcaggaccagggtttcccaaactgctggggccggggttaccgcgtcccggcggtaagcacggttaccgcacggtaaccgtggtaaccgtgataaaccgtgcaaaatttatcaaaaattcaaattattttttaaatttatttgaatttaaaaaggttaccgaagtatttatattaccatacccccgcgataaaccggttaccggcggtaagtccaaccctggtcagactcaggagagactcccgcgggaaagccgaggagtttcccgccctgtagcgcccgccgcttcactccctcccaatcccccctcctaaacccagctaggtttccgcctctctcaccatctccatctccatggccccgaagcgccgccgtgcccgtccggcggacgagagctcgacgccgccgccgccgcctcctcccttgcggacggcgccttcgcatttgcagccggtggttgttttcgcccacggcgccggcgccccctcttcatccgactggatggtccagtgagctctcactctctttatctctctgtcctgtcttctctcccccctttgcgtgtgcgcgtatggataatcggaattgtggcgactattttgttggtagaggtagcgtcttttttttttttttggtatgtgcgtgatgatgtgcgaaattgagggagtgatttctcatctctgttagttggaaggatatggtgaaggatgcgctcgatgctatcgaagttgtcacctttgattacccatgtgagtttgtctgatgagctctaagtgctgatttgttgacccctcactgttcgctaaactcgttgatgaaaatctgttggggggagaatttcatggtagagcaacaatttgttggctgcagatatgtcaggtgggaagcgcagggctccgccgaaggcggagaagcttgttgatcatcaccttggtgtggtgaaggacgctgtagcgaagcatccagggcacccacttgttctgatggggaagtctatgggttcaaggtgatatgtgggagctttaatctcgtttattactttatttcagacttgtttgtgtttttgacatctgtctcaagattgtagtcctcatacatttttcagggtcagctgtatggtggctgattcagatgatattattgtttctgctgtcatatgcttgggttatccgttaaaggtatcctctgtgttgtgtggggtaatatgattgctacaatgtatgaggatgtaacccacatcaaaaaatgatttagccttcggtttccattatataataatttgtaggacctgaaccagtttttcaggaaaagggttgctgtgattttaaaacatgctccacttggttattttcactctctgttatggctctacttagggatgttttgttttgcatccttgctttcttcctcttagggagtgaacggggcagtgagggatgagacactactgaaactgaagattccaacaatgtttgtgcaggtatttctttctgaacacactttgaaatgaaaaataatattcaatattttttaagcttggtatgcaatgcatttttgttcacagggcaataaagatgggttatgccctttggataagcttgaggccactcgcaagaagatgaactgcaagaatgaactgcatgttattgatggtggtgaccactcctttaaaatcggcaaaaagtatcaagagtctactggagtgaatcaacaagctgcagaaatggaagctgttaaagctattgcaaaatttgtgcagaactccatagcaggaacctgaacttagctgtttatgtactatttagggtgttgcaagaattagtatgttcatgccttttggtatcacttagatgtaatagaaagctattttgctaagatggcaagaattaatatgttcatgcacttggtatcatttaggtgtgaaagaaagctattttgccaggatgctagttttgatttgcgcatccgcatccaacatctatttgttttcttgtcaaggtatgccatggttgaaatcattatcctgactactttacatagttgggcaatactgcttatctgcgagtcatgaatttgtctgtgggtatcacgatttaattgtaggtataaacataactgtaaacacagtgaagtttgtaattatcaagggatttctctttgctatcatcagagcaatatgaagtactttgtacaagatttctgttgtttaacatcaatctattttttagataacttacaccaatccaaatccatgaagatcttttgacatccattcatggtgctgaatttatgtacagaagttggcaatcatgcatgtaagtttaccttgcgttcctacatatatatttttttggaagttttgtttcatcatgcatgtaagctattatgaatgtaatattctgtacaatgttcaatgtcaaaagaattgataaatctgtcctggtgttacatccataaaacttcttagaataattctggagttacattcatgctgtcgtctttgtttcatcctggttccatctccatggttttgcttagtagacacccaatcatgggtggagcttcttagaggcttatctaggctatagccctcccctgatttaactactacaattaagtccctttactttgtgacaggtagcagaaagtaactgtagaatggtccctacgctgaaaatagtttgaacattatccccctcaaaatttctcttcaagctccgccactgcgcccaatgttgacgataaatcattttaaatccttatatgctttgatgcaatccttgtgtctatggtaaatcatgtttggtagcatgggaggtagactcttattccgagatagagatgctcaacattggatgagttgaataaagggctatatttccttaattttatttatatatttgaattgtatgatgtacctttgaacttcgttactgtgtttgttttcattttgcttgaggagttgttttcttgctgaggtctagggtgtttcttccagtatatggaccttgtgttttgttttctttagaattgaccaggagctgtggccctcagtgagatgggcaactggaaataacatcctaataaatgtaggcttgtaatagcatgcatcaagaatcatatttttataaattgagattttaaccccaacttaagaagtaggaatgatcatgatatgaaactatgagcgcagtaaacccattctttatttttcacattctactaaatttcatatgtcaggtggtaatgatcacttaatttgtgaatggtctggttttgaagccatctattttattaatgtttgttgtaatatgatgaaccttttgaatgatagacaagaaaacttgccaatttactgatgttaaacaactccaactcttctaggtgaatatattaaacaaatcgtaaattcacctggtgaatatggtgtgctatagcttcagttttcatgaagttccaatttatggacatgtgggctgcatgcctgcacatgcattcaagtgatgtggtacaatgatatatcataacctccgtagaacctttcaaataataagcttttttttatatagggagaaacaagacagatacatgaatgatcagagacaatatattctatgtaaccaagctttggtaagtcataaaacttttgctagtcatatcatagaagagggcttactcaatggcaagccatagaaatatagaatcttaaaaatctctaatgcatggaaactttcacataatgtgaagcatatcgtccttgtgtagcatttatgggtacaacagacatttcttgcaaacaaaacagataatatagttcaattttcagattaagggttatgcccttttgtgtccacatgacttgttggaattttcactacatttgcttgttcaatatcgtgaagcaccttaggtgcttccttgcatttgctgtaaatgcagtatacaaccaactgaagtatacccattatgctgccgatgcagtttggggtcttcacaagaaaaaaagcatgtcagtttgatatatagaagtttattgtggctaaaattgattatgtccttaccgcgataaaaggatcccttcctatgactccatatgccatccaggttaaacttgtgaagagggtaaacaatgacagatagaaaggcatgaactcaacactctttgtcctgataacttgtttctgcaattatggaagtacatattatatttttaaccattcaaaataaaatatgtgtagaagttgtcttgttttgtttctctaccatatctaattgaatgctttgttcctctattatactttctgatgtgaatagcatttcattgaatcatcattatatcttgaagcacatgttactttttagcatttttcttttttattgaagttcagtatgagatcaatgttgcaaggttttatcttgcaggctgatattctattatctgaatttcataattcctcagtcaatataagtaacaatactcaccatagctaccagcggagagccgtacattgatatggaagacactagaccaacactaccaacaaataccttacgtatatgatggttgtgtattgaaaagcttgagaaaaacacagtcatgcaaaagactgctagaatcagagatgccatcagcatgacttgcttctgcaagagattatcagtcagtgttaacataatcaatcaaaaaattcacatcctgtaaaatctctctagtaacatgccatgtaacatcaaacttttataaccacttaggcacaactatgaaataaaatcatttcttgtttcttctgaaccggaaatgcgagtgtttgttctgtcttacgtgtgtctgagaagaatcagacataatatcctttctttcaagagaacaagaagcaccgatggacatcatatttttagtgttctattttggtatagtgctaaaattttgggggtgtgagatcagagattttactactggctaggtacttatgatttggatcttacttagtttgcctctggttcttatcaatattaattgattcatgttgtcatgactatataacatctagaactttctaatctcacaactttgaaccaaaactgcatcacatgcacaagttccctagaggcctttgcacatggttatgttagagctaaaaagaacaaaatcttatatgactgactttgtgctgaatatagtactgcttttggagtacaaacagatagaaacatggtcatttgagttcaaaattttggatagatttttttactattttatccaagcaaaagcttgcattcgttcctactttcttctgaatatgtcataattatacagctgttgtcgtcttactatattttgttgtattcctaatataaaatattagtgcaaacaacttcaaaaacttgatagacacagaagtaaattagtttacccatggaaatcattgaaatgctgaaggaacaatagaagagttcttcagaaatgacctactttttttcctcttggagcaaaccatacatatatgctgatgaatgtgccttcaaatagcaccccaagtgagctgatgctgcagactgtcatgttctcccacccatagctcaccacaggaaaaccataccaactgtatgtgaggcagctgaacaaagctaagatatatggtatgcacgagaattcttctacactggccttctttatcactcttttaaatgtcaatctaggaaacatagtaaaaacaagtgtcaagcaatgcattatatactgcgcaaacatagtatagcttatgatgtatagacatgtagttgggtacattggtgctgagtagaggagcatgcaagctacagatcctgcaggagaaagagtatggtgttatgaacataaagaaattaatcgaagtagcttgtgggtgcaaatacctataattcccacaataaaacgtatatcaggaaacattcttttgtgctgattgatgaagctattttgttgcccctggaactagatttttggatagttcattgtttacaatatgggcaggctatttataatgtgcaatggctgtttaatgtgggaatgtcgagatattgctcaaaccactaaggtagaatatctgtttttttttgttgctatgagatttaacacagtttttttgcaaacatggagtaatgctggtattctctttcatgttattaccagcatctaactattttattgcacctatgtacctatgataataatataagtttcatgttaattttgaatctggtccgtcactggagtaggaactagcgaactagccaatcagtatctattgtacttgcaacatagttagatgtgaatatggtactcaacttctagattttaattgactacgaagatacggaacagcagggttggaaatttcggtcatttcggtcccctccgaaacgatattaatttggctgaaatttttgaatttttcaattttttcatgaatttgggtaatatttgttcaaattcaactaaattttgttcaaaatttcagaaattttggaccgaaatttcgggatttcggagacccccgatcaaaagccctaaaccgatatagtgaaccctgcggaacagcattagcaaaaatattagcttagaatcgttgctcttggatggcacttctgatgcacgatgaaaagcaaacatgaaaacaatcaattgctttgctcttttatccatttttccttcagtaagttaagctcataattttgaaaagcagccattaatatgatgctccattactccgtcatatagaacagttccgttattccaatgaaagaactgatgctgttgcttgccactcttcaagaataacgtgtctttttctggtgacattagtgaacatcactaaaacgagtaagcttcactaaggttttgcttccagcttttgagaagatgctcatgattagagagatgaaagattcaagtatgaaccctttttagacctgtaaatagttttacaggtcatgaagccaagaactttgagtttttcataatgtttttgactcttgaagaattagagtgcagtgcatttactgaagtagcaattgtggttctttatgattcatccatatctggtaaagaacaattgtttttttccttgaagatctgatgctgtcatggctacaattgtaacctcatatatgaacttttctgatgaaaaagcagtctatgtatatattttttaacatgtggtcattctgatgcggctagttagctctattctctctaaattaagttggttctattgagttgacgttactaattttcttctgaatcttctaaagcactattaacaaacttttctgttataggtacatgtcccctccttcaatctgagtgctgcccctcctccaattgttcagttcgacctcaccacaatcctgtgagttatttgtcatctactggcagcgcatttcttagcaaacacatggtgaccaaccctctcaggttcttttgttctggtaccaaaatagatgggatgtctgattctgcgtggggctactgaattcacctgtccagaacttttgcctgagatggaacatggcctcgtttgctccaatattgtgtggaggaataagttaatgtggccatgtttctcctgttaatttgggaataagtcctttggttgatattaactgcaaagacaacatgacaacccacagaataaagcttgtagaatcaactaacaaagtttgtctgccatcaaatattgttggctattttttttgttcattggtgcaaacataccctaatcatttatttggtcagcatttatttgacttattacaacttcatgcatatgagtcataccatgcaatgtgcacttcaagagatttgaattacggatatggcaaaagaaagtagtatttggaagtttaaacacctatgatgcacttatattgcaatcattacttccactgagtataaacttacggttaaacttggatgtctaagctatttacctttccacagtatgcattgaagcaggagaggcaatctgcaggcaaccactacatatagtaagggatacaggcaagttccatcttaatttttaatccctcttttgcaacttataaggatctgaaacttttttgtcttattggtgtcctttttatacaattaagaatgctgtgaattatgaccactccttttgtgttccattagtgcagcctttctggcaccaatcgtgctgaaactatttagcactctcatatctttagttttacagcccatcattccataaactacattagttgtctggtggaaagctagattaactgtatacaagcatgactgattagctttagaggcgctagttttggtaaaatatttgagacaatctaccatgcttgcttgaatgtgttgctttcaacaccattaggaaaccatatgactggttaagttaaaaacctggtcaactctagggaataacttgccaacagacaactgatcctggtgaaggatccacgtggctgcctgggagtccgttaatctaaaaaagaaattccttttgttggctggctcaatggaacattgtcgtcccatgatatgatggtgatcaccatgatcaactaattaatgatgtgaaaccaccgaaggaaactatgaagtgaattagagcaatgagcaatctcgatgcgtagtgtcataggcagtgtctagatgagagagcacattaaatattaatttaaacctaacctccccaatacatagtttcttcatgttttttttctataaaaatagatataacaaacatttgtgtaggggtcaccgcatttctataggaggccatgacaagaaaactactagcatgtcattgtgcagttttcttgagtcgtcatattttactctcattagctcaggcgccacatcaaatttttagcttatgtggcagcataattaaatctatggaaactatcctacctagagcactggagcactaggactgcccttatagattactcgtttaggattcacccttcttttaaaaacaaatgttaagagatggccgaattcattaattaatatacaaagtttcaagttaaagttatatttttcgctcattactaagtccggttagtgctggagtagatatacttagttttgttgttatgttagttgatttacattgcagttcgtggaagctttgtccgtgatcgaaattgttgcttctgtacggtagccgtgatcaagaggaatatgacattatcttacagagcatcagtgatctataaatttccaggacaaactgatctagcacagaatgaagcagcagagaaaccaaaaatgagatatttggagcctccacccggagcggaccaccagagagatggcggagtcggcgaaagatggaggtcgcggtggacatcaccaccattaatgggaaggtcgatgtctcaggcttgcggttgcagctgagaaacctcacagagttttcagctgtgaccacatttgattgattgaagtgctaaggactaaggtaacgtgatttctgcaataacgctttggaattttgggtcgctgccgaggttcttcaaacccgaatactctgttcacagttctgagattatatttctttttcctagtatatattgcggttgtgatattcttctctcgatgtttgcaaaaaaaaaacagagaaggaaaataaataactttcttcttctgatgttatagctgcacgctatttgtttgaatgaaatagctgagtggacagctacgtgacatggtccgtatgtgcataagtttcataaatatttgaaacctcttccaaggttatatagtcatatggaattcttttttaatataaagcaactatattgttgttggaccattcattgtgttggcggatggcattgtgttgacggatggcatgaggcccttcgaccaaatctgccgaaacccgtggcgaaggctatggagcaagaacggcgtgaggcgaagagtcgtacgagtgtcttgccaggccagaggcgtctcaggcgaagggtgcaaggcgaagactatctgccgaaggaagacgacttcgccatggcaagttcgcccccgcgagggccgaggaagcctttccggcccaacaagcttaggggctatagggctagcgatcgccagacggcccatcaggggcccatgagcccctataacattatgtacccctgtaaatgtccctttcgtaagggtaatcatgtaaattcccctgtacaacctaaaccctaatagtaaaaacctgtaatggggctattaatagtctcctagggccatgtaatggggggaggggaaaaaaagaaagaaaacaattcaaaattcaatacacttcgtttccttccaaccactgttgagtaaccacgtctttcgacgtatgcagttgtcatttcgacaacagctggcgccgaccgtggggacctccgagcgaaaccactgagagcgaatgctaccgaagagggtcgtgaaggagaaggttgccaggcgaaaggaaagcgacgccggaccggacatggccgccgaggaaggagcagagccttcggcgcccgtggccgaagatggaggaggacaagcgccatcacaaccgccttcggcccctgcaacctttgtgcaagagccgaacgcggccgacgtggcgaaggcggctgcggcggcaagggcactccagaccagggcggagatcctttcgacaggccaactggtggtgccccaagccgctccatcgcagccggcagcggccccaactgcgctcgccgttgtgcaggcccaggtcagccctgaccccgaaacacaagccgaagccgacatggaagccatgcgatagaacatgacatggctccaagacatgcttcgccaaatgcaagaacaacaacaagcatacgaggcggcaaggcgggccaaggccacgtcggctccaatccttcagtattcggcaggttatgtcccacctcaagtccatccgcaagtgacgacccagccctttccgccacaagccacacaggcgccggtgtacttcgccgggcagcaatcggccgcagcagtgcatccggcccctcacgtgcaacagcaagctcaaccagtcgctgcccaagtacaccatcaaccacctggccaagcgccacaaacagtggcggaaggggcttcggctctgcaggcgcaacttcaagctttccttcagcaactcaaccaaccccactgcatttcaagtacaatcccatcggcccacccggaggggaatacaagtcaaggtgcgcctaattggttgccaccgattcagccgggcctgggagtttcgccgtggaatcaaggaccgcagctcgacttcgtcaacgctgctcaggcgccaaccgttcggcagcaagctccaactccaggcttcggaacaaaccaagcaccaatccaagctgccatgacgtggtcgcagccaatttttgacccatccatggcggctcagcaagtacctccagttggagccgggcagtcgaatgccacggcccaacctcacgcacaagctgcgattttgcccttcgccacaccgtacccgcagcaaggtgcggtaaacagggcgggaggcgaaaaggggctaccgctgagtgggggaatcaagactcgtccaatcccaccccagttcaagttcccacccgtcctgcgctattcaggcgaagttgacccgaaggagttcctctccatctacgagtcagcgatcaaagcggctcatggtgacgaaaataccaaggcaaaggtaatacatctcgctctagacggcatcgcccgttcttggtatttcaatttaccagccaatagcatttactcatgggagcaattgcgcgatgtttttgtccttaactttcgaggcacctatgaggagccgaagacgcagcaacaccttctcggcattcgccaaaggccgggggagtcgataagggagtacatgcatcgcttctcgcaagcccggtgccaagttcaagacataaccgaggcgtcggttataaacgccgcttcggccggtctgctcgagggcgaactcacaagaaaaatcgccaacaaggagccacagacgctcgagcacctacttcgcatcattgacgggttcgcaagaggcgaggaggattccaagcgacgacaagctatacaagctgagtacgacaaagcctccgtcgccgctgctcaagctcaagcaaaagttcaagttaccgaaccacctcccctctctgttcgccagcctcagccggcgatccaaggacagccgccaaggcaaggccaagctcccatgacttggagaaagttcagaatagaccgggcgggcaaggctgtgatagctgtcgaagaagtgcaagctctccgcaaggagttcgtcctattctttcgtgatgatttgtttttttaaaaaaaaaatcttaaggttcatgattgggtagggttagccccttttagttcaacaagttcagattctcagcaacggcacagtgtttttaggaacaaactcccaaatctagcacaatatgatgttttcaaacagcaggaaaccagtaagtgcagaaaaagtatatgcatctctggacgaaacggacactacgatggttttaaacatataccatgtgatgttgcaaaccactgaaatcccagactgaccttgaacactcaagaatgacatcaccacctcttcctccattaccacctgcatatttcacataaggaggatctgttctggctccattgtttaagaatcatgaaaaagaaaatcctgactgactgccgaattggaccaaatagcatgaattaaagccatgacagcatccctctaaatcaggtaactattctctccctaatcaatttcctacaaaatactttacacctcatagatcgatactgtttatttcaatctgtcatgatgtatgcctacacttatctccactcaccctactttatatggcgccaagctttttcatgttcccaggagtttgtatggcaccaaactgttcacctgagcaaatggtccaataatgaatatatgatatgatttttttgctttgtcatggtacgttgctaaccttctggtgcagttttctcattaagatattttgtgcagtgaagaaatgcatgtttgtgttgtaagatgcttttaaatttattttacaaatggaatgtatgaactacgaacaagtcaataatagtgtactgttaagtattgattatattttttattttaaaagttcagcgtgttaaatgaggtttcaaagatgctatgaaatttattgtgttatatgaaatatgttgccgcaacaatcctaagatatcaatatgcgtgtcatctaggtgcacttggctgataagctgttggagttgtccatatcctccaggaaaatgtgttgatgggttatgcggggtctggtacatttagacatgcggaagttctgatagtaaatgtatggagagatttaagatttatcagatgtatttgtatgcaaattgtggataaagaattgtcagatattcccttttggagaagaaatgagacagttcaggttataatgttataatatcggtgcatataccttttgtgcaaacattcaaataatttaccgtttgtgcatatgcataagatgcaattaattagtccatctaaatttactactcccttatacaaaaattaaaagttatatgatttttgaattattttgtattggtggcgtgcgtttgaccataattttatatttttcaacaagttcataaaatactataaatttaagaatatggaattattgttttaaggctaaatatgtgttgatcctttagcattcacataagaacatatacttcatatctttgcttggatatttgtatttttagacatatattttgatttgtattatcaaaaacagccgtagcgttagcacgagcagattactagtttggaattagtttgatttcttagatatatatgagatagagtaaaaattaactaagcgacaataatcggtagcttttgtgataacttagataaatgaaaacttgcaaaaaaatctaagctcaaaataacatctcaaaagagacttggctttgacgcataatgggccaacaagtaaaaacatattaatgtgctagaatacagaatgttttattcggtcaattatgtaaatgtttcacatgccgtactattaattagcaagtcttccatataattaacatttcttggagaaggcaagagccaactcttcgggaaaataaacgtgctagttggcatgctctctgtatggcttctataattgctaagggtaattaatgctaatattttgctagactttataggaattagctcaatttttcattgaattcctgtgaagatcgtgcacttttaagatattcacaatggaagcacatatgtttcatgattcacgataatcttattgtacccatggtagattttgtatgtcagctctctacctcttctatttaagtcttcttattttattaatgagtaaattgcgccagcggtacaaaaatttggcaggtgggtgtgatttagtgtaaaaaccttgtaaaataagcaaactggtacataaacttaacaatcatgtgcattttgataaaaacacggttacatacctatggttcatcgtattttattggttgtatttgtaaacatgactgctagattaattgttggcaatgagtatgttttacagtgctcatcaccgaatttgtatgatcagatggatcgcttggaaattttgttagttggcatgcacttagttttgataatcattatttttctaattttaaataataggttattttagtatttataaccaagcaaatgcaatacatctaaaaccttattcggaactcaagatgacctaactggctgctttttctttatatagctgaaaaagtatggtgtggaagagagatattttaaccaaaatgcacgtactaaccaagttgttacatctatataatcatttttcaaattcttgcactagatcgtacccacttactaagtttgtgtactgtagacgcaatttactttttattaattaatattcctcaattttttaccttactaaccatagataagaaaattaattacataggcacctatgagcccacttcacgatataatttactccctccatctctaaataaccgctcattttggtttaaaatttgtcccaaattaactactccctttgtcccaaaatataacaacttctagcctctagaatttatcccaaaatataacagtttctacaccaacattctcttttcaaccaatcacaaccctccaccattcaaattttccacctacctccactttttatccaatcacaacccttctctatttaattctacatatttttttaataacattgtcgaactctaaaaatgcttatattctcggacggatggaattactcttagggtgtatttgagtgaagagaagaatgataagatacataaaatgagataaattattagcatatgattaataagtactaattattttaaacctgaaaaatagattaatatgtttttaagatattttttctataaaatttcttttagagtaaattttattttggaccatctttattgcttatgtttcgcttttgatcaccttttagccaatgtttttattttagactgggtaatcttgcctgtgttactctcttctcatgcatatgaatgacctcgagtacccctgttcttattcgtcaataatcagttatatgtagaccatttatatgatatatgacaatttagatgtagatggataaaacaactgacggtgttacaaaatgctactccagtataaaggtaaaataacccgatcaaaagtgtaaaaaaatagttaaagggtgatgcaaagcgaaacaacgccgataaaaagtggcccaaagtgatttactcttcttttcatttacgaaaaaaaacacacggtttatcattttgcttatcgtatgaaccatacataagaaaattaattatatagacaccatgtaggcccactttgcattctacagccccatcgttttgcttattcgttgaataaacgaaatggcatatttgcaaacgaaaagtgatatgcaaataaaactttcatatacgtgttcttaccgatctaaaataaacttcgatgaaaaaccatcaaaattagctttaaatttaaggttgaaaattcaaattttggctgataatcataagctaatttactccatccgttccaaaaaaagttgatattatgggtttaaaatttatcccaaaatcaccaccacttaggctgcattcgttacctccctttcccaacctccctttctcgttttccgcgcgcacgctttttaatctgctaaacggtgcgttttttgcaaaaaaaaaaattctatacgaaagttgcttaaaaaattatattaatccattttttaaaaaaaattagcaaatacttaattaatcatgcaataataggtgcttcgttttgcgtgcgaacccctcctccctaacacagccttaggctgagttagtttccaagttttccctactcacctctatctttttccgtgtgtacgcttgtcaaactgctaaatgatatattttttgcaaaaaatttctatacgaaagttgtttttaaaaaatcatattaatcattttttcaaaaaaaaatgcattaatacttaattaatcatgtgctaatgagttactccgttttgggtgagcgagggattaggcggaacacggccttagagtgtgtttgagtaaatgagaaaaaataacaatggtaagatacagaaaattaagtcattaccatatgattaatgagtattaactattttaaacctgaaaaatgaattaatatgatttttaagtaaaaaatatatagatttttcttttgaaaaaacatgtcatttatcaattcgggtaacatgcatgcagaaaacaagatttatttccactttctcacaccatcgaacacaaattaaggtccttattggttgtcaatattctctaataagtaaaaaaaaacttatttagaaataaaaattaatctatagctaaaacatttatatatatgtattgctagcgacttaaaattcaatactgaaatagaaattacattgaaaatatttttaaaatcaactttaaaattcagtttgaaaatttaaattttagttttaacttattagggcaaccgataggatttagttcccaaaaacttttcacaaaaatatccaatcgaatctttggacatatgtatggagtactaaatatagataagagtaaattgcacccacggtataacaacttggcaggtgagtgcgatatagtgaaagaacttgagaattgagcgtccgagtgcaacaacttgacaagtaggtgcgttctagtacaagaacttgacaatttgtatttttgtgcatcaacttggctaggcatatgctaggtgagttttttttttcccgatgttgtgcatcaacttggctaggcatatgctaggtgagtttttttttcccgatgtcaataatgccactacatagtaatcctacggatattaccttagatattaaatttaatctttaataattatattgcacatacaatttacattcaattaccttaagatttttttcgttttctttaccttctcaaatatcaaccgaaataataatttttacatccagtttaattgacttcaagttattaattattataataaaaatataaatatgcttatacaaatccacactagtatattgtcaaaataattacttaaattgaatctatatagaaaatgctccaaataattaagttgtcgcataatttcttagtttattgtattaaaatcgtacctaccttgcaagttgttacatttatacgatcacttataaagttcttatactaaattacacatatttgccaagttgttgccactagaatgctcatttctcaagttcttgcaccaaattacacccacctgccaagttgatgcaccgtgggtgcaatttactctatagataaaaagaaaaattaattgcacagtttgcatgtaaatcgtaaaacgaatcttttgagtctaattaattagccataaaagtactacagtaacccatatgtgctaatgacggcttaattaggctcaaaagattcgtctcgtggtttctagacgagttatgaaattagtttttttcatccgtgtcaaaaaaaaccccttctaacatccggttaaacgtctgacgtaacataaaaaaaaaatatttcaccaactaaacagatcctaagtcacatagggggcatttgatacgcatttttttttgtttaggtagtactccctccttccctaaatatttgacgccgttgacttttttaaacatgtttaaccgttcatcttattaaaaacttctgtgaaatctgtaaagctatatgtatacataaaagtatttttaacaataaattaaatgataggaaaataattaataattacttaaattttttgaataagacaaacggtcaaatatttttaaaaaagtcaacggcgtcaaacattttgggatggagggagtactctactagtatttctctatgttttagtgcagccttacagcgaacagttagaaataaaaaaaaagaacaaaaaagcagacgagaatagtagtagtactactagcgcgtaggaaaggaaagtgcagctttcccgcgagcccatgaccactcgtttcccagttcccacatccacttccacgcgagcgcggagagcagtgtgagcagtgcgcagcgaagatggctatagagtagagaccgcgaccatttaggagcgcgtgcgcggcggacacaggggccggtgggagcgacctccggcggcgcaggatggaggcgaggatggcatcgagggcaaggcccaaatcccaccgacgagcaaacccccgctgctcgactgctccatccgtcgctcagcctcaacatccagatcgtcgagctcagttttctctctcccccgtccctctctctcgcctcaccttagcagcgcatatctaatcggagcaggccgcatagatgcaggcgccagcggcgtggatcgaggcagggcggccgcacggtgagtacgaggttttttgttgcgatttttttctccaataatccggactcttccagataaggtcacacgttttgtaaaaaacccctcttgaaaattgcaatttacatttagatccgccagatgatttttgaccgtcgatgtaccatctaacggctgtgggaggggtgcgaaacgtggcgcattcttcagccgagaatgccgatggagctcaacacgcgatgccacgtggcccaatgggatgcttgggatcggaccctgaaatcgatttataagatatggcacggccccaaaaagagtaaggaaaaatagacttattgtagctatgtataagacgcggttcaaagatgagggacacaaaatagacttattgttatcccacccaaagaggagggaggtgaaatagacttatctcaaagaagcacaagctgccgacctgccgtgccttcgggccggcccggcacaacccgacttgggcggcaagggggctgcatgtaaattttcgccatcctcggtggccagctgtaaagcgagggccaacgaccatctgccacgtcggataaatcgtccactagactcccagagggcaatggggactagatttgtaaatttttcaaatagaaaattatttttgtaaatattttaatagatatgaaaaagtccaaatacccccctaaactttagatagaagtccgtctagaaccctaaactttaaaaccggacatccaaccccctaaacattacaaaaccgttcaaattaccccctacggtggttttggatggtgtttttgcatattttaaaagtttaaatgaacagctttaaataactaatataacatatttgcatatcatcagttgtaagtcattaatttatacttatacagggatattgtcgacggggatacccgtagaccggatatagatgatagtggggtccattgatacgaggatctacgtaatacgacatcaagcaaacagaatacaaggattatactggttcaggcaccttggaaggtaatagccctaatccagttggtatgggattatatgatagaaaccacagattacaaagggaatagcagaactcgatgatactgacgagagcgtagttgagttggttcaactagatctcttggcgacttggctcctgcacgctccggctccgtaggctgtgaggtgtatgtgttggcagcaatattcgatgccttaggtcctgtccagggggtcccttatataccgcgggtcagttgatctccaagtaggactcgaagatatcgaacccctcacgatatggtaaagacccagtctcgtccgagtaggactcctcccatccgtatattttgtttctatcacgtgatagatttcctcatcgtatatggaaactatccgtatacgcgcgggtatgccatatcgatacccaccgtacatccaaggatagagagtataccttatccataaccctgacagatatcatactattattatgttggtacttgtttgtaagtgagagctaacaactagtaaaagaaagatttaagtgaagattttaatacatatgtccaatgtgtatgttacgtgatcaaactcatccaatttatatacaaattagataaaaaccactgtacaaaaccaccttagggggtaatacgtacggttttacaaagtttagggagttgggtgtccggttttaaaattcagggtgctagacagatttatatctaaagtttagagggtatttagactttttcctaataaataaaaataaaaaattctacgaaatacgaatcagcagcaagcggcaacggtgaaaacaaatcgtaagtactagcccagcatgggattggcccttccaacatttcatcttcctaggctcttgggtctgttaattatttcctcagtttcaggttataaaataggattgtccatattcatatactttctccgtttcataatgtaagttgttctaacattttctgtatttatatttatgtcaatgaatttagatagatatatatgtctatattcattaacatcaatatggatatgggaaatgctagaatgacttacattgtaaaacggaggaagtatgtgttaatgaatctagacatatatgtgtctagatatatgtctagatttattaacatctatataaatttaggcaatactaaaatatcttataacctaaaacggaggtagtggttgctaattaagtatacacaattagtactaagtgtagattttggggtcctaatttttgggggccctgagcatgtgcacatgttgcaccggcctatgcatgggcctgtatagtacagtagtagatctcgggaactttttaagtatttttgacaaacgaaatatgtggaatctaatttagtgcgttcatatgaaatcttctagtcattacgaactgaaaaaaaagttaaaaatgtgagtgaaagtaagcaggcaagttctaaacaacagtggtcaaaacataggcctactaatgggcttggatgtctggcccaggatgttgggcccagccagcccaagtatgcaaaatatgactagttcactttagatcagattcaggccatgatagtatactttctatacaggtggtatccactgacttctaaaactcaacatgtaacataatgtaagtataccacatcattacccactagcaattattatctagaatattttagatctcatgaaaacatgacatatcatatcatttgtaattttattgtatttttagaactcagcatgcaagcaatatcaattcactatcttcacatcattttcacattatttaaacatatacgtctatcattttaataatgtataccatacattcatccatatatcccatagcaaaacgcggggtatcaagtagttttcttattagaacaagtttaatagtatagccaactattggcttcaaatcatctatagtcaatttaatagccaatttatataatagttacctataaatatatactacataattaatgtctagtctcacttatcatacacacatgtatcttgaagtctgtgctgcagttggctacaaatctatagcccgctgctcttatctctcatcttttatctccttaaaatatatttatagctagcttatagtctactattgtacctgctcccattgattgaagtccacacaactacttttttattacttgataaatccacacacacatcatactccataaatgcaagtacactccctttaacatatttcggaggaggcatgcatcgttgtatccataaatctcacttaatttataatgcaagtgtatcggcgtgcaaaatttgtaggcaccatagtttaagttttgatgggtaaattcatgcatacacaactccctcacaacaccctctagtacttcccctacatgttctgtattttggtgtgtagtgttcttctcctacggcctattggtgctttggtgctggaaatggtgatgcctagcaggaaatctggacaatttgtttaactagtcagcaccccacgcgttgtgccggggaaaaaggagatctaaatttaattcacatccaagtatttcaaattggcatatggtaaggtctatttgaattatgtaaattgagaaagaaaaacggacaccaaatattaagcatggcacatgaaaattcgtaggcaacagtaatgtttcatgaaaccggaaggtacaccagttcttcaattctacacttatgcaacattctaactaatgtttctcaaatgctataccacaaagaaagattgaagcaagagtaggtccacctacttaaaccatagcccatatatatagcccatatatatagctgcatacgtgcgattgagtttgaaataatgaaactacaactgtttttccttctattactgtcaggtcggcaaaagggaaataacatggctaatgaaaagtagtgttttctgaaaaggatagtttccaatggaatctgtacaaatattattatgcaaaggattgttttctggaagtaaagaaaccggtcaggacacatgtaaatagatgcatcaagacacgatacgtcttagaaaggtttgtctattagctcttgaataaaaagtgaagaatgtgtttgatagaaatgattttgcaggcggattgttcttcatgtacctgtggaaaacagaactggttagacatgtcaaaaatgccacaaaaattagcttacaacagaacatgggaacaaccattttttttatggacactggcatttgaccattacaatttgtggagcaaatcaacacatgaaaaatctctatgatcaaataaattcatatgaaatatacatgaaaccaagaatgcaggttgtaaggtgaacaaatgcacatgtgcccaagaatacagtataacaccgccacaaaaattttccctatatcagaaagcctaaaggtacactgcaacagtaaagagagaataactctaggcattatgttgatacacattcgggtccagctgaatcatctaggcaaataaaaagaatacacagctcattgttatcagttgtaaaatctaggcctaacttttatataagcaaaagcaaaaaaagaaaattaaaggcaagtaaaatcgatggatagttttaattactcgaggccacaaccaagttcactgagctaaccaacaacaaatacttgtagatactatgtatgtacatacatatgttatcatatataggacatgagcgtccagccaatttagcttctagatatttcaaagagttctctttttttatacgatatttcaaagagttctagacagctgatgctgaaccatgattagggtcatgcatcttgcttgtaagattattgcaacgaaaatgaaagcttctgaataattccgaaatctgcaagtacttaacgaaatgatataataacaaagctgtgtacctttgtttggttttagtataattggcggggttgttcacagagtcagtggacaaaaaaaatatatagcagaacacagctgcttatccaaatgagattttgatgactggaaaatagcttctgagcaatacaatgctgcagcgcaaaagaacagaccactcttcaataaatttaccttgtaaacaatgaatgcaaatcatggattgtagagtaaaggatggtgaaaaaaggcataccaaaccaagcattgtcatgggtcgaagcaaatgttagatgtgataggagggattaattttttttcagcagagaataaccaagctggagatggctgcatatccagcagcatgccattggaggagcgcagatggctggacagccacacacctaaatcaagcttagacctaatccatgacggagatgatgggggagatcacagagtagaaccatatctagagacattggttagtggagctgactctgtcatgcacattggccatcacacttgctctattccatacccaaaccctaaccgcagatcgcaaccctaaccacagtggcaactcatattgtgtatgttttacaattaatctatacagattggccattagcaaaaacaaatagaaattaaggtttactgttccatgacccagaactgacgattttatagccaatcctggagatatgagagttcagtattttcgcaaacttgccattaattagcatcaatctattttatagccaccaataataaaaggaaaatagatccacggtttaaccttgatgaagagcatgccatatacagtaatgaagagcatgcatatcccacactattacaaataacaacatgtaatttgaacagaatgaaatagtctgtaatttcctaaagcatgctaagtaatatagcatcagcatataacagcatgagaaagttgaaattacccggactagtggtcatagaagcatcagtgaaagtggcatcacatattcatttatgttagctaaggtccaatgtttgcctcacattgtggtatctgccatgtgcccatgcctgaaaacgaaaatggatgaatgtagtcagtgagatgctgctaaatacaaatattgcctcatgcaaaaaaatatatgctatagtttaaccgaatactaatttatatgataaaaaatagagtagggaaggtcatttatcaaaacaactaaataatgatcatgcataggaatataacgactaaacaacaaataagacatcccaaggaactacccaaaaaactgaaataatatcaggcaataacagttaacaggtagagaaaccctgaagagcaattgccaaccagctggaagccttgaacctgaaatatgaagggcataggaattagcaaacgaagccactcaaagaagcaagaacactattagaaacctataaaggtgaagaagatgtaacaatgtaaaatacctttcatggctttgataataataactgcatgcagcacccaccaaaagtatggtccaacattgttaatattatgataggatactctgcattcagatcaattggagaacacatctcaataacatatggatttagaatataataaattaacatgtcaatataaataattttgatgttgaactcatagagtatcctataagaaactttgatgttgaactcatagagtatcctatgaatataaataggttgtttccctatttttagctgcataagcaactgatagagaggattttgacattaaactcataaatccttccctaagaaatgtgccatcacttgccatataattttgcttgtctgatgcaccctgcatacattctatgatcatatatagacataaaaggctaatgaattaccttcagtcacttactcattgtactttgagatacaggccgatcaatgcaacaaacatttgctcaatcaagttaattaacatgtaaagcaaggcagaatgggtatgtatatccaagtggtgtatatgtatttgcaggaaaaggtagtaacgtacatatgtgatcctttcgtttgtgcttccaagaatcagtgaatgtgggcgacgaagcggcgcaagggagagatgtggaagaatcagtgaatcgatgttaccgatcgatgggacctctactgcactgtagagggggcgcgggctggctgtcgtcgagccgttcctgcagtcgagccgccgccgccgccttcgagctgctgctcccgcagtcgagccgctgccgcagccttcgatctgctgctgccgccttcaagccgccaccgccgccaccgcctcccaaggccagatccggcgaccttaaggccggatctggcgaggaggggcacggagcggccgtcgtcaagccgccgccggtgccgtcgagctgcagatggggagggagagcggcggagctggggaggaacagagcggtgaaggcggagcttcgggagccggcagccagcgagggggggcagcgcggaggaaggcccgccacgcattgtcgtcgccgccctccactcgggcctccgcggcgcccagcgccgtcgcctccgtttgacccacctctggcgccgccgccgtttgggctgcctcgtcacccggcgtcgtcgcctccgctcaaaccgccttcggcgccactgtcgctcgagccgggcggcccccaccgtttgcaccaccccgtcgcccgacgctgtcgcctccgctcgacctgcctctagcgccgccgcctccgcggcggcgcaaaatagtcctgaccccctccggattagttcgctccaacagccgtgcctcggtgagttcgccgtccggccatcatcccctcagttggcgacggctccgtggagcaaccgaagaggagcagcggctgcacaaaaggggatcgggagaggggcttttaactatttgccactcttacggatgttgcttaatgatttgccactaggcccacatgtcatagacacatgagggcccacatgtcattgacagggtgtggcaaatcgttaattgccatgtcacaagagtggcaaatagttaaatttcccatcgggagagggcaaaggaaggaggagtccatggagaagaaaccacacggcagggcagaactggtagagggagatagagggactggatcctgtcacgtggcagatcggacggactaagaaacctgcatttgctgttgattgtaaaacagaaaaagggcaaatgttgtagggaaaaacattaggttttacttcctctatttcacaatgtaagtcattctagtatttcccacgtatatatgtctagattcattaacaccaatataaatgtggtaaatgatagaatgacttacattgtgaaatggggggaatatatgattagttaattgagttatagttttggttgagctagaagtaaaaaacggaacaaaagttttccaatacaatatcctccatttcaatttgcagaggatatatggctgtgagcccctgactcgttttcttcggacacctaaaatccgaaagctgacatttttttttcggttgtcttcatttgctatgctacacatcaagcttgaatacagtgatccttgtttttgttgctgtacagagcacagttaacatcacaagatgcctacgttccaatcatccaatgtcacacagcagcgcatatcaggccaaaagaaaaaaagaatcgctaaaatacaagagctggtagctgttgtggtagaagtagaagtgtataactctatcaaacacagtaaaagagtagaacttcagtgttgaatatgctaggttattatataggcctcatgacatgtacactgacaattaatagttgtccatagaactgtcaactagatcaatatgccaatatgaacgagagaggagagaaaagatgaggcgagagaaacatcaatgttaagttcaacaacgattgttagcataggataaaagagaaaattgctactctctccgtttcatattataagactttctagcattgccatattcatatagatatcattaacatatatatgaatgtgggcaatgctagaaagtcttataatatgaaatagaggaagtattatataaggctaagaaaacgaatgaagggtatgtagtagcgaatttctctagatgacgtgtactgctaaaggctgcagaaaggaaggaatgataaacaaaatattttggtggattaaaggttagatcattaatttatttttttccttgaatacacagtaaaaatgggcatcatttcattaaagacggtaaaaatccaaatgaaaaaaatgaaaataaaaaacataccaaaacaaacaagagatacaagagatagggctaccaagaagcccagtgactaagggcctatttagttggtgccctagaagctgtgcttgagaaatttaggtgcctgagaaacatcggagaagtgcatgtgctttgcctggtcaggcaacctgagattttgcttgtttggtttggcacacttgcctgagagaaagaaaaagtgattgggcttagattatttatgttaattatgtgttcatgggaagaaacaaaaatcgaccaaactctatgcgcatcttagctctgagaaattaatagcatacacacaaagaagtgaaaaagaaataggatgctaagaaagagatccccaatgtgagttgaagcgatacccttcctccatgttcgcatacgtgttaatataggcgcaggaatcacccctggcgtggtgtttacaagtgagagaatcacgcattatctcaagataatagcgcgtgtagttacaacaagaacagaaacagaaaaactatcttatctatatcttctatccttatctatctatctcaacagaagacttaacagaaaccacattatctaacactccccctcaatctcaagtttcccaaattgagattgttacaaaacaactgtagttgccgaacaggaagaggcttagtgaaaccatctgccacttgatcctttgacgacacaaatcgaatctccagttgcttctgtgctacttgctctcgaacaaaatgataatccacttctatatgcattgttctagcataaaacacagggttaacagacaaataggttgtgccaatattgtcacaccataattgagatgatctgggatgtggaattccaagttcttccaacaacttgcgcacccacattatttcagctattgcatttgccaaagccttatattccgcctcagtactagatctagacactgtagcctgctttctagcactccatgacacaagattagtacctagaaacacagcaaagcctccaatagatcttctgtcatctagacacccagcccaatcagcatcagagaaagcacttacaatgctagagaaagacctgtcaatcctaagtccaagtcctaatgttccttgaacataccttagtattctcttcactgcagcccagtgtatatcagtgggattctgaagaaactgatagactttgttaacagagaaagatatatctggtcttgtgagagttaaatactgtaaagcaccaacaatactacgatattgtgttgcatcatgtactcctaaggtcacaccttcacttgctaacagtttttcagctatggacataggagtacttgctaacagtttgcaattcctcataccaactcacttaaggatatcaccagcatacctttcctgactcaacaacagaccacctcctagtttcttaacttcaattccaagaaaatagtgtagatcaccaagatctttgagagcaaactctttttcaagaccttttaacaatgttgtgactgctgaggtgctagagcttgcaacaataatgtcatcaacatacacaagtaagaatattgtgactcctttcttattaaagaagaaaagagaggtatctgccttggaaggtgtaaaaccaagttcttgcaatttcttacttaagagagagtaccaagctcttggagcctgtttgagaccatataaagctttgtctaacttacagagatgatgtggtagtcctgcctcttcataccctggtggctgtctcatatacacatcttcttcaagatagccatgtagaaaagcattctgaacatcaagttggcgaagactccatccttgtgacagctagagacaaaacaagtctaatagttgcagcctttactacaggactaaaggtatcctcatagttaattccatatcgctgcttaaactagcctagccttatatctgtctatagttccatccgctttcctcttaattttatacacccacttacaatctataatatttgtccctcttttaggtggaactagatgccaagtcttattatttacaagtgcctcatactctttatccattgccaacttccaatttttattacgtagtgcatcttgcaaactatctggttccctagtatctgtcagacatgcataccttatagtcccatcggcgtatttcttcggcttgcgggtcccgtgtcttgatcttgtgactcgaccaggagcaggagcttgcgttgtggagctgatttcctcgttgctcagcacagatgatccggactggtgtgcagaggaatcttgtgcatgcacgggactgtgcacagcaggctgcacgatgggcgacgcacccactgagcctgtgtcttgctcgtcttcggactcagcaccacctgacggcgcctgcatgcttgcgtcgggatcagcaccggtgtggtgtccgccggaaccttgcatggagccgtggtcgtccgattgcacgaaaacatgatcatctgccgccgttcctgcatcattttcatcgctgttttctccgttgttttcagtattttgtcctgcagcatgctcagtatcctgattagtgtgattagtgtggttaggatcatcaatcataggttgatcatgtactatattgccccctggatcaagcaatgatgatggtggaagcaaatgtggtggcagcaagagaacttctgaacggagacaggcgcccgcattggagtggagtttagcaaagggaaaagatgactcatcaaacacaacatcccttgagatataaactcgcccggcagatatgtctaggcatttaaaacctttgtggagagtactatagcctaggaagacacactgttgggagcagaaagctagcttgcgagcattgtacggccggaggttaggccagcaggcgcagccaaaagtacgaacaagagagtaatccggagggagattgattacttttaacggggttctattaatgagataaacagcagtggtgaaagcttcatcccaaaacttgagaggcatggacgcatgggctagcagggaaaggccaacttcaaacaatatggcggtgtttgcgctcggcagaaccgttttgttgatgcgcataggggcaggagacatggtgctcaatgccaatgcgctggaagaaggtatttaagtgctggtattcccctccccaatcggtttgcatggccttaattttcctgttgaggaggtgttcaacaaggttctggaaatcgcgaaatcgctcaaaaacttcagatttgtgcttgagtaagtaaatccatgtaaacttactaaagtcatcgaggaagctaacataataaactttattgccaactgaacttggtgcagggccccatacatcggaaaaaataagttgcaaaggtttggaggacacactaaaagacttggaatagggtaattgatgattcttgcctctctggcaagcatcacacacagactcctgactagaatccctagttaccggtagattattcttgctaatgactcgatcaacaataggaagagatggatgccctaaacgactatgccaccgggacaacgatggtttgacaacaccataggcctgcttatgtgatgcgctggacaacttgtcagttggcagagggtagaggccgcactcacacttgcctcgaagaagcggcgtcctcgtgacctgatccttaaccaagaagaaatatgggtgaagctctatgaaagctctattatctctagtaaagcaatgagcggatatgagacttttatatgcacttggcacatgaaggatatttttgagaaataggtcacgttttggggtgcgaatagtagaatgaccaacataattgatgtccatacctgttccactagccgtgtggacttgctcattgctggtgtacttgtccttcaccgccagcttttccatctcgccggtgatgtggtcggtggcgctgctgtcgacgtaccagttggtgtcaacgctgtaggagcttgatgcagcaacgttggcgttcttctcttctccagtgaaggagtgatcgaagcatttccagcacttgatgacggtgtggccgatcttgccgcacagctggcatgtcggccttggcttgccgtcgccgcgtccacgtccaaagccgccacgtccagggtttccgccttgaccccggccaccgccgcgccctcctcgcgacacagaattggccaaggcagatgaagagccttgaagaagttctagccgactttcaaagccaactagcagtgcataggcctcgctcatggtgatggagtcggctcggccagcgatggaagacaccaccgagttgtagtcgaagtcaaggccggcgaagatgtaagacacaagctcctcatcatcaagaggcttccttgcagaggacatgtcatctgctaacgatttcatcttaccaacatattccgcaatagtgcgtgttcccttcttggtggacgagagcgccattcggatgttgatgatcctagcgcgggactgcgacgcaaagaggttttcaattgcctcccacacctccgtcgcctttgtgaaggtagcaacttgagtcagcacctcacgggacagagacgatagcaagtagctcagaacttgctgctcctgagccctccacagcgggagagcaggatttgccaccttcttggtggtctttccatcatccttggtgatggtgatggttgcatctggcgctttcgtgctcccatctagggagcctgccatctgcgcgccgcacaaagccgcaaggatctgcgccttctagagaacgaaattgctcttcgtgagtttctcagaaacagcctgtccattaaggacagatgcaacggtggaagaggatgatgccatctaatctaaagattggtggaggaaggattcgggtggagggagaaggctctgataccatgtgagttgaagtgatacccttcctccaggttcatgtacgtgttaatataggcgcaggaatcacccctggcatggtgtttacaagtgagagaatcacgcattatctcaagataatagcgtgtgtagttacaacaagaacagaaacagaaaaactatcttatctatatcttctatccttatctatctatctcaacagaagacttaacagaaaccacattatctaacacccaaatccaataactcgcaaattaaactttcaattcccagtcgcatgcaaatcaaatcaattaacgaaacaaatggaggcagccatcttggtaagacggtagatccagctagatagatgacaggggctgcttcatgcgagaaggtgagagatcgcactataccgcacgccagcttccgttggacctggcgatggctccgcacgacgggcgacggccggaggcgggggcttcgcgcgacggcggccggcggcaggggctttgcgcgacggcagccaggacaggggcttcccgcgacggcggctgacggcgggggcttcgcgcgactgcagctggcggcggggggctttgcgcgacggtggccaggacaagagcttctcgcgacggcggtcgacggcgggggcttcgcgcgacggtggccaggagaggggcttcccgcgatagcggccgatggcaacgataccgatggcggtggctttggcttcgtgcagcgctagctgagcatgggacttcgcaagagattaggctggtaatcctcgagtgatgctacgcctcgagctcaggtgaccaaaatgggtcgcctgactcaggctaatgacatgccaggtttcatcaggccaggcaagtggaaaaggggctgagggtggcaaccaaacagagggtaaaataactcaggcttgtctcaggtcaagcaagttttcctcagggtagcaaccaaacaggccctaactccagaaggtgtgtttagcccatgcatacagcacactgcacaccacaaggcatcatctctaactgcccttaaaacttgatttatatcagggacaaaaaaaatgaaaaggatgtcgcgttgtagttactactaaaaaaacaattttcctggacaaggagctcccattttcgcacacagaccgtttttgcgtgcatacgcaaaaatcagactcctattttcacgtgcggacccttaagaggcccgcacgcgaaaatcgattttcgcgtgaggcccgcctacaagtggtggcctcgagcgacgatgacgacaaagaggtggccgggagtggtgccgccggccccgcgcgcacaccggccagatccgcatcgccccgaccgatgacaactgggaggcaatgttggccgggagcggcgctgccggccctgcgcgcaagcgtgctggccggatccacgccgcccctaccgatgacgacgagaaggcaacggcggctgggagcggagcggctggctccgcacgcacgcgtgccggccggatccgcgccgccgccgctggattctagggtttccttttttgaatttttattttttttctagaattttatttttccttgtgggcgacataacatgaccgcatgcgaaaatccaattatcccgtgcggtccacttaacccgaccgtacaggaatatagattttttcgtgcggttgggccgtccacacgtgaaaatatttattttcgtagacacctgggtgcagacaggcaagacctccgcacggaaaaaccctttttgactgaatggaaaaatcgatttcgtagtagtgagtgcttccaatgctcctagtcctaggcaactaggatgaccaaagaattagcctttcttagttctcacagttgccaggggataatctttagatggcgtgtattgcttaagagccaataccagactcaactactgtacttttgctaagaaaatctccactctttataatttaagctagccaaccgtttaatattagtagttattctagaaaatgcatggtccttgtctcaaatgtgcaaagtataacttggttcttggtttagtcataattaccttcataaatcacaagtgtcatcagccgttactgtttaccgtccgacaatggtaacacagcttgacacctctgctctggtctcagagccattcaaagtacatttatgtagtgcctgctatatataatctccatctcaaatattccctccttttttagttttcacgttggttagctcaaattgaactaaccaacataaaaaatttggaaacggaggtagtacatcagatgggtaccccccctctgctcccataatcatgccaaatgcaattacaaatgtccagtatctgttaatgatgaaatttgataaatcatgcatcggatttggagttaaggccgaagcggatttgggaggaaatcgataacggaaacagggtatgaatcggcttcggaaccgcatcggctacagtgtgcatcggcagttaccgaatcggacaagacaagccgatgtagctgattccggcaagatgatattggaatcattgtcggattgagttgacgtgcttcatgatgattgccacgtaaggatcgagtccgaagaaggcagttgtatctattaattaggaatagtatgttagtttccttttatctttaggaaagtgtgtttagtgtcctataaggactttatcttttccttttatctttaggaaggtttctttcttgtccgacaaggacttgtatcaacccatgggtataaatatgtacacccggggtctatgtaatctatctccacgatcaatacaattcggcgcatcgccaccctttttatttctacttttgtttttacgttccggcggaacttggcacccgacgcggggctgcatcgtcttcgatctccggcgaagggataagtccaatgttccgccggcccaggcaattatatcgtttacgtcggcatgttcaaggctgcatcagtacattcgacctcttggattgatctggtttggatgatatacttgtctacctatttatcatatatctctgttaatctagtcttagcatatcaatttagctctatcggctgcttctcgttttagggtttctgcaggcatcggctaaatcgcgttgctagattagattagcttagacatctaccaccctgaaaactcagtcaacgacttgattgtctagatattatgtttcttttcatacttagtgctgcatcagttaagtttgatctactaagtcgtgcttagaaccataatctctagcctgcttcttgattgccaataagggtttcatcggggtttcagctggtgagttatctggacgttgcatcggctcataaggattgcatatacatataagttggatttagccgatgacaacaaaggcttcagtgtttaatctaatcttgtggatttcatgacatcagacctccagccgatgtgtgttttgaccttcgaatcgatgcttatttatcatatcattatttgctgattggtttatactggattatattgttattttattacatcgtcgtcagccaattgcctttatatcattatctacattggacatatagccgattgcttaaaccctatcgctatcggctggtatcggcatcggctattatcggcatcggctggaactactccatcggcttgtcagccgatcggctatttcgatctactatttgcatatcttgtcagttgcaggatcaaactgactggtacgctcgaatctcgtcaatatttggatctgcacaggagctaagcagatctcccaggacggtgtgttcgattttttttcgtcaacagtatcacacagttattagcaacttgttgattgatctttgttgttagtcgtgaacaatcaccgaaacaacatctcgtgatgaacagcataaacaatttcagaatccagtaatgcatgcatttagtttgacaaaagtttacttgccgcgctagtgcaaaatggaggcatatgccacacactttgcaacaacgtttgttgcagttcgttggctcagcgcactgaggcactacctaagcaaaaaaaataagcacgacataatatatgtaccggcagatcgactcagcttccattagagaaagtcacacacctcgaattaagataatttttgaaatagcacgcctgggagaagaaggtaaataataataataatatgctacaatgatattagatcactgatgaagatggcagcatacacgtcttggacatggagaggctcgattaaattacattgcattatggggaagcaccggtggagtggtgatggagtcgtgggtacatgattaatttcagagttcaaatcctggtgtctacgaatattatgtacacgtaaatgaactgtcaatcgaaatttagcgagattatggatgtaccgttggtttccgtctttttaaacatgtgagaggggatgcattcgcaagctgtataagtgtggtgttgcctgtgtaatactccctccgtttcaaaatgtttgacaccgttgactttttattcgtgtttgaccattcgtcttattcaaaaatttaagtaattatttattcttttcatctcatttgattcattgttaaatatactttcatgtacacatatagttttacatattttacaatttttttttgaataagacgaatggtcaaatatgtgctaaaagtcaacggcgtcaaacattttgaaacggagggagtattgatcaatgtgtgtgcgtcccccttctagtaaagaaatatattgcattatgtaaacagatataggccaggccacccactataaataccttgctctcccaacattgttctcacagctcattacacatagcccgctcggtcatcggagcgagaaagctcgccggcgacctcaccgtgcacatggcgcgcgccgccatttgcctagccgtcttcttcctcctcgccgtcatttcatccgctgcctcagatgacccgttgacaaccgtgcagcagccaattagccaggtaagccatggcgccaccatggaggaaaagagaagttcgccggtgaagcaagacgaaggcgaggagaaggcagccagcaaggccgtccaagccggtgatcggcgagacggcgagcttgacgtcggtagaggatcaggccaagatgctgagcatcaccgaggtatagagatcaagaaattagataatgatgacgatgatggcagtgattgggactctgttgatgactccgattcggaccacgattcagactctgatcatgatcatgactcggactcagatcatgattcggactttgatcgcggctcagattcggatcatgattctgactctaaccatgacatcgatggtgatgacaacgacgacgatgacgacgataataatgacgacgaacacaaaacaaacaagacaatgagtaagaagaagaagcgctcagcttctggtgggagaagggtaggtccaggtggtaacaagagctaattaagaaagaaaggaaatgctatgggggtgtttgggagagaggggctacatagggacttatatttttgtgagagggactaaagtttagccccactttaatccctccaaccaaacaccacctatatattgcaataatggtgtgtgagcttggtgcaacgtgcttcctccacaaatcgatggatggcgcgttcttatctttatttaacttgtataattatgagtgtgcttagggcatccacaatagttatctatatgctctctacaagagattcatgtcagcatatcttcctacttggaagatattaaatgaagagagagagagcaaaactatctactaacttggagatagtctatagataaaacgaggcaatagatcgatacccatgtagacatactattaaggaggtttactattaatatagtctattgctgagatgtacatatgttatagagagcaacttactttaccattgcgggtgctcttagtgcttactgatcgatacatctcctctaaaaaaactaagcacgaacaatgtaagcccgtgtgtatttgtttgtctatcatacaagctggaagatttaaatatttcttactaatatactaggcagaagcgaatggtactcggtttgaaatctcaaatttagtattcccatgatttgataatttcgtacgaaatctagagtctcaacaatacttatgttatgatctaataattctgaaatttggagctaataaattccagattgtcaactataacttttattattattactagttatcgtgcacgtacaatgcacgtaaaaatcaatatgaattaaatcgggcaaattgcttaaattaaacttgccaaactgcaagggagaacatctatacttttatatagttggtactcactaacaattattagaagctaaaactcaacatgcaagtatgccacatcatcacccactagcaattactattttagatcatttaaaattccatgcaagcatgccacatcttcactcactagcaattactattctagcctattaaaatctcatacaagtatgacacatcatctataatattatattatagagatcaacaagtatatgtcaaatcatcttcctcacattattttcttaacatttcaactttcatcattttgacaatatttaacatatactcatccatgaatcccgcagcaaaacgcggagtatcacctagattttattattttaaaaaccataatgatggtagtaataagattgtctagagctacggaataattttgaaaattgaatttcatgtagtttgcatagtacattactgttgggtagtacaattagattttatacgtagatcaaatttaaattcttggattcattatggcacacaattttgttcttcttagtacaattctgatgtacatcaaatgctcaatatttttgtttgagagtactacaattgaatacatatgcaccgctacatgcttcgatcaggaacacgcacaatagagattacttgacaatttcccgtaaataagaacttcgctggtcagaaaccgattgaaagaagaagaataaacataacatagtataattaataaataacatagtataattaaattgaagtaaaattttgtcttatgttttctgaattacctattctcgatgtggatacccaatctaccacgggagcacatggagaagcaggcaattgtgccggtaaatgttggcatagataaacaaaaaatcatgaggcaataaaaaaaatcccatatgctgtatttggtggttcctttccaagaggtgtaaataattgatctacacaaataattgatctagaaaagaataattgttataaatacatataaacaaaaactaagaacataaaaactgctccaccttctgtagcaaaaaaaaaagtgatacatatattctgtaccacgatatcctaaaggaaggtgctcaatttagcttgtgagcctcatctttattgcaggcaccatctccacacaaaaagtttgcaccaatcagttggcatctccctaatgctcataatcaatgttttatttaagagaaatttcatcttagttttttttatcaatatatatggagaacttggtactgaagtataccgaagtgagattaatactattttttaagatgatggtgcttgatagcgatagccgtgctcatctacgatgttcaaggccaccgacaaatcaagatttaagaagaccataatattctgaatcttaacaagttaatggcagaataagagagcaaaatttccaaggagataaagatatttcacatccaaatagaatctgtattaacaaataatgcacatctcatattccttcttgcattgccatgaaaaaagagcaaataaaaactgatttttgcactcaagtaagatagggaaaaaaatggcaattggtagttaatacctgatcattcttttgtgaaactattttaaattagaagctctttatgcatggagcaaatcagcaatcaaacatcgcactatatccatcacaaaaaaaaatgatcatacatggcaacttcataaaaaaaatatagatttcagtaaaaaaaaacatgactcaaatttggcactaaaatatttattatttgaggatctagaaaaggaggacatcaccttaacctacagtctgttcaggtgctcgttgatcagataagtggctatggctcactcctcaccactgcatagtaccctaggccaccagatgcttagtctgtgagtgctacgcagcagcaagcaaacaataccacagtctgctcatcagcttgcccattcgcccatattcattgttgctttgtgtttcccactacttgtacagctaaaaaaggtgtcacaatcaggcagaagctataaagggaggtcaaattgagacaacctgcatacataaagccaacatacttacattttttcagacaacctgcttttataaatgaccaatatttgatgtaaatttaacataacacttggtttcaaaatacaagctatcaagaatcaggttaatcatatcatactgaagcatgcaaaatcataactaaatctagccttttcctcaaacttccctccggccctcaaatgaaaggtgtctgatcattggctgactactttaaggcttcaaaacaaaccagaatgtaaaagcatccctccttccatgcttcatctgtatattcttagcttgaaaaaaaatatgcttagtgagttcacaaaaggaacaccactatactcaagcaataattttaggagaacatattgagatgacatattcggcaggtgaaattttgatactaaataagcacaagttccaggcgacctcttacattttgagctcacagcatgcggcaaaaattgagccagctgtacttctttgaatgttccgaaaaataactccatatttgaaatgttgtgaatctattgaacaaactgcaaacaaactccataaatggcacttctcagtgaagacaagtgtttgtgataaacataaatggtactttgtgttgccattgaaaaatatgtaaaactgctggttatgcattcagtcttcttgatattaccagtccataccagcataaaaacactgatagagaaggttaaagtcctagtaatctgttgttgtagaaattgactgcttcaactacaaaaatatattctcttcattttttttaaaaaaagctatgcagtatagaatgaacacccaatcacccatcagttatcagttcttaattagtaactgaccacaaattcttttcactgacaagaaacttattagaaaaaataattcaagttccaatagagagtaatactatttttttcttcttcaagccctacaccaattcaaatttgttgacctacttgaccttagtataatccactgcttgctgagctatgcgcgtctttaaatcctggattcaagtaattgatggaaattcaaccctgtagttatggaaattaacagaaatttgcagttggaaattttcaagcagcaatccaattcaagtcttgttcagaaatctgaagcataaatgctagcaatctttttgctggtagataggagcttgaggaaaagattgccctctagcaagctagctacaagatggaaattccctggtgtagagtagttttgagattgcctatggttggcgtgctaaatgccagtacaagtgcaaaaatcatcttgcctgagatatgtacaggcgtacagccatgtagcagaccacaacacaccgacctttcaaaatggaacatgggtactgaagattgacaaaacacacctcagacagaagtgaattcatagtatgtgttccatcgcccacctagctcttgtgttgcccctaagcagactgttgagatcacgtagatagaaaatatccaaactgaattccagtaagccgtataaccgtagcatcttcagtatctcagaatatatcaacgaaagcattatatctgatcccaaccggcatatcaaaacctgaccaccatacaaatcaatacaaatttagacgaaccatatgcaagcaagtatgcaacatgaacaagattgagtaaagctactgagtgaagatgtatggctcttccagctgacaatcctcatgaatcgaaagtcctaaagtattacatcatcaccgtacagagaataagtgattgtggatgtaccttgtggatgagaatcaaggaagacctcaggatggcgggcagaaggtaggcgtcggcgaggaagccggtgaagaagtcgtggaatgaaagcacggaaaggcattccacttccacctaggcgctgtggggggcagtcccggacgggtgcggtggaaggggaaccacctcggcgccggtgattccagactgcggtggagtgcggcggcggcaggaaaggatctcgccatcgggggcagtcgcggcggtccggtggacgggggaaccacaacctcgccgtcggggacaggctgcggtaggtggagtgcggcggcggcgaggaaggacctcgccgtcgggggcggctggggacgacctcggctccggtgcggcagcagttgagtgaggcggcggcaacagtacacgcgaggaagaggagcgaggagggcgtaatcttcgcccggtggacagggtgaaattgcgcggaggcgtggtcttcgcgcggtggagagggtgaaatcgcggtggacggtaggattagcgatcaaggtgatgtggatgtagatggacgatggtgattataccagattgatttgggtagtaggattgtagggggacaacttctccttttcctttttatattagtacagatatagatatagattatgtagtataatttaaatttaaaattgatatataccaaattgtagtcagtttggagtataagtgtactattaacttggtttaataaatctgatatttcaaattaataaattttaaaaatattatgttgtacttcatccggacccttaattaggttttttattctaaaattaataaatgtcgtcttatgcttatgtttgggatctcaattatagtatttttatgacataataaatgtaaaatagcccaagaaatccaaattaagtagagttgatagttgacgagataaagttttggaaaaagtacgaattaccccccgaactatcgaggtcgactgaattacacccccgaacttgaaaaccagatattctacaccctcaactattaaaactggacaaataacacctccgactcaatccggagtggttttgggtccacgtggcagtctagtcagcatttttttaaaaaaataatcagtgggtcccacctgtcagttcctaccgctctctatcccaatctctccctctctctctcttctcaccagcacggctgcggctgcacgagggcgggagcaggcggcgccacccacgacgctgcgcgctcaactacacatccaccatgatcgccgccgtggcgaggagcaagagctacggctgctcggagagcaaggcctagtccatgtacaacctcaactacccgtccttcgccgtggccacgggtggaggatttggtggcgctgctggcgttcaagatggcggtgaccgatgacccgtcggggggacgctgtcgtcgtggtcggacgccgacgccgacccgtgccggtgggccggtgtgacgtgcgtcaacacgtcgttgtcgaggcggctggcgggcggtgggtggggacagaggccgaggctggctgcgggtggcggacggcggatcagcaaatggcaacaaatatcagggcaggtcgcagttgcattcgcgcggtcgcgccgcggtgaccgacggaaaggcgcgcggcgcggatgtggcagtagaccgccagcagttggaatggagcggctggagcgctggtggtgaacggccagacgggatgacctgtgggcggtgctaagcgtggagacgtcacgatgcgaggagccgaggtcctcgccgcccgccgcggcccgtcctcgcgccgccgcccgtcgtcaggccacggcttgtcggcgtcgccatcgccagaagaacctgtccgggtacgtgcgccgaccgtgctcggcttgctcgcgctcgtccgccacctcaacctgcacagcaacctgcgcaggcgagctctgcctcccgctgccggccgcccgcttcgcctccgtctcagctgcccaccgccctccgccgccggcagcgccgcctgcttccggctctcaccagcacggtggggtgagaagagagagagagggagagattgggatagagtagagagagatagagagtggtgagaactgagaggtggggcccactgattatttttttaaaaaaatactgactagactgccacgtggactcaaaaccactccggattgaatcggggggttatttgtccgatttcaatagttgaaggtgtagcatttctggttttcgagttcgggggtgtaattcggtcgacctcgatagttcaggggggtaattcgtactttttcctaaagttttacatgtcgtttaacttaaatcatgtcttaaaagtgagatatttatgatcggagttaatccactcttgcttgtagtaggaaactcaacagagtacataaaatagtcccaagaaatgcttcgtgttggtaacttgtatacaatgtcaaataaaagttgacatattgtttcaaagaaaaaataaagttgacctgttggggcacatgcagcacctgcaaggctcgacctttcaatacacgtgctcagagagaccaataccaggatcaaaatctttggaccttattcatttttttatcaaaaactgctcacttatggccgaaagtttaccctacacaactattatggttatcttaaaatacaaccaaattcttaaaactgttcattctatcgtcgaccgttcatttatttcctcttccaaaccaaactaatgaggaaaatattacaactattatggtaatcttaaaatacacccaaattcttaaaacaattcattctatcctcgaccgttcatttatttcctcttccaaaccaaactaatgaggaaaatattttttataaaaaaatttgttggctcaacatgtcatccactcatcctctttccctctctctccctatcgctctcttatatcttcttgtgcatcttgtaagttagagcgcaagttcctacgtcgaccggagctcttatccagtcttctgccggcgtcgcttagtccatatttgctagtgtttatacgtagcttgaatctcctcatactaccgttgttgctcagagcccttgtccatccacgccgctccttgcctcccatattcacagccatccaagcccacctatacgccatccaaagctcttttcccctgcatgtgacacttagaggcgattggctagagcttctctactcagatgctggctaagctggtaggtccactgagaacatgacatgtcctaaagtctggatctagttggctacaagcctacaaaggcttgtctccacctccgctttcatcaagcaccacaacaatccttggtgggctcgggactacccccgattttgcccaggataccccaccctccgaaaaaaaagcccataaaccttggttctcattcaagccaaaaaaaacaagcccacaaagagagaagggaaaaagcgctaggtctgatcttttgggagtcgaggcatccgacacaccacgacgccatctcgactcctttggtcctcgccgtctttgctacgcgcttgcgtcgtcgcttcctcgccgcgccgccgtcgagccgccgccaccacttccctaactcgatctacagaggccgaatggcagagtgctagaggcaccgctccccacgccacgctgcccaggtgtgggctgcctgcgccggggctcctcacatggcgccgccaccggccgccagcgtcaggagccgggagcccaggacccctggcggcctggccctagttgatcccctgcctcgatgctttccttctgtctaccccttagagtcccgtgcttaggtgagtaaatcagtgtactctgatttgtgaatcggtgaatctgtgaatgttatttttatgagtaaattttacaaaactacatgttttgtggtccaagttgcagaaaaccacatatactttgacacttagcgcttaagtacatatattttagtagtgtagtttcagaaaatcacactatcaatgaattgattcacccgtgatatggcgtggctgttccacttatgacgaggacgtggcatcttattaccagccatcacacgaaattaataggatgccatattctcatcctaggtgtaacaactacgtcatctcacatgtgaatccatttattgatagtgtggttttgtgaaactacactaccaaaatatatatacttaagtgccaaatgttaaaatataggtggttttctgcaacttaaaccataaaacatgtagttttgcgaaatttactctatttttattggtgaatcagtgaatgtgaatgtgttgctatttggtactattgtagttgtaggatttgtaaacatgaggttgatatggaattgctcgtttgtatgttagccttaatctagtgatgaccacgcagagaaacaatatactcctatgatttattgaatcattgattcgtcacatgtatcaagtgagatatcttttccgaagttagtgaagaagacatgagaataacaacttttatagctaagatagtggcactgtgattttctatatgtgcccaatatcttttatatttgaacgtgtgaacttgcttgttaagttagtcaaatattgactatattagacaatattgttacattcctatcactttttcattaaatttgtactcgtatatgggatttaggacttcattaaatttgtactcgtatatgggatttacgacatttgaaaatttagctatatgtgatgtgtatttgtgagtaggactacccaatgaaaaattcctggccacgccactgcttggatgtcggcttgatggtggtgaaaagttcagagagagccactgtaacgcttagggctggaattgtattgggcctaatttatttagttatcacctagggttcaaaaacaatattgtttttgggttcaacttatttacttatcacagctacatatgcttttaactctcttgtgttttcatcatcattttacataaaaagtttaatggagttaataatagtaactaggtaggccaccttataaactagtgctgctctagttggctgccggctgagagaggtgggactaagagcatctccaacatcgtctccaagttaaattttagcaaaaaaaatctcactccaacagtctctctacttgaatggctaagctaaatggatggccaaacttcacctcccactagtcaaacttggccagccaaactgactggcaaattgtgggcaccacgcctttccccaatgttgatttccgccaccacgacctcccgcgccgatttccgtcgccacgagatccgcttgcggccgtgctgagggaaaaaccagggaagaggatgtggtggcatggcggcacgacggcgagcgtcgccgcagcctcccacttgtcgccgccggcatccagcgctgatttctgtcgccttgccgccgtgccctcttgagcgccgaagagagagaagaagggatgaggggcagcggcgtgaaggaagcggcggcgccagtgagatgggagacgaggtggtagaggggccagcgagggagggcttcgtcgtggcctcccgctcgcagcctggtatcgtgcaccgagagagaaagaacatacgggtaactcggaggaggtgttgtcatccgttgccgacgctgccgtcgtctgccgtcgtctgccgccgagaccgccgcctcgttgttgttcgccgtcgctcgcttgctcccaccggcctccgccgcccgcaccgctcccaccggcgccgcctccatcctcgcgccactcccgtcgtcctccgccacccgcgccgctcccaccaccgccgcttcgatccccgcgctttctcctgccggcgccgcctccatcccgcaccgaaatgtagagaagagggaagaataggagactgatgtatgggtcccactattaaattggagaagtgtaatggagatgctgtcagagtgaaacgtaaatttggttctctaaatttttggcaagtagcccaataggatatttggagagtcaaaaatagccactctgttggagatgctctagaccatcttgccgctgctgctgcttctccgtagctagcttagctttggcccaactgctattgctcgctgcaaggatgcaaggcccatggtctgctagctgcactagcactactgcttgcttgcaaggcccaactcctttcttttctagtagtattttttttcctctaattattattgggcgttacaacttacaagtacagtccacataccgcctctgctttcaaggagtgcctcccacatccaccgagcatggtcaactccttgagttcctctcttccctgaatcctgagtgtcatattctctttgggctctttctcaccatgagctcggtcgccaacttatccatacactgcgtctgccgagatccgcctttgctgccatcgctgcttccacggcttgcttcatcaatagaggcaaaaagaagatgcatagttggctcgacagtaggcgattacaacctgtcgataaattcttctttacttttttgctgactggatgttgaaagtcaaggtgacttttgcaaggaggtagaatgaacaattttaaaagttgagaagggtaaaatggacttatccttaatttaaaccatgttgagcggtgtcaatgaagtcatactcctttggttccaccacggtgcttttagttttcctgtgaataccatgattatatatgcagctattatattacatatatcacgtattttcgtagtataatctaattcctccgttttaatatcttatttggtgaaagatatatccaaatttgattttatcctcaacaaacttttacacgcaacagaaaaaaaaaaacactttgtgatgagacaggtccaaagattccatgtcccattttcaacccgccatctctacctcccttgacacatgccatatcaggaaggaccctccgccggcgccggccaatggcggcctcccacctcgctcccgggcgatggcgccccaccgatccaaagatccaacaaaatggccaccggataagctcgcgacaccgccgcggccaatggcgccacggcacacgtacgcacgtccgaccgatgcgaatgttgcgacgacgacgacggcgatgacaatcccctctccgagatggtcgcgtaacatcgatcgatctcctcttctcttttgcaaaaaaggtgaggaagactgtacgtgcggatggttgatgcagaccggtccatatgcatgttctgtgtagtattgtagtgcagtggttttgtttggccaaagagtatgcagagatggagtattctcgtaacacgataatagctatagctgcgtgcgaggtcgatgcatattggtctgctacttgtcctctgcgatggatatggagcgaggagtttagtggggtttgttcagtttgtagctaaaattattgttttttttttacatgttttagtgtacataaaatttggttgagttagatgtgtttagttcgatgtcttcttcttaaattttagtagtgtttttatgagagaacttttagaactcccaaaatttggatttccacaaatcaatttgtacaccttactaaacttttatgggcattttggattggtaccaactaccaagtcatgctctacaaattaatttgttagtagcttcaattctactcttgaggggttttgatcgaagccaaatccttgcgatatttcttgccatcagttcgagcctttctggctttggtatggatgagttatcctctgatatactccactactctctaaaataggtcaatgacatgtggacccatgtctcaagcacaagctaagactgcactacattagtttcccatgggtaccacggccatggaattatccacgcacatgtttgctcctttcgataagtagtgtgtgtacaggaaagtaggagtactcgctaaaatacttgcacgcggtgggtgtcttgtaatcggaaaatatcctgatgtccataattatcttgcacacacagacagacaacctcttcagtcaaacactcaaacatgtgcgaggacggcgtactccccgcagcgcactaacgtagtctcaagatgactctcacaagtgatgccactcattctgtccaccagcataaacggcaaaacaagcgatatcatccttaccatcttagggaacaaaaacgaccaatcgttagttagtcatcgctgcagtgaacaaacagataaagaggggaaaaaaaaagatgcaaacttgtataaaccaaaacacatttttctctgaaaaccgccatactttggtggtaggagcaagtcaccgtcagagtctccctctcagccaaacaaagctacaaacaagaacagacgcgagcaaagcttgtgcattgtttggtccagcatcgacttttctcgagaagccatctcaggagcttctggccctgaaagtgaccgcctttgctttgtctcaaacaatgcttggaaagctacttgtaacgagaggattagaatgggggtagacttggattaatgataataataagtgacctgaaaactgacagcacccaaagagggcatggattgcaaaagcatgcgaggatggacttgcctccttcagccttgatgatttttggttgtcattcaaagggttggcaacctaacttcacacaggaaaacccagatattttctcaacgattctgttctctgttgcaacatgagaattcagaaactccttttaaggctgactttaatcttggacttctaggtatcttgtttgtctttgaactcatggtcatgtgcaggaatattatactggttcaataagcatattctttgactatgaaaggatttcatagtgcaaaggagaactcctttcatatgtatatattacagcacaatccaagatccacccaaatcaaaaggcccccaaccaagcccaagtgttagcggaatgtcatccaagaacacaacaatactatactacaatgggaagccagctcaaatgcaggaaaaagaactcttgaggttgtttcacatgtgcaccaaagaggcaaaaaccactccatgcttccctatttatacacatactactagcagtatgcatacataactacaaggtagctaggtgcagtccctaaaaagacctaagcccatcactagccagcaactaaagataattaaccctacatactaatccttacaagaggcatatatatcgaagacaatggaggaactaccatctcaaaaagatttaaatctctagcaaccatttgaagcttcttattcatgccagttcgcatgtcccgtgccagtgatgaccctactgttcaagtggcgaggtgggtgactgaactgctagccgctctgatacctcggcgagagatgttaagttgcacttgatcacggcctcgacaaagtagcatgtctcgtcctttgtatttccatcaggcacgtccaccacaaatgattcaatcacaagcgtccctggtcttccatcgatgctctccggatggacagttacgatggatgagtagttctgaaggagtggggagacagaaatcagtacaaatcaaaataaagctttgacaagtcgtaaagatcatgagtgcctagctgtccataaacaagaacctaaaatcattattcttcaattaaggcaacatggtcaacttatttttcaagtaaggttcaagaaacagcaaggccacatgcagaccacactagtaggtcattgcctttcaagaaagcagacgacgtattggaattcacatcgcaaatcattaaactgaagcccaaatgaagaacagggaaaacagggttgagtttcccagtgtccattttttcattctatccctagtggaagtcaaaactactcatgattatattacttcctagaaattagtaggtcaaataatgaagcacaaggttatctatcatctgatccaatcaaaacgatggatgaaccaatgtgacttccagaacccatatccattctaaatctagataggcatgccatatgcagaggttataatgccaaacatttgctaccaagataaaacagaaaacaagatttctaaaaatactggattgcagtgagtttatcatactgtggattagtaattaagaaggcataaatgatatacttgcagtgagccaatcatactggattagtaattaagaaggcagaaataagcagagcacattatctaatctaaaaagggacaaaaaaaagcagagcagtagacagaaatgggtatcagtatcgagtggcacgaaccctgaggcggtggtcgccgccgacgaacttgacgctgaggatgtgctcgtcgtcgtcgagcagctcgagcctctccgtgctggtggtcgccgggaggccggtcttgacgttgacctcgcgcacgctgccgatctcgaggtcgccgccgcgcacgacgcagcggctgacgaacggcttgtacctctgcggctggtcgaagctccgcaccagcgaccacacctgcagcagcagcagcgatcgatcaatcgatcaaacaatcaaatactcccatcaccaacaatacaatcaaccaagcagatgccgcgaagaaacaagtcaaaacatcccatacaattttgggatctcgagcggccaaaaacacggcgaaattcgcacattcaattcgagctagtaccaatcaaccgaacaaatatctcaggcaacagctacgcatcaaaccgagccgcacgagcaccaaacccagcgccaaaacaaagtataaaaaaaattcagatccaaggagcaaccaccgagccaagtagccaaaccaaacgcaaccaatcgaacaaacaccaaacgaagaacagaaaaaaaaaagaggatggaaggcgtcgtgagtcgtggaactcacgaggtgaacaggagccttgatgtgcttgacgagcgcggagctgcactggtgctcgccgggggcgtggctgtggagcctccgcatgtgctccgcctccgccgccgccgcagcccccgccgccaccgctcctcccccacccccacccgccgcatcatccccgaccctccaacctcctcctcccacaagccccaccatccctcctccgatcacccgccgccgccgccgccgccgccgccgcgactagtggctgcgcttcctcctcctcgtcgtcgtcgtcggcctcgcgtttgcttggctcgcctcgcttgcggcgagaagagggtagcggtgggttgggtttgcttacacacgcacacacacgggcgggtacaaaaatctgcgggaggggaggagggggtggtggggcccacccacgagttatccatgcgcggaccccgagggggcgggaggggtggggagggtgcgtgcgtgagcccggtgcatggaccggaggggtcgtttttaaagggtttgcttagccgcgagggcacccatgatatttctgttaaagaaaaataatagggggtttgagttgtttgttttggttttgtttttcgtagtaggttagtcggtgggtaacttggaaaatatctttggcaccatgagggggagcactaatgtccaaggtagtggtgtttttatttgcatatagtattagggtgtcaacttggatgggtgtatatcctagtggcataagttggattcagaatgtgccacctttctaaaaagatccttttgtagcttcatttagaaaaagatagattagtactatcatatttattgggtgtgattaatttggaattttttggaatggtaaatattgaaattatcattttacaaggcatatgctaattttaaaatgtcaaatggagtaattatgacttagtgatttgtcaaattataagtatatttagtataaaagtatatactaatatattcatatttcaaagtgttctttatatcatattctaggtgatatacagacttatattagaattttattgatcatattaactttttcctattttgtaacaaatctaagctacaatggaccatataaaaaagtatagagtaaattttgttacaatgattaaactatcacaaaactatagatttaagactgtatatcgcaaaattatatatttagcaataaaattatcacggaactacatattcaagatagagtttcataaaactataaattaagtagtaacttgagtaaaaaaaacttaagttttagtatcaatttaatcacaaaactacaactttatagctccaacatgacggtaatgctagggattaaaactctacaacttatagttttgtgataccttcaatattaaaatttgtagttttcgatacttaaccttaaacctatagtttcatgataaaattatcgctaaatttatagttttgtaatataacatcttaaatctactttccccatcctatagtaagttcattgttgccttttttttccgtttgtctcaaaataagttcactcttgaatagccattgcactaaagtttgtgaaagtagaagataaatttatttatagtagataaagtagggaataattagattgaaatttaataaagtgggagtaatctagtcttttttttattggtatgtctgagataggtgaaaaatgaggttgttttgggacggaggaagcatagttttagatagtttgattaaaatacctataatttgcaaaattaattcaaaaagtataattgcttaataggaacataattctgattataaaagaaatgtactatgtaaggaaaaatcactagaattcccgagggtttctcaagagatgttaaagggcctggttgtcaggccgacagctacttcctccgtttcacaatgtaagactttctagcattattcacattcatttagatgctaatgaatcttgatatatgtatgtgtttagattcattaacatctatatatatatatgtgcaatgctagaaagtgttacattgtaaaatggagggagtattattgtgctaccgttgcatttggatactattggcgccggccgtggtgtagccgcaaaaccaatgattgaacatgtctaatgcaaacataaaattgactatgtaatcattaatactcccaccgttttatattataagactttctagcattgcccatatttatatagatgttaataaatctaaacacaaatatatgtctaaattcattaacatgtatatgaatatagacaatactagaaagtcttataatataaaatggaggaagtaagttattgtgctaggcgtgatattctctaataagtcattatgtactagcgcacgtgatattcctaaatatgagcacatttatgcatagtacgcgaaaaattattttattggtttagcggcgtataacttcaacttaaaaattgtgacaaacacagacccttgtttgtaaagcggaaccacacgaagcttcagaagcaggaaaccacatgagtacatgaccgagtccatggaccttgttcacacaactcgtgggacccttcgcaagtttttttacaatatctagataacctgccaaagccggtcgcagcgccgacttgcctattgtgccggcggttgcattcaatgcgccggacaatgacatgtgggacccacgcagctctaccccaccctgtcagtgacgtgagcgcgctgttcttttttccccgccttcgccgtgccaataatcggagggagggctctgccctttttctaaagctggtcaccgtcagggcagaaagaggcatgccgtcgaggaagagcgatgggccgctgccatgtgggccccacgcgcaagtggggtgtgggcgcgagacgacgcggtagggggggtgggcatggaccgggcctgatgagggtgtgtgcgtgtgtgggtggtgtggctcgtcgtggtcgcggtcggtgcttcacctcgacacggcaaaaaatggtgacgcgcgatgacgtcatgcaaaaggacgaaatggtttttaatacggggttactgccaccagcgtgtatcggctgcaaatacggacaggcaaaatgaatatgatttatactgatttataaacatatagtactcccttttgttatatcaaaattttaatttctaagtttgaaactagctatgtcatgtgtctagatttacagttgaaaatcatttttttctaaacggagtaatagtggatagcctacagggctgcaaagaagattgttactccttttttttttatcttttacacagttggctttttaatctacgatttgatcatttatcttatttaaaatttatgtaatttaagcattacttaatttcttttcatatttgtaagaaatctctatctctactattataaaaactgaagatgtttttgccggtattttggttccgtgtatgagtggtttttaagttcgttcacttttgaaaatacaaattcgtatctgagtcaggttttaagtttgttcgtttttagaaacacagaaggagtcgtataagaaatccctttaagaaaactcgcatgctaacttgaaatgatcggactcctaaccgtagctcataattttctagaaaaatatatatccaagctaattcttacagtgaatttcaccttaaccgtataacaataataagattaaaacaactttcacccgttgcaacgcacgggcattctttttcctagttaatagataaaaatgaaggatatatttaaaagttaactatgttaaaacataaaagtataggtggagtatctcaataattctaggagtattaattgagacatggtatttgtgtaataatttttaatagcaccatctcaggccatccccaaccctacatgtcatctagtgttcatagcattaaatatattgacacataagcaaaattttgatgtgccaagaaaattaatgaggagagaggtaaaaagatgaagaaattatttctcatgcaaggaaccacctcttcacaagtactaagaataaaaacagggggatatagatggataaaagaagagagaagagaggtgattgaataagaatttgatttgaagacaccatctattgaatatatagtagtttctatacatagattctatatcactggtaagtatggaaactacttggcagtgtctggattggagatggcctcacaatggtgaagaacgagtggacgatggggaatgaggaattaggatcgagtgaatgtaaacatctagtgttgttccgttgtatcgcgaatttataaaattaccctatacaatagtagcatagaaagataattttaccttttttaattttgtattgtctattttagtggtatggcaaatcaatataaatctgtggattttatctcggcagtatgtgtcacttgtaaattttatcatacaaaatctctatacttaattaatctaaaaaactaaagtgcttatatttcggatgaagtgagtggcatatttctatccttttacatgtttgcgtggaaaacaccctggaataagaaatgctttgctccctgccgatcgatcatgcctggctggccgcggcagtgtaaatgcatcatgagatccagatctaagcaatctatggatggatggatatgggtagctatctgcccagcattgcaatcgcttatattgccattgattgtgtttgacattgcttgcatgtcaatgaaagcaaatacagtactgcttcctccgtttcgaaatgtttgacgccgttaactttttatcacatgtttaattgtttatcttattcaaaaaatttaagtaattattaattttttcctatcatttgattcattgttaaatatatttttatgtgggcatataaatttacatatctcacaaaagtttttgaataagacgaacagtcaaacatgtgctaaaaagtcaacggtgtcaaacattttaaaacggagggagtatatactatctgcaatacaggcggtagcggcaggcaaacggcgttggtaggccattcatgtggtcggacagtaggttacctgtttccccacgggccactcgttcgcttcctggattgccctgcatctcagggagatgtatatgcaaagtatatactcctataatttttaaaatactttctccgtaaaatacttatcattctaaataattaaataatttagaactataaattaaggtatagtggaagttagggtagaatagagggaatttaaatgggagatgattgatgggaccaacagtacttgaaagtgataaatattttgagctaatttttgaatcctagaaagataatttgtaacagagatagaaatatatttttcaacaattgaccgctcgttttttttctataaaatgaataatactaaaaaggttttcatattattaaattgtatggcatcctaactataagtccagaactttagtttgtcatggtttaaccaattattggtcaaatgtgaaaccataccgttaacattgtccgttacttgaaaacggagggagtattaatttagctagcttacctcagcggcggcagtggcaggtacgtacggcgatgtccgggcgatagactgaccaggcgtaattaattggtgattatatctctagttattatatactccctccttgacgccgttgacttttttaaacatgtttaaccactcgtcttattcaaaaacttttgtgaaatatgtaaaactatatgtatatataaaagtatatttaacaataaatcaaatgatagaaaaagaattaataattacttaaattttttgaataagacgaacagtcaaatatgtttggaaaagtcaacggcgtcaaatatttagatatggagggagtactacgtagtactaagaattaagtacagtgtcatacaagaaattaacgtaagtacgcgtacgcgttaaacaattgagatagagatatgaattgatcgctaggacgatgattgatgattgtctatcactattactgctatattgctcaatttgttccccatttcggttatttgtgatatgtaaacagctggaatttcgattcggttattatactgcaggaatagttgtgcatcgaacattttaagctgcttcggggtatgcttttacgggtttcccctgatcaagtaagcgcatacacctcgcgaatgcatacccaataactaaatttctattaaagacacatattcatgtgcctaattatttgtataaactaggatttaaaccctacatgaaaattactccaccaccacactttggtatgtgtgctcggtatacatttatatgaaaatatgtggtggaaaccacatatgtagtggaaatttagaaactaccgttggatcgaaaaatggacgtccgagattcgtccacatcatcacgagcacagtaaaatttttacttatgagtaaatccgtgagtaaaatttctactcatgatgacgtggatgaatctcggacgtctatttttcaatccaacggtagttttttagtttttactacatacgttttcatatgtttttcatactatgtaaaactcgccaacaatattcacatgtagtagtagtttgaagttgaagctagtactactacggaattaattttttctgaactatgttctcttcaaattgcaaaaatcgctcccccgggatggtttaagggtgacatgtaaaaatatattttcatagacgtccccttaataggcccatctcgaagatacattatcgtaggcgtacattttaagggactgcacgtgaaacggtcaacttggagagcaagtgagcccacacgtcccaccgtatcactctttttttctctttctcatcctaaaccgcatctctttcccttccactcccgtaccctcacctcacctcatctcttccctttctcttctccactcctggcgtctacggtgtacacggcggtctcaggggcaggcgactgagacagaggcagcctcagggacgttggtgagcggatccactgcccccgccctcgagagcggcgccgacgtgcggatccggtagcctcggggtagctccgccgcccctgccctcaggagcggcagtgggagcgagcggccatggtagcagctatgacaacgacgacgacacgacggcagcggtggccactgcgacaacaacgatggcagtggtggttgcaatgacgatgatgaggaggatgagctagtgttttgagagaatggggatataggggttgggctattttttttagggatttttttcgttgaaattatttttttatacagttggcataggtgatagcatgcgcaaatcctgtctttgcatgtggttgggctacccataagaaaaaatattgatttttgcagacacctaggtgtaggcgggccgccaagccgcatatagaaatcggttttgtctgtctgaaaattgatttatgtactaggtaggtcccacttgaccatggtattacaagataactctatgtatcgagatggaaaattaccatatgaagcggtaagagcttccaaaaaataattaataatatacaatcgtgaaccatctttgtttatcacaatgctgttacactattaagaaatatctgttgaggtggaggcaagtcatggagagtagacatagatcttagttacttcctccgtttcacaatataagtcattctagcatttcccacattcatattgatatatgaatgtggaaaatgctagaacgacttacattgtgaaacggagtgagtaatacactttgctttattatttataccattatatattaatatagaataataatagcggtcaaccagaaactaattaaaaatttgtatttatattatgcaattaaaattatttctcaatatatttgctgctactactatctaatatggtcaaccggtcgtctggcactcacacgaatagagggactaagaaactaactaaaaacttattatggccccccgtaaaattttacacactgtcacatcgaatgtttggacatatgtatggagtattaaatatagacaaaaaaaataactaattacacagattgcgtataaattacgagacgaatcttttaagcctaattgcgccatgatttgataatatggtgctacaataaacatttgctaatgattaattaggtttaatgtattcgtctcgcagtttacaggcggattttgtaatttgttttgttattagattatatttaatacttcaaatgtgtgtccgtatatccgatgtgacacgtcaaaactttacatccctatatctaaacacagcctatgtttagggtttccgttatttttatcgtttagggtgatcggcatatctagtcctatatatatatatatatatatatatatatatatatatatatatatatatagtcatgattaaagacccaatagattggttggagcactatctcttgatggaatccaacaacagccagtttgattccaattttagcaattcggctagttaccagcatttacaatttatatgcagtataaaaatggatttccagcaggggcggatatatagtgttagcgtcggtatcagacgacaccgacgactttcagcaaaacttatgattaaactgcttatgatctatattgtttgtagcataatttggctaatagtttattttatttgggtaagccagattatttagtttagctgtcatgatttgaagtggttggtttgagagccgattaaatgtgtgtgcgtggatggctagggaggcttagcatttatcttagaatggaaatattatggattagctgagcttaaccatagtcaaggaaggtttttgcgttatttagtactatttgcattagcatgcagatagagatcagagaggtgaagactcgtgcagctggttgcaagtggaaatttgctatagtcgacaagcttctggccgggctgatgatcacatacatgcaggcgagcagaaatttgccgtgctctcgcttggctgttttgtgcggctgcgtattgcgcgaaggttggatcagtggcgttggtttggagatgatgaggcgtgattagcgcgtacggctgttaggaagataagggcatgtacaatggttgtcaataatggtctcttagcattgctaattaggaatactttgacatggaagaaagagaaataggagagacaaaacatcgttgttatacataacaacggcttaacaacgactcttgatcattataatatggaaatatggttgcacaagggtaaaaaaaatagaaagaatattaataaaaggaatattttttaagttaataattagagtctttgttgtctcaactattgtaaagatacggtctctaaataattttatattgttaagagaccatactcgtctctaccattgaacatgcctagatagattttctattttatcagttagttttcttttcggttggaccatggtatctgtatatgtacaggtctacggtcgattgaaggacccccgaacaaaattatcaatctactattttccttttctatactttcctgttattttctattttgttttcatggttgagttttggtaaccctagaatttagttaatctttaccgttttgcgctgaaaaacggtcgtgcttctccacgaaagcgagaagattatcctttattagtttgctcggaaactagtcgttcatcgtcacgtaagtacgatatttatcctctttgctaatttgcttgtaaattagtcgtgtgatttcacgaaagtgaattaatctcgaaatcggtttcactagcggattttgatcattccattttgacgactctattatttacaccgtaaatcgttaggtgatcttgtgttggccacgaaaaagtgtcaacacatatattataacactataatctaagtataattaatatattctgataccgatatagacattatgatacaaatgaatcaactttatagatcccctcttcgagtgaggaggcaatgatgatggtggcatcgagcagagacggccggtggtggcctatcggatctaacaatagcggtcttgatcgactcgacggtagatgaatccgcaataggggcctcaaacaatgcagcgatgggcgaacctgatgatgacggtggccaagatgttgggcaataatggcagcttcaagcaagtggactagggctgtgtttagttcagcacaaagtttaaatttggttaaaattagaaatgatgtgactgaaaagttatgtgtatatgataggttgatgtgatggaaaaggactgaagtttgaatccaaactctggttctaaacacacctagggtaccagtggccatcacctcctcccctttagtgtggctcgggaattaaggccacagcgatagctttgatctccatgggccatggcgatggctgggcggctgcgctactggcaacgacgtgatagctacgaccagggtttaaccattcaatttcgaagtaaatacagcttctcacaggtttatcgaaatccgaccgaaaaccgataaaatccgatgatttttggtcaacatcatacaaaaccacctaataccgaccggttgatctaacggtttcatgaaagaagtccggtttttgcaaaatttcatcggttttgtgaaacaccggcaacgggcacaacttaattgtagtcagggtcatggtgttcttttttattactattttatccgtactaaaatataagaaattttggttggatgaaatatatcttaggccgagtttagtttcaaactttttcttcaaacttctaactttttcatcacattaaaactttcctacacacacaaacttccaacttttctatcacatcgttctaatttcaaccaaactttcaattttagcatgaactaaatacacccataatacaatttagataggaagactactcggcttcgtaatactaggatgtgactcatccaaccaaaatatcttccattttagtacgatataaggagtacatatcctttcacgtagattgatcggaaactgtgtatattaatttgtactcgtagccattcatatcgacattttgtatagtagtgacatgccatacagtaaccaggtttatagatgaccattttgaactttgatcatcggacgtttaggaggagaaagaaaaagattaggctgtgttctttccgataacggaacgataaattaacacgtgattaattaagtattaacttaaaaaaatttataaaatggattaataagattttgaaaacaactttcctatataaactttttgcaaaatgtgtactgcttagtagtttaaaaagcgtgtacgcgaaaaagatgtggccggttgggaacccatgagaaagaacacagccttgaagatactaaaacgtggcgagtcattagcgtatgattaattaagtattaattatttaaacttgcaaaaatgggttaatattattttaaaacaacttctctctagaatttttttaagaaaatacatcgtttaacaattcagtaaccatgtacgcagacacagctttgtatttctaaaataatgtcaaattttgcatacactttgaatatgccagtgaaagaaaaaagaatctaaacatgggaaacactaataagtaagtacgatactggcttcatggatatatatatatatatatatatatatatatatatatatatatatatatatatataactcgatctactgtggttcaaatcttgacaactgcacacacgcatatatggttttaatagtaatttagcgaacccttttgaaagtaatgtagtgaagttaataaatgcatttattgttaaacgatttgcactcatgggtgaaaacggtagggaaatttccgagatttttagctgccgtttccagtttgcaccgaccgtttcagtcggtatcggtaatcgacggtgatggaaaaggaaacggtaatatctttcagaaatagtagcggaaatgggatggaggtttttctgaccgtttggtcgataatattatttgtacggtaatttccgtcaaaattccgaaacttctccagcggctaagccaacccaacccatcgaaagcccacgaatgaaggaagcttgatagacttgcagcctatgaaaaaggaaagtgaccaaggaaaatgttgtaaaccctatgacgtggcatgtgtattttgctgaactttggtcttttccaattatcgatgttgaagtattgttgaacttgactatattgttcgtcacacttattatcatatcattaatctaacagtgttatgctgagggtgataatgcaagaataaagttaaaatgtgtgctatgccaggctccgctgattccgacatgaattttcgacttccgaccagtatcggtatattctattctgacggtcccgtttccaatataccgatattaccaatatctttttgggtctaccatttcatttccattttcgagaaaaaaatgaaaataaaatcggtatagggattttccgaccgttttcatctcaactcatgggctactgtgaataaggtgtgtgctgatatgcggtaaccagtacagagaaagaaaattctgaaataagcttgtgcaattacccgtttatatgtccaagttcgaatagctactacccatctcaaaatgtaacatgttctattcaaatacattttaaacattttatattttaaaatggaggttgcatatatttgagaggaagggagcagaacaatttcccttctgtaaattatgtgatgccgttgtgtctctttaaaaaaagaactactggagtacccgtgatttggtaggccttcaattctcctgacagcaacatttgctcacaatatttacgttcagtcaaaggctttgaatgggtcccctttcctaggcatattccacagggttaactagatacatgccattaaaaattcaccggttttgaaatataccattactatttgcgtatttggaacgatgccattgatatttgtttgtaatttcagtggtgccactaagacacgtattttgcatgtattggacgaaaatgccctcatcttctacctctctccctcttctctcatcttcaagctctctctccccgctgcttcaactccggcgccgtcaccgccgctgctgctgctcgacgccgctgctgctcgccactcgcgctgctgctcgccgccgctccgcatgctgctgccgccgcaccgccgctgccgctcaccgctgccgtcgctccaccgccgctgccgctcgccgctcgcgccgctgctgccgttgttactcgccgccgctccgccaccgctgccgccgctgccgttgctgccgccgccgctccgccgctgccgctcgctccgccgccgcctgttctctgagctgtggaagaaaggagaggggagaaaaagaagcaaagaagggtaatttggtctaaattttttcgtaaatggtaggtagtggcatatcttgaatatgtgtaaaattgtaatggcatggttccaaatacgtgaatactgatggtatatttcaaaactgataaatttttaatggtatgtatctaattaaccctattccacatcaggcatatccattttggtggcactgtcataatttctcccatcagtgcgacaggccaattactcgcaaacacacaacagcacaatgagagcgaacacagaccaaactgcaatttgatatatgtttgggctccacatttaagtcttttttacttgagcatgggcatcatctcagtcagatggttttcattgcttaggtggtgtttgatctatgactaaatttaatttagttcccgtcgaattggatatttgacgctaattagaagtattaaatatagactaataataaaactaattatataaataagagctaacttgtgagataaaatttttaagcctaattaatccataattaacatatgtttactgtagcataacataggttaattatagattaattaggctcaatagatttgtctcgtgaattagtccaggttatagaatggattttttatcattagtttacgtttaatacttctaattagtatcaaacatccgatataacaggatctaaaatttaatccttgatctaaacatggccttaaagccacgcaaatactttagcatgggcattgcgaacaactacgcatatcaggtatctacacgataggtttatccgactaccttatatgaccctataagataggactacatataaaatggtatgtaaaattgtctgtattttactagtagttgctaatagtagttggttttttagggactgagagtataccacaactcgattatcatatatcataatacacttaacgaatacaaatcctcaaataacaattgggtattacctctcatcggaagggtttggttctgtctaaatttttgttctagcaatccatttacttttagatctagttcactgtccctttaatacttaccgatatagaacatcaacaggcatccattaatatcttcgaatttattttctgaaatgctttcctattattgtgccccagctcagctcttgtttttgaaatttagtgacaccaaacctcaattttcccacaagttccaccgtccttctgacatttctatatgacccttgtctccttcctttgaaaggtcattattcccttgttacaagcagtcagtttctgagaaattaaagtaggcccttgtttagttctaattttttttttcaaacttccaacttttctatcacattaaaactttcctacacacataaatttcaaacttttccatcacatcgttccaatttaaccaaactttcaattttagcgtgatctagacacacccctagatcatgtagttcggcctcattaacatcggtgaagctcatcatcttgtctggagcccatcgtttccatcggttcctgtatataggagtactatatatagatccgtctcaatcgctactatagatcaacggtgtcaattttagatgttgcttcaagctacattctcgctacttcatcatgaatgagtttagatactccctccgtcccacaatataagggattttgcccttgtcctataatataagggattttagtgtcctacttatcacatccatcaattccaattcaaaattttacccattttaaccctcaactacgcactcacctataagcaaatatcatttaacagggacattctagtattgtcttgctatccttaaacttatccaaaagggaataatccctcatattatgggatggagagggagtatatcaatcgtgctgatggccgtaccataaaaatacaagcaaccgtcaacatcgatcatgtcgacgtttgatatcgcaagtacggtatttggggatcgttggtaccagggtatatgcgagattgaggtaaaagagatggagacaggggtttttatataggttcgggccccatatcttacaggtaatagccctatatcctgttggccgaagccggtgttgctctttattcatctggatcacacaaatacaatatctgggataacctagctaactgtcgtcgacttggcggctagataaccaactcgtagtcgacggcagggtggtcttcctcctcgaatacgaactcggcgagatcagagataacgctagatccctcttgccggcctccgtaggtgccggatggggtatggctaggctaatttctgatgtcgagatctgacggcgtattggtttgtgttggcttgtggctttgtggcgtctatggtgggtgtgtcctctctcctcctagggggcttgtatttatacccgtagatgccttcttgtctaagtaagactaaggagataaatataagtacaatccgagtagtcattgtcgttttcatatagaactcttcttatccttccttatccgaaactccttttatatatgatgtttgtttccgtataagtcatggtatgtggtgggtcctgccgagtttagtcaactactattaggtatgtggtatccataaccctgacagatcaattaatccaacatgtaaaagcactagggataattctatttcttgttccttaaatccggaaatggtttaatttaatatcgtgcctcaattaactcatttaaatcggacaaaacttttctcttcttttttcgtgtcatttggcaaatgaccacatggcgtccatatgggatccaagttgaccgtagagctagctttctataaaacgatttgacttgattatagaaaaaactaaatcccctttattgtaatttttctatctctctctatttccctccattataattaagcgagtgccagtgtgccaccttccacactgtgtaaactccacgtatatagtactctctccgtttcacaatgtaagtcattctagcattttccacattcattttgatgtgctataatgactttaattgtgaaacggaggaagtaggtcaaaaccacaattgaacgaatggaggggcatatttatctgatttgaaagctaaaagatgacacaattagacattggcaagagttaatggacgtatcatctagacgactagactaaaatttgttctcctcttaattatgtttgttcctcaaaacaagtttaaaagtacgtacttcctgttaattgctcgttcattttaattttcatctcttccgtatcatccgaaaatcatatatacaatcttttttatctctatagtgggacgggtctaatatttacctggtagtgaaaatcatctttagtaccggcgcttataacagcttagatatttgcgttttgaaccgttcgacgaaatatcaattctccccgtagtgttatcgattcaaatcatacgcacaaccagtcaacacgataatttgacgcaataataagctacaattatgcacgccgttccatcctagctgtagcttgcatccatgagcgcatggcggcctttcatggaaacggaagggcaagcaaacaagcaaagccggtaacatgccctgacgtaccgtacatcatattgcacacaacgtgaccggcgtgcaggggacccacgcacggaaaaaaggcacacgccaattggctctctcgttaagccgaccatccactctgcgtgtgccagcgacgtaccctagtgccccgtcctatctatctgtaaattaggttatgtgaaaaagctagtactgctcctagctgcaccagtttgattttggtcctttttccttgctagtgttattgcccctttatccttaaaaaaaacttaggatccgattagacattttctaatataaggtatctacacagaaaatatcttatctagtaataagttcttatattttaagatagatgaagtaataaattacaactgtaacgttggagaaataaattatatatatatatatatatatatatatatatatatatatatatatatatatatataagacttaaatgcctctcgttaaacgagtggtggctaggggtaagatgatggtggttgtttgtttttttttctcgtcgtctctataacatgaataagaatgtttttgtatttttttcgtgctagatgatagatggctgctactgcgcaatgtcgagcccatctcaccacgctgctacatcattccatgattccatcgttgactaccgctcgccacccaattgccctctccactaccagtcacaagacatagaacaaccgctctatccttatagcaaaatccagcaaagccaccaagatccaaatttcatgatggatttttggctgaatcatttttttattttctagtttgatttacctgcgagtaattttatcacttgtgtgtgattgagcctgtaattttttcattcgtacggccattttgtgatatagattaacaatactcttagtataagtttttactcttatattgtgtattgaaaacatcagtaaacatattactaaatggtggctatgagatcatgggctatatcgagagaaatgtggtaattgttttactcgcagatcacaaagtctcagtttttactcttatattgtgtattgaacacatcagtaaacatattactacatggtggctatgagatcatgggctatatcgagaggaaggtgtaattattttactcgcagactatgaaatgtaaacaatatttataacactagtaaaagaattactagcattgtaagctagtagtaattcttttacgaccatctaggagtgtcgtataatgttggggtatttatgcaagtaaatttgttacttttgaagggggcattcatgcgagtaaatttgttacttttgaatgagcagatgtgggaggctaggagtaaatggaaaacttaacggagtaaattcgttacttttgaaacgtgagacactagaaaaatggaaaactcggaaagaaaaactagacggtaaatatttttctaaaacgcaaaaactgaaaaactggagagaaggaaaaaaaaggaaaaatctggatggttaatattttactgggccctttgatgaagcatggataagatggaaaagtgaaaagaagtatggaaggtgatgtggtaaaaaatgaaaaaaaaatgaactaggaaaggtgggataagaagtaaacgtggggtagtaaaaaaaggaaaaactagaaggagggagcgttatgcggcactcgaactaatattctgcgcgcaacgtgtggattagcgctaccactaaaatataaacacttttatcactatttacagtcatgtctgtcatccatcaatcacattctatttaagtttcttttcatatcttggatttccctccaaccccaaccatctttcaaaacgagatactccctatatcccacaatataagttattttgggtggatgtgacacatcctaatacaatgaatctagacagacgttttgtccagattcattttactaggatgtgtcacaaccatccaaaatcccccctccatctcataatataaggcgtgagcgtatttcaagattcaaactttaaaacatttgaccaacatatatttaatgtaatatgaaataaattttatttgttaaaaattatatcattaggttgacatttaaatttactttcatatgattataattttgttgctacaaaccttatagcatatgagaaattataagttaaagattagttttggagactgcgtaacttttaccatgtcttatattatgggatggagtattatattgtgggatggagggagtaccaaagtataaatctaaacacttttaatgataaaataaattaaaacaaataatattaatgtaattttgttaaataaaacgaacgatcaaatttcatagttaaagtcaaccgcgccgaatatgtatgactggataggtgtagtttttccgtaggccggctgatgtttatccatgagcacattattaaccgttgatttttgctttttcttaaaaaagatttctctccttcattgcacttaacatgctcaattgcattgctgacatagcaacatgcttttcaataggtgtaatttttaccaatccaagagtcgctttaattctttcactcagattttgcaccggccatgacggccttttctcagctgggataagtacataattcgactgagaaattatgggtcagacaagcagctttctctctagttcgatcatgtcttgaggtcggcacaacatcttttgtctccttaaatgccggcatgcagattgttttcttgagcataggctttttgtttagagaaaatcggtgtccaggttatttcaactgcatcaggatttctctatctcaggatcagacgatcagtcatcgtggtgtaatttaatttcctcgtaagcttttcattgatccatccctgacagattactaaattcacgaactgaggaataacttccctttaaaaattttccttgtgataccactgagacatatactaaggtagtcaaatttttttttctaaagtgtagctattttttcaactatcctattttctcaaccaattacaaccttcttccatttaatttctctgcctacattcttttgttaaccaatcacattccaccactcaatttcatatactttttaaattcccgtaaaatatctaaaagtacttacattttaggactgggtgagtaataaataagctgaacaatatatatacgtgccatatagactaaagggcccggttgcgttttgtagagtttcaactcttaaatttaactcctgtggttagatacttagatctagagtgaaattgtgaagcagcctaaacacagatccatttctctagtttattatatgagaacactccagctatcttcactccctttttaagtggagctaaaaccgcttgattaggctttagctaatagaaaggtggagttggagctagatccgtgtttgggatggagttggagttggatccatgccaaacagtccctttatattgaggagggaaagaagggaggagatcaactccatatgtacgattgttatttggccaagatatcacgtaccatgctccgtatcaagatatattaagttctaatctttgaatggttatcgaggagagtggtattttttttaatcttctggggatagttacgatgttattacattatataatagtattgtaacttatgtctatgtctatgttactgatagaaaaaaagaaccctttgctcggttggctagtagcgtacatgaggtcgctaggtcgaatccttgcatgagcgagctaccattttggctgcaaaaatgcagatctaatagtatacaaatggaaggtttcctttcagaaaatctagcaaaaccattttcttgttcgatcttctattcccaagaaccgaagaaactaagtaatagaagtaggagtaagtccacttgaagtccctcaactttacgtcgagtttgattgatatccctaatcctaaaatcagaaattttcattcttaaactgtacaaaaaaaaaagcatacaacttggtctcacggcagtacataccctattcccccctttattttctcttacatggcatatgtttgggcccacttgtcagtactttgagtcacccgtgctcgtgtttgttctctcttgtccccatttgctgcgatgagccggaccgtcactcttgagccagaccagtcatggagctaggccgcatgcttcggctcgttgtgccgctggtttgtcactcccgtagagttctttttccgcaactgacttgtttctcttcatgtgcgacccgacaaagccgcatccgtgcctcgaggttggagcacaaggccaccataccaccaccacaccgctagtagcgagatggagctggcaagaagagaccccaacagcagacggactagtggtggcaggtacagcgtcgagcagtcgtcatcgccgtcgctgctgcaccacaacgaccccatcgggaacccggaggcctccttcatcccaccacaagcacggaccaagagacgcgccaccgccccctacaccggctcgccgtaccaccgccacactacttatggcgagacgacaccggcaagaagaggccccaatagcggatagaccagcggatgcgggtgcaacatcgaatagtcatcgtcgccgtctgaggaccaactactctgagagcggcaacagctaaggcgggctcgtcgcgcgcggcaacaaaacagtgattgcgctagcaagcttcatgaccatcaatggcagccgacaagggggtcagcggaggctagggccagaggcagtcgttctccatgcactggcagtaggaggtccccgagccattgccgtcatgtccgactaccgcaaatgccgcagggctgcagccagtcgccttgccggcgtggtgaccaaatcagcggtaaaagctgtggcagaagaggatcgacgggagaagaagaggagttcgccgtggaccagtgctgctgctgtctcctcctacgaacgggctcaccggccactgccactcccttggaagaggagatgaggggaagagaggagagtagagttggccacttacatgtgggccctatatgtttttttaaaaaaattttattcttgctgactagaatgcgtaaaaccatctatccatactgccatgtgatctaattttacctggttttacaagtcggagggtcaagattcccggtattgacgttcagggattttatttaaacttgacggacgtgaagtggacttgttccttcaaagtacccccacattagttcacctaaagcccaaatcttccaggccatcgaactacctgcccacccaatgtcaggcaccaaaccaggcccagtcaccaatcaccatgcgccaccgcccactgctcttgtcccgcgtcgctggcttgtggttccacaccagtacaccatcgccttggcaatttggcattgatctcctctccagtctccatgactccagaggctcttgggcttgccaacagcgaggtcagaaaaactgaaaaacctccaccccctatcttgatctggtgtcttgcgatccgtatgatgatttttctaatccgtcgttgcgtgtttgaatttcactgtgagttgttgccaggtttgttttgtaaaaccgtaaaccaaaccgaaacaaaagcaccgtttattcggtgctgtttgtattttcctgaagagtatttctattggcaattttagaaaatcgaaattatgaaaacccaagaaaccaaacagaattatccgtataaaccgtatggccacccctacatcattttttatttttacaatcgccctctaagatgaaaacctaaatgtggtatttttttaaaaatacggtacaaacactggtgctatacatgcatattcaccctgttaacgtgcacatatacgctctatttctatgagtatcttagaaacactggaccgttatatgtttatccttataaacacgttcgaaagactgggccggcatattttgagagtgacaaaattaccacgataactccataagacaggtaagttgtttaacactaaaagaataattagacataatgcgagcatgtttaggacttaaatccggataagctgattcaccccaaagaaactaatcggttaagctcggttgcgttggttttaagaggacttaatagagccctatagctgaaaaaccaaacagtggtgggaagaagggataaaaaaaatgctagtatgccactagtaaaaaacggtttttacatacggtccaaaaggggttcacgcatgcggtatggctaaccgcacacaccaaatggtatgcgaaaatcgctacttttacgtgtgggtggtgcacctatatgtgaaaatcagattttcgtgtacgggcgcataagctgcccgcacggaaaaatggaaaatctcaaaaagaaaaataaaaattccaataaaaaaactaaccctaactctagtcggccgccgccgtcgtcgtcgccagcggatccgcctctcccatcttcgctgccggcggatccacacctctcgtcatcgccggtggccgatcacggtgtgtggaggccggatccacaccaccgccaaatttgcgcggaggaggatgggggagactcgccgccagcctcccactcgagtccgccaccactgtcactatcttccaagcccgccattgatcccgcgccctccgccgccggagagggccaccatgcgcgggggagcatggaggaggccgtcgggaggagcggggagaggaagagtgggtgagggtgggaagaggagaggagcgggtgaggccgggcgagagagagagagagggggggaggagagaataaaaaaaatagtgggaagaggaggggtatttttgcatgtgggtgagttaagagccctatgtgcgaaaatatccttatttttacatgtggacgttataagtggttcatttgaaaaattaatttttgtgtgtgggtattataaagagccgtatacgaaaattgtagacgcggacacttatagcctatttttaacctattagggtgtttgtccataaattttattttactagtgtgccattgccatgtagaactcgtgttctacattgatttgtagaagaggtggctggtgaacgagaatttctcttaaaaagaaaatgaaaaagacataaatgtaacacaactgcacaatgcctccgtggtgcacaccaaatccaaagccctgcacacccacagacctgcagtatcagtaactgtgcgatggaaaccgagggcggaagcggcatgacacgcgctaggattagcaaactgaaaaacaacaaaaaaaacacagtttattccgcacgctctgaacccaattttaataagataatcaagcaaatctcggacattcggtaacacgtataccctggtgccagcgtactaataatcccaaaataccgtgatcggatcaaacccatcgacaatttctaccattcaaatatctactattataaaaatcaaaaatatttttgttagtattttggtacgtcatctatattttgatgtttgagttagttttaagtccgttcgcttttgaaaatacatatccgtgtttgagtcggattttaaattcatttgcttttagaaatatgaaataagtcatataaaaaatctttttttaaaaaacttgcatactaacttgagataaaaatcagactcctaactgcagctcgtgattatcttaaaaaaaatatccaagcgaattcccacagtaaatttcaccatagctaaactgtataacaataataagattaaaataacattcacccgttgcaatgcacggacatcttttcaagttttgtaaaataaatatctgtctttctagttagtagtcacgaaggaacccaacaaatttaaatatgggatatattgcctcctagcctcccatttttccatcccaatctcaaacttcttttgaatcaagtttaggtatgaaatgtgtgcgtgcagtgtgatctcattaaatataactattgtggtcatttgtgtatgctgctaatctgtctctaatttaattttattataggacggatgttgcagttaattaagtgtagtggccccgtccaaacttgggtctttgttgctgggcattatttgcttgcaagctcgcaacacatatacaggtatacaacacgctaacccatcagttgtagggaaaatatggacgtatgagagtagttcacgtcattatgagtaaaaattttactcgtatatttactcatgagtaaaagttttacttggtgatgtagacgaatctcaaacgtccattttacaatccaacggtagtttttaggtttccactatatatgtgatttgcactatattttccctcagtggtatagcacagtaggcaacgacattccagcttctccaagccaatcagcaagcggcagcatcggcgcatcccagccttcgtaggtgggcagcagcaaattgctcagttcgggttacgacacaacaaaaaattgggtgcccaagttttttaaaaaatcggtcgtactagaaaaaaaatattttaccactagataaaaaatgtttcaccttgttaaaatgctgaaacacattcaaatcatcactaaaatatttcattcacaccggagggggagagggaagtgatacaaaggagaaagagatacaaaggagaaagattagggagggaacagtgatgggtgcaaaatgaatggttgagagggcccaatatgtttcttatccgccgggcccccatgagagagaatttttacaaatcgaaacaactacatatcaggcgtttccctaaaaatcgggtgttgtttcactgctattagaaaagtgtttcacctttgttaaaatgctaaaacacattcaaattatgactgaaacatttcattcacaccggtgaagcatcaacagattcgtttgcatcaaggagctagttaagaaacacctctaatagagaaatgtttcgacaataagataaaaatgtttcaatatattaaaatgatgaaacaaagttagatcaaagattgaaatattttgttcttcacaaatgaagcatcaagcttcaaaaactgaaacatctatggatatgcaagaactgaagacaaaaaagtgaaacaatatcaaagtatcccatgcaacattttgatctaaccccaagaacatcaagatgcattagctgaaacatcgaaaaatcacaaattttgccattttagatctagcttattcctcctctccagtgaccaccggtttcttcagtctcatttgcaaatccaagctagggcaccatgggcccttctatctccaccaaagctgttgaccatcaccccgtcattgccagtcctagccctcagctatgtcgttgttgctactcgggcaaacggaagctgcctcagctccagattacggggggcctgtcatcttcctccaagctccccggccttaagctatgttgcgagacctagtcggtgagccacacgggaggacgtccccactgcttgtggcagccaccatgtctgccgctccacaagaaccttagtgggagagggagagaggagcgatacaaaggagaaaaagtagggaggggaaaagtcacgggtgtgaaatgagtggttgagaagacctgatatgtttcttctccgcaggacgtccaagagagagagagcgtttccgcaaaaattagacattctaaaaagtaattaggaaaacaattaatttttaaacgactctttgcggtcgccattccttcgagatgaacgaggctcaccaccttaggaaggggaagtttaggtcatttaattctcagggcttgattatgtgtcgatatttcctattctgcatttagttactgaagatccagaacattatattaccagacttaacacttcttgggcgcatttttaatcaacattatttattgggtccatgattctcacgagcacttctgaagttatgatcgatcatgagatgctttgatgattgtgcagagaagatttgatcgagtgactgatttttagactacattaatagcttaactgatcaagaactaaatatgaaaaatatgttctatgatttgatcgatcgatctcgagttatacgttatgacatgtaaactccagagaaaattgggatcaggatatgaaatctagtattagatattatttaattacatactctagtatgaaaactatcgtgcaaatcgggatactcttgagctggccaggatatttttcctgtaatgcaaaaataattacgaattacagatcaatgacgtgcgcccgtgcagatgcaatggaaatatatatcggccacgttgccacttcttctaatataataaggcaatgtcgttgcctactatgcacgatgtgagctaatcacacgaagtggacaacaagttcgtcatgtgatttgttgtctttctcctttgtgtgtcgaatgacagatctcacaattatccaaaaaattttacaaaaaagcatttcactgagctttgtgcgtactccctccgtcccacaatataagagattttgagtttttgattacaacgtttaaccactcgtcttattcaaatttttttgcaaatataaaaaacgaaaattgtgcttaaagtacggtagataataaagtaagttacaaataaaataaataataatttcaaaattttttgaataagacgagtggtcaaatgttgcaaacaaaaaatcaaaatcccttatattatgggacggagggagtaatagataagccaacatatcgatattacattcgtcttcctaaataaaactaacatttatatttggttgtgaatttttttaatattaaatttggaccatgatatacttttgcacatttccattaaaatttttagtaagataaatgatcatatattacgttaaaaatcatcaccatcaaatatttaaaaactgagagagtagtttggaacacatgtttaagttacagttcatttaaacttgaaatgttggctattattattgatcccgcatcaaaaatcaaaggcgtgatgccacattttagattatccaatttacagtacattgctgatacaaccgtttttatggaccgccacttcgaaaaagcaaatactccatccgtcccaaaatataagtatttttagcacagtgccaagtcaattattttcaaatttgactattaatagcaaaaaaataaaaaaaaagattaatcatgtaaaattgatgttactagatttatcattaatcaaagtattacaatatgcaactctttttatttaaaacattttatatttatagatattgttggtcaaagtagcatctcgaagactttgtcggagtccaaaagctcatagtttgggacggagggagtaatacttatctcaatctctagaaacttatcaggactaaaaaaatcaattttcaaataagtaatgttttttttttgtttcggtaaagcaaagcaaatactggacccatggttttaaggctagctattcactcaatgattcttgccgataaaattcatcacaacaaaacaaattagagtctggaggtatagatttgttgagaaaaaaggaccgtgaataaagtattagacctaattaagtatatacatatgcaacatgtaatatacctacatgtattgaattcagacaacttttgagtatgtacttcaatacccaggagcctccctgtgcccaccccggaagcaagcaaacaaggaagaacaataccaacagcattttgcatgtaaaatgggtagatatgttagcattcctaaacatttctgtaaactctataattcaaatggccaggaagaccaagagcattttgactgtaagatggacagatatgttggcattcttacactacccattttctataactcaaactagaaatgggtcgaggccagttctgaattataaaattagtacaaaaactaaaataactaaaatatatatttctccaaaaacgatttggaaaaatcatacataaatttaattatgataaattgtgatttgttcagatttaagcatgacattgtgcttgtaagttatatgatattatatggagcatgtgatgattttttaggttttcttttaagtcatttactaatgcaaacatagttggggtctagcttgggccaggttgtcaaaaaactagtataaagccacacagccagaagctaaaatttccatccataaacacatcagactgccatctccctcaactagttgcaaaatcacacgtcttctacttccatcagccatgcctggagcagctactgccgcagttgttgacagccgccagtgcaaacagcacgcggaaggccctgctgcggtcctcgccatcggcactgcaaaccccacaaatatcgtctatcaagatgggtttgccgactactacttcggtctaaccaagagcgagcatcttaccgagctgaaggacaaaatgaagagaatatgtaagcacatcgatccttccacttcaatcgttgcactgttcatcattatcatcagttattttctgtcttgttatggaaaatgcttgcataatatcctatatttttgttttgtaaatattcggcaacttaattgaagtgtctcctgttattcttataacctcatagtgctatgaactaattgtaaaagatgttggtatttccttttcaggtcatagatcaggaatagagaaacgctacatccaccttgatgaaaagctcatccgtgagcacccggagatcatcgacaaacacatgccttcccttgaaaatcgcgtagacatcgttaccactgagatcccgaagctcgcggagtctgctgcacgaaaggccatcgccgagtggggccgtccggccactgacattacccacctcattttcagcacctactctgggtgcagtgctcctagtgctgacctcaagctagcatcactacttggcctcaacccttctgtctctcgcaccatccttagcctccacggttgctctggaggtggtagggccctccaacttgccaaggagcttgccgagaacaatcgcgatgcacgcgttctcatagcctgcgccgagttgacgctgatatgcttctcaaacccagatgaaagcaaaatcgtcggccatggactatttggggatggtgccggagcaatcattgtcggcgctgacccattggtcgatggagagcgcccgctgtttgagatggtccttgcctcgcaaacaacgataccaggtactgagcatgcacttggcatgcagaccacctgcagcggcatagatttccacctctctatccaggtgccaatgctgatcaaggacaacatccggcagtgcttgctcgacacattccgatcggttggaaacatgaatcctaattggaatgacctcttttgggcggtgcaccctggtggccgtgcgatccttgacaacatagaaggcgagcttcagctgcagccaacaaagcttgcagcaagccgccatgtgctgagcgagtacgggaatatgagtggcacgacgattgcgttcgttctggatgacttgcgtcgccgtcaggagaaggagggagatgagcatgaacaacctgagtggggagtaatgctagcctttggaccgggtatcacaatagaggcaatggtgctgcgtaacccgctctcttgaagtcttgtggaaaattaattgccactatcttatgcttctctggtatcttattacggtatatggcaataaattaatgcatgacactatatcaattgtccatgcttaagtgggattatgacctaccagtgatgtattgatgttgtggaattcctaccgaatgtttgtgaagatatttgagttgtcaactactcaactctagtatatgttgtaattaaactctttattgctttaatatgctctttgattgttaagttttctggatttgtaaaaaaatgtaataccatgtgtatatttaaaacaccatattgtttatatggtttgcttcaatccgagttttgatcaattgagatgtatttttaaagagaacacttcgaaagtgcatccaggccttaattattttggtggttaataattacagttctaaattattaaagagtaaattgcattagctgtacatgaacttgacaggtaggtgcaatttagtatatgaacttgtaaaatgctcgttttggtgcataaacttgtctgatacatgcaaactaaggctaaaatggcatgacaagaccgatttttctatgttgaacattataaattataaattagtagatgacgtgcatgcacatagtagaaaggttatatttataaacttagtttccactttatctttctttgtttctatcctttacatcattactcagttttttatttttttatgcaatcattatgccttattatgtgtttatccttcttcgatacatatttacatagagtttaaatcaacaacaaaatcaacaagattaaccttgccatgcgattttgaccttgttcgcatgcaccaaacaagtttgtgcacccaaacgagtgttctacaagttcttgtacaagattgcacccacctaacaattcgtgtaccgctgatgcaatttactcattattaaactagcgacggaactaaaataaatatttctccaaaaatgaattggacaaattagaacttccataaattttgttttctcattaaaatgtgattttttttatatttaagcatgatattatgtttgtaagttatatttgaacttccataaatttagttttctacatgatcattgtattgcttgagatagaaatagaagaaaaatatattcaattgtgtgctagatatcgtgactctaatgatatggcttgttatgttgttcttactacacaagttgataatgatactgttgaaccatgttctaattctaaagccatctcatgtgaaaattcttctaagtggttgactgctataagtgaagaaattgagagtcttcataaaaatcatacatgggatttggaaaagctttccaaattcttcgaagtgcaaatggattgataagaaggattgtatttctagagttaaatctgcaagacttcaatgaggtattaacttcattgatgttttgaccaaagggaaggtattaacttcaatgaagtttttttatctgttgtacgccacttctccattcgggtgatgattgcttttgttgctttatttgacttggaattagagcaacttggtgttaaaactttcttacatgttgatttagaagagaagatttttatgatacaacctgaaggttttgctattctaggaaaaaaacatttaatttgtcatttgaagaaatctctttatggtcttaaacaagctcctagggagtggtataaaataatggattcttttatgattgcacaacaatattcatgaagcaattatgataattgtgtttacttaatgaaatttccccatggatctttcatttatttgttgttttatgctgatgatatgctcattgcttcttatgagaagtcaccgattaatcagtgtaaggctcaatttagatatgaattggagatgaaagatcttggtctcacaaagaaaattattggcacgaaaattcagcatgactgcaaggctggtaattatttccatatcagaaaagatacaggtataagatagttgactaatttaatctgcgtaattgcaagcttgtttctacaccttttgtttcacattataaattatcttcaagccagtgttctattaatgaagatgacaaagattacaaatcgcatgttccatatgccagtgctgttggcaatcttatgcatggtatgatttccatttgcgcagatttagctcatgaagttagtgtggttagcacattcatgcataatcctggcaaagaacattgaaatgttgttaagtggattcttcgttatttaaaaggtacttctaattttggcttaatgtttgatatgaataaggtgaagatagatgatgttgtttggtttgttcttaataaaaggtctatttccggatattctctttgtgtggttctgctgtaagttggaaagcttcaattcagtctgttactgctctttccaccatagaagcagaatatatttctactactgaaggtgtctaggaagctatttggttgtgaggtcttattcctgaagttggtattcagtaggatgttaatattgtttattatgatagacagggtgctatttgtttgaccaagaatcatatgtttcatgccaagaccaagcacattgatattaagcaccattttattcgtgatattgttgctcaagggcaagtttttatgaggaagatacatactgatgacaatcccgtagatatgcttacaaagttactctcagtaactaagttcaattattgcctatacttagtaggtatttgtggtacttagcagcccttcagggttttggagacattttcttctacaacatatcctatatacctatacaaatcatccccaccactagaaattctctgcttcctggtgcttccacgtcatcattttttcctcatcattttttcctaaccgttggatctaatctaattgatccacaccccatcccggcatcccgcatccgcgtacgtcttccttcccccgcgtctcgctccgccggccccaccgcattgctactctctcacgcgagcgcacccacatcggctccctctcccgcatctctctccgccgcccccactgcatctccctcccagcgattccttgcccaatcactcctccctgtctccttggctcggccccgcctcccttggactcccgcagctgccatggaatccaaatcgatccactacgatgcagtgtctttatcacttttcatccccacggcacaccatgcagtgtcattgtgtcgcttcttctcctaacccctgcaacaaatcgatggggccatggtggcgactcgagttcggcctagcgcggcgcggctcagggatttgggtcgcttcttttctttcatccgccgtaaaagccacctggaagacgaactgcgaggaaaaaaccgtcaccaccatcaataatgggcttaattccatttattccctccctacaattcatcctccgtttagatgaacctcaagcaccatcccctccagctcagaaggcagcgtcaacagtcgggaaatcctctttctgtattttcatattttgctaatttcaatttgtgcttgcctgcaacgcagggggttccgggctactggtctctcttgcctcgcctctttggagtaggttacagcatcgacgattggacggcataattaacgaagcaagagacgagcaggtggtggagagcggaggaggcatgcatgctatggtcgatgggcttcttgcgcgagacagacgaagcaaagtgcgaggtatgaagcgggttttctttgctacgctcttacggctattgaagcttaggcaaacttagcaggctttcaacgaaattatgactatcagacagtcaggctgtaaaatatatatattctcttttgccctacactcctactgtacaacacacatccttctccacatcgattatgtttggattttactattggtaaggtaagcaacccaacatatcgatctactgagggatagcaaaccgtaaagataatcaaactatgttttcattaaacatgcgcttggcattttgccttgctgtaggtttctgtcatttgattttctactgtattgacacctgaaatgtgctgctctccttctttcaggtcatgttactaccgtgcaaacaactactttgttgcctaaataggtgtgttttctttttttggataaatatagcattcatatatttctatgtgaagttaattagttttattcaactaaaataggatagctaaatgtacattcaaagagatcatcatggttgtctctgaaggtagagagaatcccttatatgccactctaaattaaccagctcccttatatgccacttcaaattggcttctctcttttatgccaccggttcaagtttctcctcccttttatgccattgccgtcagtccaccgtcagttgaccgttaacttcattgtaaaaagacgcatttgccctttagaattagtatacaaccaataataggtattttagtactaatatagctactagatacaacatatgaaaattgatttttttctgcatcacatgcaattttagccattaccatcacaaataaattttcaatgtaagcatgaaacatgcagttttccaataatatttttaatataaagagcatttttcactgattctgacaaaattttcttcactcaaaaaggatttaaaataaattagttatgaatttttgaagtttacacattttttagttgagagggcatattggtcatttacgaaaaaaactaacctttgactaacagtcaactaacactatagtggtgggagtggcataaaatgttggaaaaacttgaactagtggtatataagggggaagccaatttttagtggcatacaagggaactggtcaaattctagtggcatataagggattctctccaaaaaagaaggtaactcgaacaattttttattctagttatcgatttactttcgctgagcattgtgaatccatccctctttgttgcaccattttgttttgtagctaggtgcttttacataatcaaccatgccaggatgtatacatgtgtgttttgcttcctttcttctttcttttagttaacaatcttatgttacattcctagaaattattttgtcatttagaaagttctgctgcaacgcgcagggtatcatctagtttatagggtttttgagtcaaggaaaggttgttggataatgactcaaatatatttagtcctagggtcttgttcaatatgtgtctaaatatatgggccacccttctacatgtaaccctgaaccatcatagttgattttgtcttctatggttattttctctctatattagagggatgttttcacataaaattatgtatctcttttgcatctattttccctatcaataacattggagcgattggagaggataatggtgtggagatgtatatgaatcgaactaggacatttaattatttgccacttttaagatgtgccaattaatgatttgccactcgctgtgtatgatgtgtgggccctcatgtatctatctcatgtgtctatgatatgttggtcaagtggcaaatcctatataaccactcgtaagagtggaaaatatttaattattttgaatccaccgagcataattccacgaacaagagtaaaattccaattttcatttgcttggtaaatcaactaatatgcaagaggataaattggacaaagtggctgaactaaaagaaggataggaggataagaaaagggagagggagtggacgtggtgtgggtggagggtgcgatgcagtgcagtacaaagggcgatgtgatgtggtgtgcatggttgatcacccgattgagatccaatggctaggataaaatgaggtgacgtggaagcacgagaaagtagaaagttgctattaactacactaagtgcgaatgacttgtatacccgcatatcatctcccatcaacttaatttttctccatgcgttttataggttgtattacaaatccatcaaacttatgcatgctgatctataacaaaaagacaaaatttgctacaggacattgaaaaaccatggcctttgctgagggatatcgtaagaacatgaatttgcttagggacactcaaaaaatgtggtaatttattggtagacaacatacacattattttatgactttttgctattttggagggagaattttcacaacatgggagatttgcccctaggaccaattagtacaaagagttttgttttctttacaaatcaagtccctggtgctttgatggagtggagcccgtgtgtcattgtctcgaggagggagagagcagtagctgaggcagagccttgccggctggcactccttcacggcgacgctgacagtgaatggcagctccttggacgatgcggccaaatagagaaagatgtgcaggcttcttgcgaacccgacggtggtcgtcttttagccggaggtggccagaattgacgacggtgctagtccggtcgagccaaggagcttatagttcgatgctaccaagatgtttgtagagacgtagagacgctacattcatgaggaattgagagacggaatcgaagatggcagcggttggccagagtttgggaagacgatgacgatctcatgattcacgacatctcatgtcaattgcttgggtcggagggctcctagggtctcggcgatgacgatggcgcgatggatggcccgaccatgcgccatggtgcccagaatgtggagatggtcttgactgtgacacagagagctcgctccggagtcacgtcggcatgacggctttcttgtcgatccgctgcatgacagagggtgaggtcaaaagttaaaacattcgacatgatgaggtgaataaggaacagggaagagatgatggagagcacggcttgacgactagcggcaacacctccttctgggcggccgacttgggaagaagaaatacgagggtaaaatagacaatttacgtggtttctccctcctcacataagtaaatattatattttaatgcttattgtgtcctttagcaaattaccgtgttttatgagtattctcggacaaattcacgttcttacgatgtccctcagcaaatatcacatttttggagtgttctgtcgtaaatttttcctaactaaaatatatccgctttcatctccaacgtttttgtataagtatttttactgcatgtatttttgtgagggttatattaataacacagtatgaactgttcactctgaagtgggattatcacctactggtggagtaatgaagtttcatgtgttgtagaactctttattactatgtcttcttattagtatgctgtaaaacttttagagcaattggtttggacattggttggactggcggtgtgcggcggcaatgggcaggtagcaaggcagtgggggcaccaccggagctgtgaggatggaggccgacaatgggcagggttggcagcaacctgagcgagggaggccatatggtaactgtgcggtcggtgacaacaattccgacagcatacgggaatgacactaccgctggattatggagaaagagacggaggatggcagggatgaggaaaaggctgaggattatatggttttgtgggcctcacctgcgccgttgactccttttggcaagccgacaagccaagagtagcatcgtcgtgcagggaggagtcagcagcaacccatcatacatgtgtgcataggtgaaacggggttgaggagggaagaagtgataaggggagagagaaagagtccacccaattcttgcaatcctaaatggtcaaaaaaaattgatttttttttggggggggggggcaactgagaattagacactcccaaaaattaattaggaaaactgagccacccctgtaggacgacccagccaaacttgccgctctccatgatcaccgttcctttgagatgcatggggccaccttaggaaggggatgtttaggtcatttaattgtcagagcatgatgattatgtgtcgatgtcctcctattctgcatttaaccactcaagatccagagtactgttgccagacttaacacatctcgggcgcgatttgatccatattccttaatttattgggtccttgattatcacgatcacttatggtcgatcatgagacgtgggtgattgtgcagcacaaataattattttaagggattgtatagattatattaattttggacttgttcggcgggaaggaggcggtggtgatgtatatcagcggttgtgatacatcatgcatgtgtgcgtgcttgaaacagggataagaagtgtagaagagatagggcgagatagaaatagtctacacgaacctcgatgcaattctaggcgtttaaaaagtgacagtcttttaggcaaaacttagacaatctaaaaagttaattaggaaaacagttactttttaaacgactctccacaatcgacattcctttgagatgcacgaggcccactatcgtaggttgaggaagtttaggccatttaattgtcagggcatgattatgtgttgatatcttcctattctgcatttaatcactgaagatccaaaacattatattaccagacttaagatttcttgggcgcgatttgatcaatattatttattaggtccttgattctcacgagtcacgaccacttacgaagttatgatcgatcaagagatgattgtgcagggaagattaatatttgagtgagtcaattttggactacatgtctacattaatagcttgacgatcaagaacgaaataagaaaaatatgctctatgatttgatcgatcgatctcgaattatacgttatgatatgtaaacaccagagaaaattgggatcgggatatgcaatctagtactagatattatttaattacatactctagtatgaaaactatcgtgcaaatcgggatactcttgagctggccggaatatttttcctggaatgcaaaaataattacgaattacagatcaatgccgtgcgcccgtgcagatgcaatggatatatatatcggccacgttgctgcttcttctaatataataaggcaatctcgttgcctactttgcacgatgtgagctaatcacacgaagtggacaacaagttcgtcatgtgatttgttgtctttctcctttgtgctttgtgcatcgaatggcatcccacaattatccaaaaaaatttacaaaaagcatttcactgagcttttgtacgtacgttatttatactacctccgtttttatgtaataaatacataagcctgttaacatttcgatattacatttgtcttcctaaataaaactaacatttatatttggtgttgaacttttttaataattaaatgtacttggaccattatatacttttgcacatttccattaaagtttttaataagataaatgatcaaatatcacgttaaaaattaacagcatcaaatatttaaaaaccgagagagtagtttggaacacatgtttaagttacagtcatttaaacttgaaatattggctattattattgaacctaggaacaagatagtagttccaaaatttaaggtgtgatatcatattttgtattatccattttacaatatattgttgatactatctttttatggaccgccacttcgaaaaagcaaataatacttatctcagtctccagaaagttaccaggaccaaataaataaattttcaaataagtaatcttatttttcagtaaagcaaagcaataatgaacttatgattttaaggcttgctattcactctataattatatattgccgataaaattcatcacaacaaaacaaaatagtgtcaggaggagtagatttgttgagaaaaaaaagaccgagaataacgtatttggcccaattaagtatatacatatgtaatgcgtaatatacctacatgtgttgaattattttcggacaacttttgagtattcactccaatacccaagagcctccctgtgtcccaccctgaagcaaacaaaccaggaagaacaataacaacagcatgggtagatatgttggcatccctgtaaactctataactcaaacttgaaatcggcagctctaaattatttaattagtaactggactaaaatatatatttctcgaaaaacgaagtggacaaattagaacttccataaatttagttttctcattaaaataagattttgttcagatttaagcatgatattctgctggtaagttatatgatattatatggagcatgtgatgatttttttaaatattcttttaagtcatttactaatgcaaacatagttgggggttaacttggaccaggttgtcgaaaaactagtataaagccacacagccacaagctagaatatccatcaataaacacatcatactgccatctccctcaactagttgcaaaagcacacgttcttccaatattccatcagccatgcctggagcagctgctgccgctgttgttgacagccgcctgtgcacacagcacgcggaaggccctgctgcggtcctcgccatcggcactgcaaacccggcaaatatcgtctatcaagatgggtttgccgactactactttggtctaaccaagagcgagcatcttattgagctgaaggacaaaatgaagaggatatgtaagtagaacaatcctttcatttcgatcgttgcattgatcatcattatcgttagttgtttttcataaactctaatgagaataaattatgcaagcgcttaaatttttaggacactcctgccataattcattataaaccatacaaatatttatactatactacgtagaaagaagagtgaaatgatgttggagttcagccaaattttctttatttcgcgtgtgggatgcaatgtggatgcatggggtgtggttgcatcccaaaatttttgaaaaaaaatctactatatacagtatatacttggtacatatacgcagtatgctcaatacgaggcccacttaaggtcatccaggactatatgctccatttgaatttctacattatttatgtcattgtatttgtactcgctatatttaagtgttttgctagtatatttttttcactttatctcttatcttgaatcataacagtaaagttttgcatctccatctctgaaatcctggatccaccactaatacctcgttaaatatgatagtttgtcatataatgtccctcctgctcatcaggctaccatctcgcacccatgccactgtactcgtatagatttaaagactacgcttttaacaaaaatacaagagatctacagagtagtcatagcaataaatccgtggatcttaataaatttgtactgaaaaatagcacttacttgtctatatgttggcaccgggaattgagtcttagtggatagagttatgcacccacaagtacatcattagaccatgtttgaacgaaacatatgtgctaatccaatctttcagaacattaaactcatgattatcttcctaaaaataggacatatataaaccatttttgttttattacggaaaatgcttgcataatatcatatattcttgttttgtaaatattcggcatcttaattgaaatgtctcatgttattcttataatctcttagtgctatgtactaattgtaagagatgtgggtgcatccttttccatttcaggtcacagatcgggaatagagaaacgctacatccaccttgatgacaagctcatctgtgagcacccggagatcatcgacaaacacatgccctcccttgaaactcgtgtagacatcgtctctactgaggtcccgaagctcgccgagtcagccacacggaaggccatcgccgagtggggccgtccggccattgacattacgcacctcatcttcagcacctactccgggtgcagtgctcctagcgctgacctcaagctggcatcactactcggcctcaacccttctgtttctcgcaccatccttagcctccacggttgctctggaggcggtagggcacttcaacttgccaaggagctcaccgagaacaaccgtgatgcacgcgttctcgtagcctgtgccgagctgacgctaatatgcttctcaaacccagatgaaagcaaaattgtcggccatggactgtttggggatggtgccggagcaatcattgtcggcgctggcccactggtcgatgaagagcgcccactattcgagatggtcctcgcctcgcaaacaacgataccaagtactgagcatgcacttggcatgcagaccaccgccagtggcatagatttccacctctctatccaggtgccaacactgatcaaggacaacatccggcagtgcttgcttgacacattccgatcggttggaaacatggatcctaattggaatgacctcttctgggcagtgcaccctggtggccgtgcgatccttgacaacatagaaggcgagcttcagctgcaaccagcaaagcttgcggcaagccgccatgtgttgaacgagtatgggaatatgagcggcacgacgatcgcgtttgttcttgatgacttgcgtcgccgtcgggagaaggaaggagatcagcatcaacaacttgagtggggagtaatgctagcctttggaccaggtatcacaatagaggcaatggtgctgcgtaacccactctcatgaagtcttaaggaaaattaattgccactatcttatgcttgtctggtatcttattacggtatatgttaattaatcaatgcatgacactaaatcaattctgcatgcttaagtggaattatgacctaccggtgatgtattgatgttgtggagttcctatctaatgtttattgctgttttttctgtatttgtaacaaaatttgtaataccctgtgtataattgaaaaagcatattgcttatatgagttgcttcaatccgagtttggatcaattgagatgtatctttcaagaaaacacttgaataagatcaagtcagtattttgcaagtgaaaaaatgttccaaaacaagataaaaagatgcaatcaatttcaacttaatctttagtaattaagattgtttttcttctcaaatatacatgagatgttgtgtatcattgcattaatggaagaacggaggcgtaagatgcaaatacaaataatcagaaaagacaaaaagtgagaaaacaaaacacgagcaaaagaagaacaaagtgcctaaccgaggctctcccaacaacctgaatcatgggccttcttaaccgggatctataatcaacgaaattcccctaggctcaataggtgagcctcgtcactcgctagaactagtcgagaagatgattggagcagcctcgttgaaaacacaggcgtttcgatgcttccaaatagaacatgccctaagaatgatcatattatttatacccttccttatagcccgttttaccaaattcttgtgtcttagctagggagatcgatctgctttcagaaccggcggcgcgttcatcttctcgtcgttcgatctgatcagcgagaacaattctgacaccggtgtgttcttcgatagatccatctgatcggcggcagcatacgcgcttcatcccacggcgagttctttgatgaatctggttggtggcggcaggcgtgcgtcctcctgtcgtctcatcgagttaatcggctcgacgtgattgagttttcggcgcagcaatccgaagcggagttcttttttgctaccacgcatccaccgaaaaagcagcagcgcatagctgcacggctctggaggaggaagaaaaatcaattgaagatactgctcgcttcgtgtttatgtgaagttccaaattcctgttggatttttgtacgtccacaaagactttatatcagggaatttcttttcttttggaatctattatatatattttttgatctggaattgtttctccaacatgtcatgtatcaaatttgacattgagaagtttgatggcaagattagtttttgcatatggcaggttcaaatgaaagttgttcctacacaagttgatgttcggaagcgaatatgattgatcaaggggaagataggctgtgttatctgtgtgaatggtaccgtatacaggttcttaagaaggaatcacaaataccgttccaaagcagcatatttcgacaacactgaatagcttgatgatccaccaggaccatgcaagggtgatagagtgttccaaatgacgaaaaatctcaaagtttttttttgagaaggcaaaaaagaaggaaaccaagcggaagcgaaatgcggaaggaccaagcgttctattcaatagatatatagatacatcattttatcggtgtcatgcacctagagaaaaatgtgttctatagaaccattgggactttagtagccataccaagcaagacaaatgatggactgaagtcacataatgtaacagcccgtcctccagaaccgcgtagcctagaccatccaatgggcgggcccacttacacataccactcccgtacacgtttatcctcgctttgtataaaagtgttaaccctggagtgatatggttggagggacaagcccactcttgctaaactagcaagatggtactaaatatacgcacacaggtcttattggccacacatgccatgtcctaattataccaggatgtcacacaccctcctcaaaggacccgacatccccgttggcccaatttacccatatagtcacacacaggcatataggtaaatgtctaggaacacaccccctcttaatgcttagtgcagtccgccttacatagagcccacatgtgccatatacccgcacactgacccatacaagcaaccgcgagggtcggaactgataccattttgtaatggcccgccctccagaatcgtgtagcccagctcgtccaacgggcggtcccacttacagataccactccacttacactttcgtcattgcttcgtgtaatagggttaaccagggagtgatatggttgaagggacaagcaaaactagcaaggtggtactaaacatgctcacacagctatcatgtactccttccaaaaatctgagacctatttcattctttggtttttctcaaaatctaagtcctatttgtagtcactatgtactaaattgaattgttgatcagaaaccaataagtcattctaataattattggttgcatgctcattggttttgccatatggtgagtgagttaattgcttcttggtattgatgcaaaaagaaataggtctcatatttttggaaggagggagtaccacataggccatatcttaattgggccaggttgtcacatgtaaggaccttgtgaatacgcagataacagaagagcttcacctgcggatgaaggtaatggaagagttgtaacatcccgcctctcctaggccaggcctacttacatctggtagcttatcttggacatagactaccctcacagaccaacacaagtcttttctgcatactttgtcctcactcgtgtgcacccgggaagaattttccggtcggtcacccatcccaaaattgctctacgccaagcacgcttaacctctgagttatttggagatcggttaaggaaaataagttgcaacctgatggtatgagtattctattaatcctattaagccctaggccaggatgtcacaagagtgcacctttcgctgacttattacaccttgacaaattatgagaaaatggcattgtacaaatccctacacgaggtgagagtccctaccggtttctcctcaaacataaagcggctagtgtcgatgaaggatttatagcttttgggctacatttctcatgactgtcatgtaatgctcataatattcattgctattgcaatcaaagtaatcaaactagtacacgtaaagatggttgtcacaaaactgtgttatttcttcaatgcaatctcacataaagtaattgaccttgaagagttaggtcatctccgtgttttcgctatagagaccttgtgcaagcttgagatgtgtttccctctgtcatttttcaatatgatgcaacacctcatggttcatatcgtgcctcagatacttgtgcttgggcccttgtaccttcatcagatgtggacattcgaacagtatatgtccaatctaaaaaggctatgtacggaaccgtgcccacccagagggttcgatgatagagggatacactaccaagaaagtcattgagtgttgcattggttacttgcaagatgggaaagcaattggtttactagtacctcgacataaaggtaggttatctggaagagggacaaaaaggaaaaaagaatcctcgacaatgactacaaagcagtgaaagatgctcatttcattgtcctgtaacagcttgtgatagtggagctgtacatagagcagcacctaaaggaattacaagcaagaaatgtcaggcgctctgaagcatggatcatgaaatggcacaaatctgactttaccgaatggttaaaggacctcggccgaccatatggtgatagcacgaaggaaaaaactatgaaaagtttggctgacgggcattcaagagtgtacacctcatggtgagcgtatatctgaatgggtacacattttataccaaagcaagagacaaaaggagtgcatctcaaaataatggcgttcaagtataggaaatcgacacaacaggtcaaaagagcacatactatgaattcatagaagaaatttgggaacgggactacgaacccaatatgcagattccaccgtttcggtgtcaatgagtgaaacacccagctggcgtgtttgtggacaaatttagacggacaattgctgaccttgacaacgtaagccacaagaataacccattggtacttgccgatcgagccacccaagttttttacgtgactaaccccatctcagttgaagaaacacatagttatttccggaaaacaaaggattttgggagttggtgatgttgaagatgttgaggcatacaatcaatacgagaacatgacactattcatggattttggaaactacattaagcttgtagaagaaacaattagtgaatcgccgaaggcgtacatgaggaataaaggagtaaggaagaatgtgaacggctaataaatgtagtcgctgttcaatataaatatgaatcaatgaatatttacatatgaatgtgtgacatgatggacgatgaattttttatggatggtgaattttatattatttgttctcatggtttttggtgtttaaaaaaagagaaaagaactaaaatttataaaataagaaaataatgatatattagttactgatggtgacatcatggagactctgatagaaaaacctgtggtttacgttttggggtgagggttgggctgggtgggggcactactagagccacagggatggaggctggcagtcggcatggttggtagtaggggcgagggaggctgtgtagttaggaggaggcgattggcggtggtgattttgaaagctatggcagtgcgccactgctgttcaatcaagaaggaagagagggagggacgtgggattggggaacgggaaggaggcttgtctggtgggcctcgctggcaccgttgaccccttccggccatccggcgagccaggggtggtacgttcggcgggaaggtggcggcgatgatgtatatcagcggtaatccatcctgcatgtgtgcgtgcttgaaatagggacaagaagagcaaaagagatagggtgagatagaaatactctacacaaatgtcgatacaattctaggcgtttaaaaagtgactgtcttttaggcaaaaatcaattaggaaaactgttattttttaaatgactctccacgatcgccattccttcgagatgcacgaggcccactaccttaggaagaggaagtttatatcatttaattgtcagggcatgattatgtgtcaatatcttagtattctgcatttaatcaataaaggtctagaacattatattagcagacttaccacttcttgggcgcgatttgatcaaatattatttattgggaacttgattcgaccacttatgaagttatgatcggtcatgagatgctgtgtggattgtgcagagaagattaatatttgagtgactgaattttggactacatgtctacattaatagcttgacgatcaagaacgaaataagaaaaatatgctctatgatttgatcgatcgacctcgagttatacgttatgatatgcaaactccagagaaaattggaatcaggatatgcaatctagtattagatattatttaattacatactctagtatacaaactatcgtgcaaatcgggatactcttgagctggccggaatatttttcctgtaatgcaaaaataattacgaattacagatcaaaaatatatccgccacgttgctgcttcttctaatataataaggcaatctcgttgcctactttgcacgatgtgagctaatcacacgaagtgaagttcgtcatgtcatttttgttgtctttgtcctaatttgtgcatcgaatgactgatctcacaattatccaaaaatatttacaagaaacatttcacagagctatgtacgtaatttatactacctatgtttttaaatacataagcctgttgacatttccacattacattcgtcttcctaaataaaactaacatttatattggttgtgatttttttaataattaaatgtatttggaccatgatatacttttgcacatttccattaaaatttttaataatataaatgatcaaatatcaccttaaaaatcaacatcatcaaatattttaaaaccgagagagtagtttggaacgcacgtttaaattacagttcatttaaacctgaaatgttggcagttattattgaaccttgcaataaaatagtagttgcaaaacttaagacgtgattatccattttacagtacattgctgatacaatcgtttttatggacagccactttgaaaaggcaaataatacttatcccagtctcgagaaagttacccggactaaaaacatatcaattttcattttcaaataagtgttttttgtttcagtaaagcaaagcaacaatgaactcatgattttaaggctagctattcactcaataattattgccgataaagttcatcacaacaaaacaaaatagtgtcgggaggagtagatgtgttgagaaaagaagaccgagaataaagtattaggcccaaataagtatatacgtatgtaatatgtaatatgaaaaagtatatatacatccctaaactttatattgaagtctgtctagcacattgcactttaaaatcgaacatccaaccccctgaactttgccataccatccatattaccgttaaggtggttttggatgatggttttgcatattttagaagcttaaactgttgagttgtgatccaaatttatttacacttaataaaggctagattctgccgtagtgaagcggaggcccgtcgccggtaggcttggttcagagccttttagggttccaccttttacggtacggatcgtaataccttttagggttctacctcatatatatatatatatatctcttgtaagccgccgtgcggcattgtaacctcacccaatatagtgaagatattttactggctagcgcccgtggctttttctctcctgctttgggagggttttccacgttaaatctcatgtcttctgtgattgatctgtattgttctttatcgtttatttgcctatcgtttcctaacataaatgacaattttgaataactaatgtaacatatttacgtatcatcagttataaatcatcaatttatcattatatagtgatatcatgatattattatattggtgcttgtttgttagtgagagcaaataaaaggcaaaaagaatgatttaagtcaaaatttttgtatatatgtccaaagtatatgacatgtgatcaaactcatccaacttatatacaaattagattaaaaaaaccactatgcaaaaccatcttagggggttacatcaacggtattctaaagtttagggggttgaacgtccagttttaaagttcagggtgctagacggaattccatcagaagtatagggggttattaggattggaaaaagtttacatgtgttgaattattttcggacaacttttgagtattcacttgaatacccacgaatctccctgtgtccacccctgaagcaagcaaaccaggaagaacaataccaacagcatgggtacacattttggcctccctgtaaactctataactcaaacaagaaatcggcagttctaaattattaaattagaaactgacctaatatatatatttctccaaaaatgaattggacaaattaaaacttccataaatttaattttatcattaaaatgagattttgttcagatttaagcatgataatctgcttgtaagttatatgatgttatatggaccatgtgatgattttttaaatattcttttaagtgatttactaatgcaaacatagttgggggtttccttgggctaggttgtccaaaaactagtataaagccacacaaccagaagctagaatatccatccataaacgcatcatactgccacctccctcaactagttgcaaaagcacacgttcttccggtcatcagccatgcctggaacagctactgccgctgttgttgacagccgcctgtgcacacagcacgcagaaggccctgctgcggtcctcgccatcggcactgcaaaccccgcaaatatcgtctatcaagatgggtttgccgattactacttcggtctaaccaagagcgagtatcttactgagctgaaggataaaatgaagagaatatgtaagcagatcaatccttccactttgatcgttgcactgatcatcattatctctagttatttttcataaactctaatgagaataaattatgcatgcacttaaattttcaggacactcctgccatagttcattgtaatgatgttggagttcggtcaaattgaaatatgtcctgccattataacctcggagagctatgtactaaatgtaagagatgtgggtgcttccttttccatttcaggtcacagataaggaatagagaaacgctacatccaccttgatgaaaagctcatctgtgagcacccggagatcattgacaaacacatgccctcccttgaaactcgcgtagacatcgtcaccactgagatcccgaagcttgccgagtccgccgcacgtaaggccatcgccaagtggggccgtccagccactgacattacccacctcatcttcagcacctattccgggtgcaatgctccaagcgctgacctcaagctggcatcactactcggcctcaacccttcagtctcttgcaccatcctcagcctccacggttgctctggaggcggtagggcactccaacttgccaaggagctcgccgagaacaaccgtgaggcacgcgttcctgtagcctgcgccgagctgacgctaatatgcttctcaaacccagatgaaagaaaaatcgtcggtcatggactgtttggggatggtgccggagcaatcattgtcggcactggcccattggtcaatgcagagcgtccactattcgagatgatcgttgcctcgcaaacaacgataccaggttatgagcaagcacttggcatgcagaccaccggtagcggcatagatttccacctctctatccaggtgccaacactgatcaagaacaacatccgacagtgcttgcttgacacattccaatcggttggaaacgtggatcctaattgaaatgacctcttctgggcagtgcaccctggtggccgtgcgatccttgacaacatagaaggcgagcttcagctgcagccagcaaagcttgcggcaagccgccatgtgttgagtgagtatgggaatatgagtggcacgacgatagcgttcgttcttgatgacttgcgtcgccgtcgggagaaggaaggagatgagcatcaacaacctgagtggggagtaatgctagcctttggaccgggaatcacaatagaggcaatggtgctacgtaacccactctcatgaagtcttaaggagaattaattgtcactatcttatacttctccagtatcttattacagtatatggtaattaattaatgcatgacactaaatcaattgttcatgcttcagtgggattatgacctacttggtgatgtattgatgttgtggagttcctatataatgtttgtgaagatatttgagttgtcaattgctcaactctagtacatgttgtaattaaactctttatttctttcatatgccctctgattgttaagttttttttttgttttgtaataaaatttgtaataccttgtgtataattaaaacaccatattgcttatatggtttgcttcaatcattttgatcaattgagagtatttttaaagaaaacatttgaataagatgaagtcaacactgtaagaaaatgatattttacaagtgaaaaactgttcaaaaacaagataaaaagaggcaatcaatatcaacttaatatttactaattaagattatttttcttctcgaatatgcatgagagttatgtagcattgcattaatggaagaacggaggaatacgatgcaaatacaaagattcagaaaacacgaaaagagagaaaacataacacgagcaaaagaagaacaaagtgcctcaccaaggttctcctaccaacctgaatcacaggccttcttaactgggatccataatcaacggaagtccctatggccccgcctaaactccataggtgagcctcgtcactcgcaagaactactcaagccaaaatgcttgaggcagcctcgttgaaaacataattgttttgatgcttccaaatagtccatgcaccaagaatgatcagattatttatacccttccttatagccccttttaccaaattgttggccctgctccacctatcggagaagtgggaacaggggttccctttcccccaaggtgctcggggcgctatgcgccccaccaagccttacaagatctacatctttaaggtttcaagaagagtatggagacctacaatatctacatcttcaaggtgcagaagcaggcactggtgtgtactagtgtctcgtcgaaagtcatgcccatcatgaactccttatttatcaatatttttgagaagctcatctaatataccaacgaaatatactttcggcaatgcaaatgcgcccgaatatgtagggttgccccgaggacttggcctgccttgaggacaaggggtgacccaaacatggcggccaaccggtgacaagattgtaatccctcaagaacccgaggactccccgctcaatcaatggagaggttcaccacattaaggaaagctactcgggtccagaaatcacatttaaaccaccactttacattaattatgatggtcctattgatctaaagtgctgtcatccacaagcgacttatgagattgatctcatcgggagtggatcgggcaatatggaactcggattattggttctgtgagcttcaggaatatcacgaattcggctctggcttcctccagattgtttctcaatgtggatttgtctacggcttctcaatgtggccctccttgaacacagtggccatgtgacgggctatagtttaggcccgttagagatgagagtcatccgtgacgggcttttgtgttggcccaattgagatgcgtcatccgtgatggccggatgcctgattgagatattttctcacatcacggacctttgcttagtgacgagggccctgcccgaaagagatgatgatttaagcccgttagagatagccgatcccgttctagtgattttatgtggagtacaatgatgcaaataaatattaaaaataatatgtaatttaaaatatataagtcattaaagggttaaaaaagacatacaccatatgctaaagaggatttatatatgggatagagtggtctccggttagaactaaagcactatagtgcactatctagtcacgtcctatcctaaatggtaaaaaaaagtgacagaacttcttattttggggcatctgaattagacacttccaaaaaattaattaggaaaactagaggcacccctgaaggtcgtgccagccgaacttgccactctccatgatcaccgttcctttgagatgcatgaggccaccttaggaaagggatgtttagctcatttaattgtcatggcatgatgattatatgtgtctatgtcctcctattctgcatttaatcactcaagatccacaatgttaccagacttaacacatctcgggcgcgatttgatccatgttacttaatttatttattgggtcattgattctcatgatcacttatgatcgattatgagacgcggggtgattgtgcaaagcagataattattttaagaatgtataaattacattaattttggactaagtacattaatagcttcacgatcaaaaactaaatatgaaaatatgctctatgattcagtcgaccgatctcgcgttatacatagtgatatgtaatctccagagaaattggggtcggtatatgtattctagaattagatattatttaatggcatattctaatttaaaaactatcgtgcaaatcgggacacttttgagcaggctgggatattttcttgtaaaatccaaatacagaaaaataattagtacgaattacataccaatgccatgcgctgcaggtgcaattgaaatatcatgatatggcaatatcggccacgttgcagcgtcttctaatataataagtgtttattgcctactttgcacgatcttggagctaatcacacgaagtggacaacaagttcgtcgtccagataccacattagctgctttgttatctttctttgtgtgcatcgcatggcagatctcgagacaataatcgtcttcttaaataaatctatacgagtatcatgaaagtacattaaccattatattacttatatttttcatatttacattaaaacttttcataagacaaatgatcaagcataatattaaaaattaacagcattatattaacatttcaaaacagagtgagtgagtagtttggaacgcacataagtaactagtattaattttaaacaactattaattttaaactttgaaaattattatagaaccggcgaaacaagatagtattagtaaaattaaaggcatagtatcactttttgggttatccatcttacagtacattgctgatacaattgtttttttaccgccactttgaaaaggcaattaatatttatctaaatctttggagaattatcaaaactaaaaagatcaatattcaagtaagacattaatatgtttcggtaaagcaacgccagtaacagacacgggacttcaagactagatattcactcaacaaatactgataaaattcaatagaacagaacaaaataatgtcagaagtagattctgagaaaaaagactgagaataaaatattagacccaattaagcatacacatatataatgtaaatgcatatattgaattattttcagtgaacttttgagtgtctgctccagaagcaaaggaccaggaacaacaataccaacagcattttgaccataagatgggtagatatgttggcattcctacacatttatgtaaactctataattcaaatgaccaggaacaataccaggagcattttgactgtaagatagatatatatgttagcaatcttcacattttctgtaaactctacaacgcaaactagaaatgggtcgaggccagttcagaattacaaaattagtacctgcactaaaatatatatttctccaaaaacgatttggacaagtcatacaaaaatttaattttatgatcaaatgtgattttgttcagatttaagcatgatattctgcttgtaagttatatgatattatatggagcatgttttgattttttttaaatattcttttaagtcatttactaatgcaaacatagttgggggctagcttgcgccaggttgtcgaaaaactagtataaagccacacagccagaagctagaatatccatccataaacacatcatacagccatctccttcaactagttgcaaaagcacacgttcttccagttccatcagccatgcctggaacagctactgccgctgttgttgacagccgcccgtgcacacagcacgcggaaggccctgctgcggtcctcgccatcggcactgcaaaccccacaaatatcgtctatcaagatgggtttaccgactactacttcggtctaaccgagagcgagcatcttactgagctgaaggacaaaatgaagagaatatgtaagcagatcgatccttccactttgatcgttgcactgatcatcattttcactagttattttttcataaactctgatgagaataagttatgcaagcgcttaaattttcaggacactcctgccatagttcattataaaccatacaaatatttatactatgtagaaagaagagtataatgatgttggagttcagtcaaattttatatacctcgtgtgtctgatgcaatgtggatgcacggggtgacgttgcatcccaaaattttggaaaaaaatctactatacacacagtatatacttggcatatgtacgcagtatgctcaatacgaggcccacttaaggtcatccatgactattgatctgctccacttgaatttctacgttatttatgtcattgtatttgtactagctatttatgtactgttttgctagtatatttttttcactttatctgttatcttcaatcataacactaaagttttgcatcccatctcagaaatcctggatccaccactaatacctcgttaaatatgatagtgtgtcatatactgtctctcctgctcatcagactaccatctcgcacccatgcctctgtactcatatagatttcaacagtctacgcttttaacaaaaatacaagagatctacagagtagtcatagtaacaaatccatggatcttaataaatttgtatagaaaaatagcactcacatgtctatatgttggcaccaggaattgagtcttagtggatagagttatgtccccacgttacgagaaaatcataagatcatgtttgaacaaaacatatgatgtgctaatccaatctttcagaaaattaaacacatgttcatcttcctaaatataggacatatataaaccaattttttgtcttgttatggaaaatgcttgcaaaatctcatattttttttgtatttattcggcaacttaattgaaatatgtcctatcattcttataacctcagagtgctatgtactaattgtaagagatgtgggtgcttccttttccatttcaggtcacaggtcaggaatagagaaacgctacatccaccttgatgaaaagctcatccgtgagcacccggagatcatcgacaaacacatgccctcccttgaaactcgtgtagacatcgtcaccactgagatcccaaagctcgctgagtccgccgcacggaaggccatcgccgagtggggccgtcctgccattgatattacccacctcatcttcagcacctactccgggtgcagtgctcctagcgctgacctcaagctggcatcactactcgggctcaacccttctgtctctcgcaccatcctcagcctccacggttgctctggaggcggtagggccctccaacttgccaaggagcttgccgagaacaaccgcgatgcacgcgttctcatagcctgcgccgagctgacgctgatatgcttctcaaaccagatgaaagcaaaatcgtcggccatggactatttggggatggtgccggagcaatcattgtcggcgctgacccattggtcgatggagaacgcccgctgtttgagatggtccttgcctcgcaaacaacgataccaggtactgagcatgcacttggcatgcagaccaccagcaatggcatagatttccacctctctatccaggtgccgacgctaatcaaggacaacatccgacaatgcttgctcaacacattccgatcggttggaaacatggatcctaattggaatgacctcttctgggcggtgcaccctggtggccgtgcaatccttgacaacatagaaggtgagcttcagctgcaaccagcaaagcttgcggcaagccgccatgtgcttagcgagtacgggaatatgagtggcacgacgatcgcgtttgttcttgatgagttgcgttgtcgtcgggagaaggaaggagatgagcatcaacaacctgagtggggagtaatgctagcctttggaccaggtatcacaatagaggcaatggtgttgcgtaacccactctcatgaagtcttgatgaaaattaatggccacaatcttatgcttctccggtattttattacagtgtatggtaactaattaatgcatgacagtaaatcaattgttcatgcttaagtgggattatgtcctagcggtgatgtattgatgttgtggagttcctttctaatgtttgtgaagatatttgagctgtcaactactcaactctagtacatgttgtaagtaaactctttattgctttcatatgccctctgattgttaagttttttggatttgtaacaaaatttgtaataccctatgtataattaaaacaccatattgcttatacggttttcttcagcccgaggtttgatcaattgagatgcatttttaaagaaaatacttgaataagatgaagtccgcacggtaagaaaatggtattttgcatgtgaaaaactgttgaaaaataagataaaaagaggcaatcaatatcaacttaatatttcctaattaagattatttttcttctagaatatgcatgagagttgtgtatcattgtattaatggaagaccggaggcgtaagatgcaaatacaaagaatccgaaaacacaaaaggagaaaaaacaaaacacgagcaaaagaagaacaaagtgcctcaccaaggttctcccaacaacctgaatcatgagccttcttaattgggatcgattatcaatgaaagtccccttggcctcgcctaaactctataggagggccttctcactcacaagaactagtcaagccaaattgcttggggcagcctcgttgaacgcaatcgtttcaatgcttccatatagtccatgcaccaagaatgatcagattatttatacatttccctatagccactttttaccaaattgttggcccagctccacctgtcggagaagtggaaacaagggttccctttccccctaggtgctcatggcgctgtgggccccaccaagcactacaagatctacaccttcaaggtttcaagaagaatatggagacttcaaagtatataagcgggcattggtgtgtaccagtgtctcgtctaaagtcatgcctatcatgaactccttctttatcgatatcttcaagaagctcgtccaatataccaacgaaatctactttcggcaatggcaccgtgcctgagtgtgtaggggtgccccaaggacttgcccaccctatggacacggggtgacccgacacacggcagccaaccggttacaagcttttaatccctcagggcccgaggacgctccgttcaatcaatgaagaggttcaccccattaaggacagctgctcgggtctgatgctcacatttaaaccaccactttacattaattgtgaggtgaactcatacacaacttgggagacgtggtagcacatgcaaccccttgcatgcccacgttaccccggagaacacaaggcgtgcgacatggcgcgtccacagcaaccatccccaagttccacccctgttggctacggtcgcttatgggtagcccgtggacaattggaacgaagacttttgattcatctctccacttgttagttggtaggcatggctttcacatctggtcagctggcttggagggactactacaagactaagcatattaagtttagaggagtaggccccactcgtacatgcatgcaatggcattgtggactccccttcatgtgtaaaatgaggatccgtgccatagagaaaagggttcacactctcatctaaattagattagccaaacatccagtgatcaagtaacttctcctcacacttcttcttttcccgcatcactttgtgattcccttcaacatccatagtccacacacagaagtaaggtattatgcacccgtgcgtcttgaacctatgtactcgcttggaaatttggagcaaaagactttcacatctcaatgttctaatctcaaattcaaacaattccattgtaatgttggacaatctaaaagaacaaaaaccactttccattcaaaatggaacttctggctaatcctgagagaacacatcctaaagctactacactatagaagtacattttggaaaaaaaaaaggtgtagtatcatatgggtgaaatttggagacgataataaaaaaaattcatgctgctaccacaaaaagatatagaagtaacaagatttctcaccttcatctccatgatgggattgtgatttcctcacatgcagacaaagcacttgctttcttagcacttttaaaaataaaatgggcacctcaaagcaaaatcaaatgattaagcaaaatcaaatcattatcaatttgcaggagttatttacaccttaggagggactctctacctggcttctatgatgaaatgctcgaaatcatcaattcaatgccttgagatagagatcatgggcctgatggtttcaatgggatgttcctcgaaaaatgctggcaaattatctctgatgatatctattccttgcagattcagttttgttttggcattatatctgtgggcagtcttaatagttcactagatgaataccacgccgcgttgctgcggaaaattaagttacataatatgtacaaataaaatatatttttattatcaaaactaaaacaatttgatacaattttgagcctaaaaataattgagattgcatgtttttatgagagatgaaagacgagacaatttagatcatagatctatcatccaaatgctagaaataattggggtgatatgacttaatgggagaagagagaaatagcattaactatacttagtgtggaagaactatataagtatataggattcgtcactctaattcctaagaagccaaccctggaaacaacaaatgattagttaagattcttaaaaactagttaagcatattagatacatacaatattattaatatgtcatgataattactagcaaataatgcaaaatttataaataatatatatcacagaacgtgcacaaacgaactggctgatagtgttcagctaccaagtttagtgaccacaaaatagcaatatcattatcgaaaataaacaccgccagagaaagcatttgtaaccccggtttgtaacccctttagtcctgggtagcaaaccggggctacgaatccgggactaaagatcgctgtctttagtcccggttcaaatacctgggactaaaggttttttttttctactttaatattgatttcaaaccgtcctcattcataaaatcatccacaaattcaataacaaaatcatccacatttacaaaaacatcacaaaatcatccacaaatttacatcacaaaatcattcaaaaaaaacatctaaaaatcatccactgttcttctactttttctactccacgacggccgcgcttgccaactacccagagggcaccaccgtgctgcgggagctcatccagaactccgacgacgcgggagtgttccacgtccgcctctgcctcgaccgccgcatgcatggcgcaggctacgctgccgctggccgccctccgcaatggcagggcccccgcgcggccacgccgccacgcccgccgccacccccggctccggtgccgggcgccgcgcaccgccaccgccaccggctgcccgcccgctgccgatgttagggtagagggaaaggggaagccgggaaggggaggaggggaggaaaagatagaggatgtgagggagagaaagagatagaagaagataaggatgagaggaggagggaatctctgaaatttttctctctccccctctcatgcgcgccttttgttttctctagcccgcacacgatttttttaatctttagtcccggttgttgacaccaaccaggactaaagatattgggggggggcctgacacgtcctgacaatgaatgaaccgggactaaagatgaagattaaaaatacctttgaacttataacccgggactaaaaatggcttttagtcccggtttttgttcatccgagactattgtggtttttgcccaactcacgaaagatggtttctctagtagtgaaagaagaactgtataacaagaagatggaatatcgcaagaaatgctgaacaaaaattttcagttttaccttgcatcgtggtaaacaacaaaaatttgttaaaaattatgaaattttaataatgttaatacaatattgatgaataggagtatttaaatacttcaaaccagctgggatttgcggctcgaaatggcttttgccctggcgtggccctcgctgggtgccgacacgtcatccggcactggattttggctgggtttcgagtcatgtggttgcttggttcatacgccgttcgatcatcatcgtgtggctctggcaatcatcgatacgggcagtgcaatggaccaatggcagacatactcaacaaggcccaccatggcaagcgaatggttgacgaaagagcacgcaagcaggtgaccaaaaacacaagcagctaataagttgttgctttgtttttgggtgggcgtggtgtatggctcgctctcgctgttgctgtgtacagccagccagtgtttgatgcacatagtgagaatatgtccatgtcgttcccttgtccttgtgtgacaacatttttttttgtttatgggtggattttaatgggtgctttgaagaccacgtctgtagtgggagcactgtgcacccactccactactgcaagagtatgcaagatgctattggctagattactcctggtctattcggtcatatcgttcctatacggtggacattgcctatacatccttcgtctgtgtattgtgggcccgaactttgttctagtccattagtgttggtctagggatgatatatgctacagtttacgttatcgattttattcggtgctacagttgagtagacacagctgtttggctgattggtgggccggtctgccattggacgcttaggtgcttgttgcttattggtgggtgtaaatttgtagggtctgaattaatttttttcccttgctccacggcactctagaaaattgttgctttcttttcattttttccttccctttcgcttttccagtctcgtcggtttcttcacattttctgttcttcgtttatttcgtgccaaagctctatccattttgcctctactcaatcgtccatccatcatggcaaggtaaaagttggttcgatgcatcaccaaaagttttgctaaattccatccaaaaaaaactgatcttgggaattctaaatgaaatttaatgtgtaaaattttttattcctccaagagattaggtaagattaaatccctataacaaaaaagtgagtccgatgtaaagctaccaatagaaatcagcttatttgtcctgctgcgtgccgacgatattgttgacgtgtagaggtccatgagaccatgggtgacttaggtggtgtttggttggagggactaaagtggggctaaactttagtccctctcacaaaaacataagtccctaccatagggacttatacttttgtgagagggactaaatttagtccctatttcccaaacacccccttaacgctctctgagcaagaaaaaaagctgatacagcagcaatactttgatatatgtccaacgcatagcaggttcca

SEQ ID NO: 9722 - DNA, 5799 bp, Oryza sativa
aatgactaatcataataacgttagcctatactttatgtccagcatttttaaagtttgggtgtatacttggatacattctgaaaatgatcttccgtcttaaaataaatttatttttcatctatcctacacatataccaatacaaaattaaaaaaataccctcaatcaaatatcaatgtaattatttctcaatttatctattcctaatgcatttatcctctacttgcttaaaaataaacttattttggaataaatggatgaagccaaaaatgattttattttaggacggagggagtaccagtctaatgttttttgccgttgttcataatacattcagcaacagcattaccaataatgtcgcagtgtcaaggctcaatagtaatcaagccagtaaatcaacaatctgatattgctactcttatcataggatagtagtactttcaaagtttcgatacaatttcgctattacacctggtagcaatatgcaacccatgaatgccatgaggcactgggatattacgtcagctacagagttttgcaggctggggttgaagttttgaacatccttgtccagcctagagaatgttaaaaatctgaaataattctggaagccatccttggtgatgcacactgcctcctacttgatcacctcatagacaaatttgcttacatttccaggcttgaaatttcttggactggatcacctctcagctctcgctgcaagttggaaaatccaagtgagatcaactgatatgctacaatgtacgagcaagatttatacatgtcatttcttatacaaaaggagttttttttcctcaggaattctctgttttctgtaaaattcctactaaaatcataaaaggagtgtgtttttttttcttggaacaattcttagtttcctatgaaattcctataaacaccataaactcataatcatgtgataacggaatgaattgtgctgtgccataagctcataatcaaaatactccctccatcccaaaatgtacgacgataactaacattataaaaaaacaaaaaatccctccatcccaaaatgtacgacgacaaccagcatcataaaaaagaaatccctccattctaaaatgtacgatgataaccaacatcataaaaaaagaaacggagggagtagtaataccttttgtattttttttgttgttggaggggaccttcttccctctgccggaagccacatcgtccatgctctgcccctgcctccggtaccggccgccggaggcgacgaagccggggcacggccggtacgccttgataggccaccacccgaagccggggacggtggctatgccgccctggatccgcccctcgccgttgcaacccctctccacctcctcccgcccgcaccctctgcatcccctgcatatacatacgcagttacgcacacggcattgtcaagaaggtgcaagaaaaagttgagctggtatttttgaatttctctcttctttgatacaagaatcttactacatgtacataaagtagtttttttttttggcaatcttcagaagtttcttttttacaaaaagacaaaaaagagctttggcttacaaatcatgaatttgttactcaagccaatatatgtagagatgaatggaaaaaaagtgcttgccactccaaccaatatatatatatatatatatatatatatatagagacacacacagccactctagccaatatatatgaataagatgaaaaaaaatagggggattaagagtccaatgtcctaaccgctagaccatggaaccgcttatatccaacatcctaacatatttaaattaataaacaaaagaacttgtccctgccgattgctaggtccaggaaacactgcattatgatcaatataatggtcctatagtgttcctgttcagttgattcttgtcttgtgctgaaactctgcatatactatcaccaacctaacgaaccaccaatacttactaaatttgttctcatttcatttggttctcgtggaatcttcatagaatttaaaagtcatcaagataaaaaaaacgctgtctcttctctcctctgaattccatcagttgcacgaacagaaactgtcagtcacactcgcatggcagctgacatttgatttcccaggctcgccgccggccggcggcgccggcacgctcgcctcgtccagccacgcaccgccgccgtggctgtcgtcgccaccgccggctggtgttctgctgcgcgccggcggccggtggacggcgctaggcacggggaacggccgcggtggcggtgtgccgccgttcgattgtctttgagcggtccagattgagtgatcggtgtttggtcagcgattttgtttgggccttcctgggtgttttctgggcttcaggcccaataccacacgtatcatttccaggcccacctctttaggagaggatataagaaaattgagatatttaaatcgaggttagatgttagcacatgattaatggatgagtattgattattttatatctagaaaattgattaatataaatttttaaagtaattttctatataacttttgatagaaaacgtacgtttaacggttcaagaagcgtatgtgcgtggaaacaaatcttccatctttctagttatctcgaacgctgtcttagtttaaattttagattagactgcagctgccggagttcatggcatggatgaagcacatcgtcgccggtcgccctcacccgccgctgcggccacaacgtccatcgctaggcaagtagaaccctaacatttttaatggagcgcactgtgcacataaatttggatatagagattgtacttgtactcttgtaggtgtaattggtatgtgacttctcacagttggtggataagaggtacctgtccttatatgcaaattgcactatatatagtctataaatagatcatataatgttatagataggacaggcctggttcattatcaaaacaattaaacctgaccaaatattaggaatatagtggattttggtatacttttacactagtgactttcgggagagatttgggattacaccatcatataaaatagaacccgtctaaatgttatccccataaatagacttcactaaaatggcattctcaaatagaagctacacgctaaaccttttgcaatttaaaatgatagaaatgtcatttgtccctctacttatcttccacctccaggctcggtgcaacaattggggtgggaggcggagtcatggagctgatagggtcaacgagatgatggtagatcccttaagtcaatatcatgtgtgttcttcagtgataaggcatgcactatcactaccacctaccacattggagctccacaaaggacagttggtacatgagcatgatgagaaaggacagccaacactggagttccgtgagaccaggaacttgaggaggttgtggctacataggagcttgacgaggacaatgatgcatgggcttgaagagatcacaacgcgagagctggatgaggacgacaacgtggaagctaaaggaggttggcgggacttgtgattgagcattgggccttgagctggtggcagtgcgagaaagtgcctaggacggtagtgaaacatcaaggactaaaggacggatccagacaacaagcatggtagaggagggtcttcacatggaggacataaggaggaaccatggcagtgaggggatgaggtggccacaacagcctacaccccccgaggagaagacatggatgatgaggttcagccagaactagaaaagaagtgaaggtccaagggcatttctagtgtgcagctctttttgcaaatggtataagagtaaagcccatttacataatgatatttaggttaaacctatttttacgatgacataatttcaagtttttcgaattttggtagtatggggctctgtttggtttaaaagttcacaaaattttagtatacttttaagaaagaaagcttccaaaactatcatattttagcacgaaaataatggtcggattttgtttattttgtgcccttaaaaaattggtaatgataaatcgataagatcaaaatataaacatatctacatctcttttcttttagagggtctattcgactgtttgatatagtatacacaacacaactagccagtatatccgttgccacagacataaattattgtgcttgctagctgtgttgcagccgaacacaaacccttccatatcccaaccgtatcctctgattgtataatgtcaccgcgtgacattacttcaatccacaccatccaatctaaatcaacggccacagattaattggtactccatctaactaatcaaactaactagcagagtatgtactatgtaggtatgtacttaataggtgggaaggatttttttttaacactaaagcagtctcttcatcttcattaaacattaacccatcggcttgtagattaagaattgccccgttccgacgacagaggatgtggcagcacaaaattgatgcacaggattcacttcctccaggataatgtgctaatcgctgcatctaacaagtactaagtgaaacctaattatcatcatgtgccgattcttccaccagtcaacgatgtttgcctcttgaaaatgcaatatctgatctagggacaattatagctgcacaatttactaattagtttgattaattgcatgtcaaataatctacggccgttgatttagaatggatggtgtggattgaagtaatgccacaccgtgacattactgagtaatgtcagaggatacggttcgttccatatcatgcagattacctatctttggtatcggtacaacagctatcttatgtaaaaatttctttatgaaaaaaaaacccgtatactttttttgttttaaaatatataatattcgattagccactatactataaatgtgaaagaagcacaaagaatactactacctttatctaaacttattttataacttgaaataaatttgatccattccataataataaatctacacatattccctcctcccctcttccaaaaaacccccaaccttagattgaattttttttagacgaaggtagtccttccatcccatgaaaaacaaatatagtactggatgtgacatattatagtacaaataaatcttgacacatatgtctttaaaaaaaacttaacctaggcaagtatgtgacatctattacaatgaatctggatagtcctttgtcccgatttattatactagaaaatgtcacatcccctcctagatttagtttttttagaatagagggagtatgtatgtccagatttatagtattaagatgtgtcatattcggtaatagattgatttttgatgagagggagggagcggttcagatggaacagtagtccatccaggcaggcacctaggaaacccaggaattatggccgcatttatgttgtcggtatcacccgtatcacatcacaatacgtcaatatcacatccggatgactaggtaaaccagtgccggagtcagtccagtcactcacaaaatttactcgccggaaaacccaaaagaacggaaaagaaaaaaaaagtcaggcagtcgtcgccgtgctcgccgcggcggggtccatcggtgtcgccggcgccaccaccacaacccagacgaggggagacggcatccaggatccagcaataatagcgcgtcgcggtggtcgtcgtcctcacctaatcccccccccccctccccatccatctattctcagccaaaagctcccctcttctctctctccctctccctctcgctttcgtttcccttttttacccc

SEQ ID NO: 9723 - DNA, 982 bp, Oryza sativa
atatacatacgcagttacgcacacggcattgtcaagaaggtgcaagaaaaagttgagctggtatttttgaatttctctcttctttgatacaagaatcttactacatgtacataaagtagtttttttttttggcaatcttcagaagtttcttttttacaaaaagacaaaaaagagctttggcttacaaatcatgaatttgttactcaagccaatatatgtagagatgaatggaaaaaaagtgcttgccactccaaccaatatatatatatatatatatatatatatatagagacacacacagccactctagccaatatatatgaataagatgaaaaaaaatagggggattaagagtccaatgtcctaaccgctagaccatggaaccattcgttggtacggagaacaaaacaaatctaatatccattatatcaaattcaggaacccatttccacataaattccaaggatttattctgacattaaaatggaagccaagaaccactgattgatgctaataacatgccaattatagattctgaaacatgaagctccatctcagaaaacaaacgtatacacacaagtatgaagcatatatatttacctgaagttggggtcatccctgtagctgacaaattcagtctcagaaactgctactccttcctcttgagaggaggaagcagcagcaactgcctcttgctccttggtcaccacagaagcagaagagttggatgagctgctgctgctgcacagaatgctccctctggccgcctgtggatgcttcttgcagagcagtgaagagctgaggttgcctgtgaggaagacggggttgtggacggcggcagaagcaggtggagcagggagctgcagccacagggaggccgccattgttgcgcctcctgccctctcctctgcttcctcctcccggtgaggtgagagagagagagaaatggaggtggaaatttgggggtggggggggggggggg

SEQ ID NO: 9724 - DNA, 6054 bp, Oryza sativa
taatttgctatatagacaaggtggtagtgttacaatgaagtttgaccaccaactgtcattgagtaaacactattctttaaaaaaggtgaaagttatctaggagagggatattgtcctttttatatcattctaacttcttccaggaaagttaccagtttgatgtgaactcgttatcaacgaatgtcaaaattaaagctaacactatcccagaatagttattctagtgctaaaaaggaaaaaatatattagacaactatgtgatcttctaggaaaacaaggaacaataaataactcattaaattgcataaccatatcacatatagtttattaatatctaaattggacttttcgattttataaaataacagttaagcataatctatgaactcgcttggttgtgctagctatgggcaataccaatagctaagccaagccaaatttcttctagcaataatagggcggctgcactagccggctagccctatatttttgctaatttttccttatgtctttttttttgcaaataaattacttaaattaaaggggtgttcgataatgttagatgtgattaatttacaacctacagctacagtaaaaacaagaggatctatggtggcagctgcagctacggctgtacaattgcaatgtagcatagccgaacatcctctttgtaattttattggcatccattcagttgataaagaccacagagtcatagtaacacagaggatcctagcaaaaatactcttcctctttctctcccctccagcgcagcttgcaagcctccacgacccaccatcatgtcatccgtggcttaatgacaccccttccataatcttctccattttgacacttatgcccctgccacctcactgcaaccatggtgtcatctgcaggggtagacatgtaaatctctcccaagttcagggtggctttctggccagcccattatatatcactctcatggcaaggtggctcctgtactactctgcccattgataggctgctggtgatcacaagctacacaacacatcacacaagcaataggcatctctctcttctttctctttctcctccttgcttcatgtaagcttcttcttctctagcttactttgatcatttccatggtttcatgcatgcatgtttagtttcatgatatatatgaaatatcctatggatttttgttctgtactttttttaagaaggggtttttgttatggattttttattgctgttggacagttggagtactagagattaatttcttgaaggagagaaatgacaagtgtctggaagaccaaggttctcactggactcaacaagctctttgacaaggatggaaagaaggctgctgctgctgagttcttgaaatcattcaacaaggtagctacgaattcatacacagagacacttgaaagttgtaagtatagtttgtgtttattttcacaattttttttattgattgggtgtcatatgtatttgtgtaggaggagattggcaaggagattgatgacaagaagacagagctagagcccaaggttgtggaggttgttgagtcatctcctcctgagattaaggtaataatttttcaggtgtttcataggttgcttgaggacatccttgctcaagaaataataatttgcatgcttatctgtaaaaatattgcaggctttgttgaaggacaaaaaaacagccagcaaaatcaagaagaacggtcctgcagtcactaagttccttgaggaattggctaagattggtaagaattggctaagttctaattggcttgtatttgattgcatggggtattgactagaataatcacaatatgtaacttgtcccctttttttatattttcgttcaaaaatgcatttttaatgaaaataaagaacctttatcacttatttccaaaatgaatcgtaacataaaaaatgagttatttttttaaaaaataatttaggtgtcatttatgaatcacctttttttcccttaaaaaatagtagaatccgtagtttcttttagcaatcatgtttattcattttcttatgtttttattcgatagagacctatactatttgccctctgagcaacaatctagactttattccctcttgctagaaaattgaacttcagaggaatcttctcgtctaccatgtttccttgaacagaatctcacatgcaaactccgtttctttagctgacgcagacaagaggccaaaccagtcgaacaaaaaacaaacgaaactaacacagtttttttttattaaacttcagccacttatttttccaatcatatataaaaaccaatccttttatagtggattaattttatagtcttaagaggtattgggaggcatcaatatttttaatacaagttttggtacctcctaatactggaggtatagaaaggtattaaattttacattaagaaatatcggtaaaatcaattttttatatatctgaaaatatttgaacatgtctgttcctgaatagacatatttgctcgttaggtagtcctaaaaattatataatttttatgcaaacaataaaagatattttaaatttccattaatatttttacaatgaaactaatgcaatcctctttttttttttcagatttccccggagccaagccggtgagcgacgcggtggccaagtccggcacgacgccgctctccccggcgatcgccttcatcctggagaaggtcgcgcctttcgttcccaaggaggagcccaagcccgagccggaggcggaggcggcggcggagaccacctcccgggaagtcgccgtggaggaggagaagaaggaggaggaggcggcccccgccgagcccgccgccgccgccgcggaggcggcggcgccgtcgacggaggtggtggaggagaagaaggaggaggagaagccagcggaggcggcggcgccggcggctgagccggagaagcagtagtgatcactccagaagcaagcaaagctaagctagcttagctaagcttagctgatggtaattaaaatcaagattaaggttaatgtgatcacactactctctctcagtctctgcacaaaaagtaagtaaaaatcaagatacacacacttggcatgcaagaacatttgttattgaattctttcaccctttgatcctttcatctctctcctatatatatatatggtcgcctcatcggttgtaaattaatttatgtggggtttcttgttttttgggggtgattaaacatgtgtaattatattcatatgtttgttggtcatgatcataaggagcttgtgtatattatccatatctttttttttcttttgtttacaaattttcggcttgaggtgtgatgaagatagacatatatatgcaccctctccaattgtaatacaaattaatggctgtggatatatgttcatatggtacagtttgttgttgttgatccattggttaccttggggggagaaaatctttgcttacatgtcgtgatcaacttaatttgattgcgtatacatactacgtaaacaaaaatatggataggtgggaaggacatgtctggcctttgcaattaattgttccatgagtgataccatgtatgatatgcatcttctcgtacatactagtacgtacttcatctgacgtttggagcaatattcaatcaaatttgtagaattttgaccatcaaatctaatgatattatgatgccaaggcaaatctaactcaaacatttggaaaattattgatagtcaaagctttaaaagtgtaactaaatcttatcctaaatgtttaattcggatctatagaatcttatcctaaattcggggtaaaggcattatctagaaaattgccacacatatagattgttgttctgccggccaataaattaatttgaccatggtatatgtataaaatctagtaacaaaagtgtatttctcaaatatcaatattacacatatatatcccatatttatgtatcaaacgtttatacataaataaagtccaccaatattcttttaggaaaacatcaacgcgtcatatagaaaaaaaaatcaaagcttgaacattggacttcaaagctactggacctaagtaatgacatcaccttgatatatatatatatatatatatatatatatatccaaacttttcctcacaagataagcacgaggaataatataaattcagtgacaaataagctgggcactactactactgctgcatgtgtaccaaatcatggcacggaagcttaattatttagagataattacttaggaacctgaagcaagcaagcaagcaagcaaactgagccagatatcaatcagtgccacggcgaaaacgacgtgagcttgatcctaatcacgctctgcttcttcaatcgatcgtcactgcacgcatatctttaaaggggaaaaagagagagagagagagagagagagagagagagagagagagagagagagagagagagagagagagagagagagattgagaggggagttctaaaaagaaaagagttcttaaaaaaagattgaaagggagaattaattaattaattcaacaaaaagagaggacagagagtgagggctcaaaaagaaattaagaaaaggaggagtaaagatgttgattgatatttaagttttgccttgatattttcttttgttgtttaggacaggggcaaagtagtcatttcagctctttaattttttttcccttctaataccttgggcgctttgtcgctgttttagttcatcactcaagcttgcatcacaaggtccacacacatggagtacttcaatgacaatataccctgtcgccaggaatgtcaccgtgaaaaataggctcatagtatgattaaatctagctagattattcatctattggcttaattaattgggatttattcactttttacctatgaaataacttcttgttgattcgcttcgtctggttctatttactgagagttaggctgtgtttggaagtattgtttaggtgggctaattctcttttttcaccgttaacatgctttccaaactacttaaaaagtgtatttcgtaaaaagctttctatatagtttttttaatcaaataaattaatttttttcaagtctgtagtagttgataattgatcacgtgtttttcctagtagttacatataccaagttcgtttagctagaacggattagctgcaaccgagcttgaacataaacagataaatacaattgcttacagctgaatgaattgcacaagaatgatgtggctatttttaagtttatgcactcggtagaaaaaatgggaaagattcataggaatctaaaccatagggaaagctggttgtcaaaggcacaatacataataaaccatgggagctagattccttccattggtcgttttcggaaaggataggtttttgataaagacaaacaggggatggaatattctttttagtggtatttaccttttctttgactcgctttagtttgtctttatataatttgtatgatcatattatctattatctagggagtaaataccataaaaatatatttcctaaagaaagtgtattatagaaaaaaaaactaactcgacacatatactctttacaagttatagagcatgctgcttagaaaatatctaccatacaacactatcgagttagtgagaggaactatttctacatacagttggaaaaggaattgaagaagatatttccatgttttttccctaatattagctagtgcaaacaattcttttaagataaaactgatctcatgttatcatttctttttggagtttagttggacaagttacatagagttgtcttgaatgattgtgatgtgttggtggttggtctggtggtttagccaagccaggaagtccagggggggcacagggctaggagaccaggaccaccataagtatggctcaagaatagagattgatggttcccaggcctaattacctcatgatgataaattgaatatttgaatttactagttatcattacaattatgaatttcaaatctcactgattgtccatatctcctttttattaaaaaaaaacttagaaa

SEQ ID NO: 9725 - DNA, 5199 bp, Oryza sativa
ctaaaagaaatgacaaatttgttgtatgtaaattagaacaatctgaaaattactgaaggtggcatccggtattcagatcacgcctcctttaccgaccaaccaaacaggcaccaagaacagggtgcactgaatgacggagtctgaaataattaagtagtgttctgcatttcttcctcgcatttcctgcactgcttacagcgcattcgccccccaaaatttacaacttctgttatacgatttaccgtgtaaaaacagcatcctgattcctagacaggtttgctgctgaacagttctagataggcactgagctgcgtggtagtaactgaagaaatgtacacaaaaatgtggtcagtccttgagtttagcaggattcaccactcagtcactcaccacgaaggtttcccagtgcatcatcatcatcatcatcatctgaaaccctgaatgacgaacccaaaatgtttcagacaagtaccccagatgtcaagcaggatcaccatggcgcagtggcgatcttccgcagcgcaatgtcatggttcctcacgctcgactccatctcctccatctcggcatcgatcttcttcagcacatccttcactgtcaacatcatggactccagagccttcaccttctccccagcacgagaccgctcaagcttcagctcattgtacttgctacactccgatggatccctcggttgctcggggaggccgagaatatcgtcaacgcgcttgagcaagaacgcaacattcattcccagcaggtcgaatgactgcagcgtcttcttccagatcaggaagtcctcttgcgaggaggtacccgccccgcaggccctgatgccctcagcgatgttgatcgtctccatgatcacccccacgacgagcgtgaggctcagctgcctcagcagatgcctgtggaggaacgacttctgggcgcagcacagctcatagtacgtcctgcgctggtgatcggggaacttgcagtcaatgaccaagccgtccacgacgatgttgaagttactgtagctcatcacgtcgtcaaagctcatctctgagtctgaaaacctgatgccgtctattgcttcatgaactagattctgggtatcatcatgagccactttgctactgactctagtagtctctggatcctccttaggcttggtggcattatcagtagcttcttctgtcatgtagaacacagcacatgattcgggagattcaatagttagtgtatattcccatgtctaacacatttcaaggtgcaaaactaacaacataaactttgactcactagatatcttccgtttcttgcaggcgtaaaaactcttgagaccgggtgctctgtcagttgggctgatgtttttatctctaattatatgcacctgaatgtaaggcatgaagaaacaagaggtaattgtattgttggattagggaagactgaacccacaagggaactcaagaaatgggtatgaatgaagattataaaggaacaatcaagtagtagtagtagatttggaagaaagttatcaagcatttcagaaacacttgccttgaattttgttgtgctcacaagctcaaagaccacaacatcgccaaccttgatatcatggttaatcgcaaaacctctccatccagcactgagtccctgcttaccacccaggtaatttgtgttatggttgttcccattctcatcttcgagcacaatgtcagtgtcatgctttgggagatacttgttgcagaagccagctggtagaccctgcagaggagaacaataatcagatgcagagaaaaccaaaaagaagtttctaggtggcttgtgcagaactagtgtcagccattttcataaacacaataactcaagcagtaagagctaacatgcaagaaatgtacataagttggatataacttgtatgtgtgagacttctcttcctaaaacaaaatttaatgaaaaagattagaagtttagaacatgttaatagggtagtaggaagttttaaataagatccataacacgctttaaacttttactttctaattttagtgagagcatttgtttgacaaataaaatcttctaatagtaaatgcaatttgtatgtttctgcagaaggtgcttctccacagcctgttcataagaaacaattatctaaggcttcataaattgacaagcataagaaaagttagtaatctacaacccttaccagccaaaatccgctgacaacatgggaatgtaacatatgttcgacaaagctaggatgctctgctggtaacttcgtttgaatctcttgagctctcttcatagcagatccacagaacgcctgaacactagatttttttggaagataactgcgtgtgattgaacaagcttgtgagctacataagtagtttttttcataagaagaacaaggagagctggaataccttgcacatttattttggcccttaactggcacctgttaagtcacaactcattcagttatgagtaatggagctcaaaagtgcaacggtttcgtatacattatacaggaattggaaaggaaatggtaaagtccactgaataaagattggagatgtgttccaggattacattatgtgatctttttttttcgaattggaaaaccggagatttcagccagccaatcgaaatcctaaatgctatggcttatgatataaaaatctttaggggtattatgagctttatagatgaaaactgaaagtcctcttacaattacattcatactgcattcatacaatacagatagagttggtgaacatatcttacttcagtggtgttagtgcgtccattgctagtgttctgggtattgcatgtttgaggaatgccaggaaccgttctttgctcattttccacctcctttggcatcagcatcttgcacagtaagaaatccaagaaaaatcagaacacttaatcaataagttgtttttgagatgagaattaataaatgaagttatgagataacaaggaggacagatattgtgagtttgtgcaattgaaaatattgttgctacatagagtgctatcaatgatgtagcatcattgacagggatgctctaaatagagcacatgtagtttatatcatataaacttacaccattgtaaacagataatcatataaagggaaaagtctatttgtcccttgaggagacatccccttgttttgtgcatgtcgcccaaaacatcataaaaaagtttaagaagatttgacattatagatcaatatgtgacacgatagaacaaaacacactatttgtaatcaaatttattgtttttgtttttctacttgtataggtcgaatttgaacttgcatgtttgtgaagagatattttacatattgatctatcttatgttttcaattttttatgactttttgaacaacatgcacaaaacaaggggatgtcttctcgagtgacaaaattccacccgctaactaaagcagcactgcccttactttcaaaggaacaacctccatcacgtcatccgtatcatcttcatcacaatcaattattatagcctgtggagcaacaacaaaagcaagattataattctgcaagtacaaaaagaacatatattcttgatatcatggtaaatacatgattcttataatggcatagatccaattaacccttgattattataggggctaccagatgttaatgagcattaacagaaaaaagaaacataagctagaaataccccctcctttccataattcaaggtcttttagttttgtcctaagtcaaaacttctctcattcgatcaagtttatagagaaatatattaacatctatagtactttatagacctggataaaattcacagttaacacataaagtgaccatttaagcaaatacagcatctgataatttgtcatgacttacctgttcagagttacaaaatttgtgaacctacgggaaactctttttaatccctctttcttgtatgtcatccaaatagttatgaaaaaaatttgataagatactacctccgtcccaaaatgtaacagcttttggctatgaatctagacacacagttgtccatattcatagctaaaaatgcttatattttgggacaaagggagtagattaatatgtgatatgtcacttcataaacatgcaagaacgagcggatagaatccagattgtgaagtgacatatcaacatacagatgtgctgcgatacatgaattattcagggtagcatttaagtagaagtagataatattatcaaattaagaatccagattgggcatacacccaagtattgtagtatatgcctctcccattttttccagttagaacctgtcctgatttgaatgccttgcaacaacaacaatgtatgtatcgcatcaatgggaaatgataatgcaagaatctcaccctcggcccaatatcgtcatccctgtcgctgccactgctgctgtcaagtaaggcgagcctttgatggactagttccatcttctgctccatcttgttcttcgtgttcttggaacctggtggtctccctctcttctgctcaagaacaaccaaccaaaggacaagcgaattagattcagattacccatggaagtaaacaccaatatttcagtcattaaacagaaaacaaaaatcgtatccaagaacgagcagtacaaccaaattgatcaaagaggaagcaaaatctccaagaagatcacagataaccatataacatagctgaaatatcagatcactccgtcatccgaaaaaaaaagcatggggaaattttcaagaacacgtctctctctcacacacacagaacactctcttcagtctcccactcggatcgaagaatcaaaacaagaaaagcagctaagaagatgaaatctaacacaaaagacaaaaacttttagcccccaaatccgccgccattaatcgatgattcaagagagagtggaacaaatcaaagaaccctcggtctctaatcaaccggatgaacagtgaataagcgaagcaaatgacccccaaaaaaactgggtttaatcgagaaacgagagatacagatagagagggagaggaaagaacttgctttgatgggctgatctatcgccatcggccggcggccctcgggttgatctctccgaactcccgctcacctcgattccgaagtttgtgggggctttgaggttttgaaatgtgaacgggaaggagaggaacgagccggctcttcagct

SEQ ID NO: 9726 - DNA, 3705 bp, Oryza sativa
ctccaaataagcgtagcatcaacgagcacattgcacacatttaacactacaatcaacaaatcccaatttgcaacggtcaaaatcacgaaatttgcaaaaaataaaaaattggttctaagggttaccctccgatctacaaaattccaccaatcaaaacgaaaaaaaagaggccacaatggaggagaataccttgctcttcgattagcccaaaaaatctcatgaaaaacggctccaaagtgagtggatttgaggaggtaagggaggggggagagagagaaagcgcaacagccctgctcaggctggggaggggccgaatgggtgggtagggggagggggtggggcccgcgcagttaagtgttgcccaccccccgaggggagcgcgccggtatggctggcgccaggggggtggggggtgggtggacggggcgctgtcctcctaccacatcagcgcagggcggccacgtggtgccatagtggcacggggacgacgccaaagatgttggtgccgtccagttggaccacggcggcagcgcctctggtgccacaaaaagaactattcctggaataagtttttccaagggtctctttgtaaaataagttttagaaaaggaccaaatcgtaaaaaatctagaagggtggttgggggtaaaattagttgaaaattaaatgaggtggttggtaagagaagtatagtactctatacattgttatattcaaggacaaatttcaaaagcttgaagtccttatatttgtcgacggagagagtagctttatatttcatactaaatatgaataaactttagaaacaatggttgcacgtagacagttgctgaaccgactctagcagatctggaggaaaaaaaaaagaaaacttaacacacctaaacttgactctaacaatggttgcacttatagaatcagtagtcactcgagaaacagtttgtgacttcttgtagcatacacacatagggggaatttacccacctaaacttagtctttctaagttcacacatttaatttgagaccataggatttgaagtgttattaagaccatgctgaatagtgcactaccacggttaaatatttttgcagaaaaaatccattaatgaatgaaactttctgaaaatcataacacaagtatactgattctctcttactagattagtggtggtgacatatatgtagttaaagaaggtgcccttgattgataacccaaaaaattagtctaacatttgaaaatataaacgctgtaactgaaattcggataagcccttaagaaaatcttattcttttgcatcaagcttttgtataaagtataaactgactaactgaggtagtccaacctgaccatatacatcactgtactgttcaagtagaatgaacggcaaaactgatgggcagatctagctccattctgcaattgaaaatcacatattagaaaaccttggaactgatgttcttttttctttttacaggctgacatatactgcaaaattactctgatagtagtctaatataaaggaacacatgatactaagtacacatgagcacgtaacaaatgtatctaatgtcacaaaattgtattcgagtagatgaaataagttttatgacctctcttagtatgcgagaccacttattgtatgcaataaccattaacaggtggtcagattgtttattatctgctgtagaagcagatccatcaaggttttcattcatcaatgaagcctttgccttctccacattttgcttctgcattatcaatgaaacaatgtcatgatagtgcatatccagattatataaattattgaccacgataatatcataatacctcatcttttggagagatgaatggggatttataactcagaaaagcagcaacagaaagaatgggagataagcagccaaagatagcaccatagagcatcatctgcagtcgcacagaagacaaatcaaagcaaaacattaaataggtaaagtactacaaatgctccacaaatcgatggaacaaacataacaattactgtcattatttgttaataacatgcagaaactatttatttctatgaaccctgaattatctgtatagaactataataccattgggaatgctcaaagggccacagatatgaaaaataagtggtaaaactcttactgttagtcaattacagaggtgtgaaaaaatacagtattgcctacaaaaattactgtgcactagagttaagtacataaaaggtaggaaataaagacattccaaagggacatgaagaacataatagagttgtgatgtactgtaggttcttctttctttaatggaatgacatgcagttcccatgggcgttctcggaaaaaatggaacataataaagctcactgaagtttattgtgaatagggcactgtagtgaagaactgaagattaaagttgtagttaaggaatggaatgaaaaaaaggtatttcatatggaattttttttatgtacataagaatatagattaggcatgaaaagggctgggctgtctttgtttgcacgcagattgaagaaaagaaacaacattaacaactatctgctacttcgccatttaacatgacaaacaaaatctccaatgcaaatgtgaggttagatacagcaagctatcttttcttatttggaaatataaaaagttatacaactctaatgcctacaactaactcatatatttacatacattgaagaatttatggtgatattgccacacagccatgcacagacaaatgctagcaaacaacaacatgtagctagttactatgctgaaatgtatgcattaaatatctatgtcacttttgatgaatgagccagaaaattatattttagccgcacctttccaatcaaaacatcaactggcaatttggccaaatgatagccaagaggtgataattcctcatgtccttcaaatgctccaacctacacatgacaccagacagtataaagtttggttaagaactacaaaaggatatgccaaaaatgtttctgctactaatatgcacacatgaataaagatttatatgacaaaaggcagaatagaacctgatataacaagtcaatagcagaggagatagcttcttctttagggggttctatggcctgaaacaatacgatatgaaatatgattatttggcatcacaatttcacagctgacacaaacagaaagcagaacttctggtaaagaaaaaaagtagaacagatagttgtccacaaattcctagcaaaaactgcatcaactaatgatactgcacaaacacattcagagaagcataaccgttcatacaatcttagagagatcatgcaagattgcatagatgcatgtgaagaaaacaaaaatagacaagtgatgaggataagataaaatatacctttaaaagaaatgactttatgccacccagatgaagtgattttatttgcaaacacagctcagtcaatggcatccgcagcatctcaggcaccttcaagcataatagacagaaatatcaaagcatgatggttacagatgttgcttaggacaattgtacttgtccttagcaaaactattaacataaacatagctcatgttcgtaagcaaactcatttttttatatgttacagatactaaaatatggaatctctggtgcagaatttgaatttagtatctttttgtaactagagaacctgaaatgggcgcatcattttttca

SEQ ID NO: 9727 - DNA, 1178 bp, Oryza sativa
gccgccaccatccgacgacgtcgccgccattccattttcatggtcaaactcctccgccttcttgaccatccgatctctcaccctgctaccccgatcgccgccacaaatggcgctgctgccgacgccatcgacgacgacggcgccgccccccaccaccttactcttcttggccaccgccgccgccgcatcaccaccaccaccaccatcgatggcaagactcaacttcaagttcatctactcctcgtcaccttgaaatcccaatcgatctccaacctccaagagaaacggattgatgcaatatatcttcttcgtctgttctccaagctctctcgcatgcggcaatggagatcaatggcggaggaggaggaggaggaggaagaggaatgggtggaggcgaaggcgagggatatatatataagcgcgggaattggaggggaatctggcgcgaaatctctcgatcggcgtagctttggatgcaagaaatgcctatgcttcgcggacgttttggctggactcgccattggattccaagaaatggatatgcggttgggtcgtttggctttcctctttgtcctctgcaaaaggatctatctgtctctctctctatgtgtacctgtcatctgtcgatattgtaccggttccactgctaggctaggctaggctagctatctccctctctgaccctctctttctctggtctacatgtagcttggaaagaaattgttcattattagtgtttgtgttaacaatgtgtgtgatagatgttgacaattagttattactcatatatagtagtataattccagtgtcttagtatattgtaccaatgtttatgctttgggttcaattgctatatgtcatgttcataccgcaggggtgtgcttctacactgttatgcctggtcccgtctgaccatatgggcatatatatatatatatatatatatataaattgctcatgacaagcctcgaccgatgcaattttatattctgggggaggtaatgttcagacttcacacttcagaagtactccaatatagtttaaggtttgtaagctagctttgagattccactatggttgttactagtatattacataacaagcttaacattgactcatgcaagctatagcatcatcagcgtgtacgtcaagaacatggagcatacgttctgtggact

SEQ ID NO: 9728 - DNA, 4509 bp, Oryza sativa
tagcctttttcctttttgtccatggaaaaaatggttcccaactttccaccgatcgcttagcttagctagctagctttagtggcttgtctcgatcgatcatctattcatcttattgtcgatcagagaccaaccatttcggcatatcgttcgatctatcgcctaactttgctgctagctagccatatatatttggatttatattgttgtcaaatactatatcagattgatcgatcggtgatcggtctatgccgttgctgccgatgacgaagctggagctcggccaccgcggcgaggcgtgggagcccggctgcctccgcgccgtcgccggcgagctcctcttcaccttcctcttcgtcttcatcggcgtcgcctccaccatcaccgccggtaaatcgctcacgactctctctgtactaaaatataagatattttaggtcaagtttttattcgtctttgttattacaagaacaacattaatcgattgtgtatgatgagtatatccgtatttaccacgtgcggttaattattttttttttcagggaaggcggcgggtggggccggcgaggcggcggcggtgacggcggcggcgatggcgcaggcgctggtggtggcggtgctggcgacggcggggttccacgtctccggcggccacctcaacccggccgtgacgctctccctcgccgtcgggggccacatcacgctcttccgctcggcgctctacgtcgccgcccagctcgccggctcctccctcgcgtgcctcctcctccggtgcctcaccggcggcgccgccacgccggtgcacgcgctggccgacggggtgggccccgtccagggcgtggcggcggaggccgtgttcacgttcacgctgctgctggtgatctgcgccaccatcctcgacccgaggagggcggcgccgccggggacggggccgctgctgacggggctcctcgtcggcgccaacaccgtcgccggcggcgcgctcaccggcgcgtccatgaacccggcgaggtcgttcgggccggcgctggccaccggcgagtgggcccaccactgggtctactgggtcgggccgctggcaggtgggcccctcgcggtggtggcctacgaactcctgttcatggacgtggaggacgccggtggggcccaccagccgctgccgcaggagtgaagtgaagccggggaaggcgcgctcacgtgaggtccacgtggcttcgggagattgcacggccgtgtgcgtgcgttttcggccgttgattggtgtaatctccagatggaattatttttgtacgtttgatttttttttccatttttgttaaaaaaaatgggaggcgtgcgtgtaaatttggggtttttttttgtgtgtatgtgccggtacaagtgaggttttgctcgttgaaaatatgatgaataatacgtatttcaaatattgttcgtgtctgatacaataacatatatgagatgagtctcttctacagtactttcctttggcgtgagtcaatgacatataggctcgctaaacatgaagccaatatatcatacacgaacaatatattaacctgctggaagtgcaaagctcaatgtaaatgcaacttacataagtgaaactggtgaagcaagtgctaggattatcattagagattgcagggggttagtgctcttggctgtgtataaaactctgcaccagtgtacctcagcagctgaagcagaatctttaacatgcttagaagggctaaaagaagcaatgaagtggattcatatgtcgattattctggaactagacaacgctgaagttgttcaggcgttaacaaagcaggtggcctcaagatcctcttgggcgatgacaattgcagaaatcaacagtgtgatacaatgtatctaacgggtgcaagtgcacaagattaagagagaagcaaatagggttgctcatgttttagcgcaaatggcaatgagtattaggtcgtgtggggagtggaggttgtgtgccccctcaccaatcctagacttgttaaaccagaaatgtaattgtggcccggagacacggtcgaagcatgctcgcaccgtgtgcgtctttcaccacatgctctggtcccgggtttcttcctgtggtcttctagcgttagaagaagtcatctgcaacgtcccctcacgctgttttttggggggacaaacaaagatcaggaaaagacagaccgaacccattcggtgactttcgcggtcatcctcactgaaccgacttggatctgaactacgattcagatcaagtcttaccgaaatttgatttccttttcatgccatatgttgtttagactttactttttccccctttctgtcctttcctctatttggttgatagggtcttcgttctattctaattctaaacccattgtcgtccacagttttcttgtcaacgcgaaggggcaagcagcccccaaacaaagaactcataccgcggttgtggcttgaaggcctcgctatttagccattaataaagtttctctcttaccctaaaaaatatcagtcacttttttcaattctaagtgggttattgatgttgatcgaggatgatttggtggatagcatcgtgccagtaatcaactatcaacattatgcatacatgacgacggtgcaatgggactatcatttgtgcgacgtatatatactacggtttggtatgctattattgactaaaaattgggcaacaaaactttcgatttttcgatttgtctttgcggaggagaaaaattctaatggccgcacgatgtacttgcgtacgttttttttacacatatattttatacactctatagctatacaatatgggaagggcctacgtgtcggacacccgatgctttggggaaaaatcgggcgctgacgtcatccgatttacgtgcaaaaactattttaaactgatttttctcaaaaattacttatccaaatcatgatccgattgcaccattaaattcgttataattaaatcttcaaaacaagatcacacatggatatattccgacgaaattttttttagcttattattgaattatttttaaatgttgcacgatgttccaccgggtatatcggaattgttttactaagtagatcggaaatgtttcactcgtttaaatcgggtgttgtttcaccttatataaaaacaatgtttcagcaaatagcgaaacaatgtttcagttcactgtaacatttgatccatacatagtgaaacattataagtacactagatgaaatattttcggtagaaaaaaaaataaaacgaatttccttaatagggggtttctaaaatatgtgggttttttttgttgcaatggagtatttcagttcactgcaacattagatctatacatagtgaaacattgtgaatacactaagtgaaacatttttggtggaacaaaaaataaatcaaatttcccttaataggggatttccaaaatatgtgagtttttttttttgcaatagagtatatggtgaagatatgtggcaagtagtaaggacacatggtgggtgtcagggttatggataccacatacctaatagtagtcgactaaatctcggcaggacccaccacataccgtgtcctatacggaaacaatcttcggatataggaggagttccgataaggaaaggcaaccaaagttctacatggaaacgatgagaactactcggattgtatccatattggtttccctagttctacttggacaagggaacacctatgggtataaataaaagcccccctaggaggagagggggcgattaacggaggatcaacactcaacacaatcaacatagaggcctacatacgccaagacacgccgccggatattgacttcagggataagcacggctagtaccctacggtgtctccggatactgtcaggagagacaaaaacgctatctctgatctcgccgggcacggattcgaggaggaaggctaccctgttgtcgactacgagtcagatcgtcagaccgccatgtcgacaacagttagatgggctaccccaaatattatactggtgtgattatcatgaataaaagcaataccggcttcggccaacagaatgtacggttattacctgataacttaggggcctgaacctgtataaaaatccctgtctccgtctcttttacctcagtctcgcgtatatcctaacaccaacgatccccatactgtccaaataccgtagtcgtgacatcaaacgtcgacagtggggtcccagtagaaacacatgggcacgtcgtggagggaggggggagcgcccgattttctcctcctcctctgggcgaccgagcggcagcattttcgtacaatatgagtatactacagtctacacttatatttgacttttttttgcggattttctaaggaaagttatatatctcgtcgttgtatttggtgtttgcggtactcatgctttgtgtatacggagtactccctccgtttcgaaatgtttgacgccgttgactttttagcacatgtttgaccgttcgtcttattca

SEQ ID NO: 9729 - DNA, 2505 bp, Oryza sativa
ccttttattacagtgagccaatgaggtcagggagaggaattatatgatgagatgtgcaggagacactacagctgcacaatatctcatttcatgagtaggtgttattccttgtacgttaaaacaaggggagacaccatacctctggctttcttatcaattctttcagaacagcatcaagtgttacgcgaagttgcttgaataggacagcagtctgtgcagcagctgccagccttaaccatccatctatgataaccactcctgtctgttaaaaaaaaagacaataagtttccccactgattacaattagctaaagataccatttaatagttaatgcacaaaaatatacacgataagttaataaccaacagtttctaaatgaatttcccttaaacaagaacatgggaggaaaaattgcctaactgatttaaacagatcgatgtgaaactgaaagccctaaaattgatgcaatttttcacttttcacatatattactcacaaaaactaataatttatactgagtagtttctcttttgattgacaagtgccaatatctaacatgtgatgtgagcacaagaaaaggcacaggcactgcatcccttatagaaataagaggatgggggttcggtatcttaagcctaatagtctaggattggatagagaccacaatacctgatgttggataaccatggtaccaccaaacagaaggagcgagtaaggagaaataacactagtatcacgtagaaataccttacttgtctcaacctgaatatagggaatagagagaatcaaaagtatcagagattcaaaaatacaatattttttcctcagatcaccatcgtaaatacttttttatatggtatatcattccacatttctacaagtgtatcttatgcaacataatgataatggtgcaccccattcatgttcaagtcaaaaggataccttctcaagaaacaccaaaaatggatattgaccagctttcaagctgtggttcatagatgatgggtgtatgtgaacttctcgtcgtccatcataccatcgaggacggtcctttccagacagaaaatcagatggcttcctgccacctagagctcctggatcaacaccctctaaagtagctgcaacattagggtatagacctgcgcatatgactgactgcaaatgccacataagcattttccagaaatgaaccatattagcgtcaaattgaactaagtgaaacaacagcttatacagattactaaaggtaaacaagcattacactaggatattaatctcatcaacatgatcatatttattttgtactttggcacatgttaaaaaaagtcaaaaatgtttagcaatcatgccattaccttgacaactgaggagtaacgagcatataagttaaatggaagagacatattcgcaaaccaactctcaagagtatttttcctcgttccatccacaggcctctgaaaaatattaggattaattgacattagaagatcgattatgatgtctgtccccgttcaaattagaaatagaggactttggcagcatttggctgggaaagtacattaccaatttaagttagggtacccttttaaagttcccaaaaagaaactaacttgctccctcaaatttagtccttttttaacattatctaatttttagtcttcatgtgactttgaccattgcatttataacttttcattggtataaattagtcaattgtaatatatgaagtgattgactgaactagtcataaggttgtcactaaggtgctaagagctacaggagcctatgtttccaactacaactctatatgtactgtagcatttagctgtccaatcatgtgatgattatatattgctagtcatcatatacttagcttgtaggacaaaaggactagagatacaaaattgtcactgttatgactcagtcaactaaagaaaatgaacaacatgatataagtctgcattccagtaaagatgatatccctagtgcaattctccataatgaaaagacataccaggctatctttaggaatatccaaaagtccaatgtctgctaataatgtcccatactgtagtcgcatgtctctgaaagggtaaaaaagtgttattgtgaaatttagttactccctctgtccattaatataaggacttttacccttcattggagagactaaggatgagagaaaaggatatatgcccctcattaaatgagtattagttagggagggaagggtggttctggattttttgcaatttggtccttttcgaaaacttattttacaaatagacccctagaaaaatttattccatgaatggtcctttttggggcgccagagacgctagtgctgtggtccaactggacggtgccagcatctttggcgctgtccccgtgccaccacgtggctgccatgcgctaacgtggcaggaggacaacgctagccatactggcgccacccctcccctcatggctccagccataatggtgcactctccccagggggccggc

SEQ ID NO: 9730 - DNA, 2423 bp, Oryza sativa
gggaggcgcggcggccgggaacggcgtgcacgagctgctcgagtgccccgtctgcaccaactccatgtacccgccgatccaccaggtgaggttctcgcttgattccgcgctcgcatacgcgtcgtgtgggatgcgatccgtggggggttcggaaaagagggggggggggggggatctgtgtgcgtctgggcttgggagcctcggaatcggggttgaattttagagcgaaacaaagagaggaaaatgtcgttttcgccatgcctgtcatgatttgattcctcttgtgattggagcatcatatccaattcgatcattgatacaatgatactggcacaatggggggtagacttcctgttggtcgttcagaatttcctgggatcttggtgttctctgggctcccgattggtgttgtgtattcctgaataatttcggtgatctgttctgttattctcgtgcacgaattgctgacttagcttatcgatcggccgattattgttcaattcctgcattatttttctagtaattatagagctcctttttgacatatagtcgatgcctaagaagaagcaggaatgttgaatcttgcgaatgatcaactgttagaattagatggctaatatctattataatctggaatgagctgccaaaataatcatgccttcaggtcattcggtttatctttagcagaatttataaaaaatagtagtacctttaacatttagccatggtgagttttcccttttagcacaagttataaaagggaaggaagacgacggtacttgtgaagtatatatgttgggtagaagtatagaacttaattaacctaaaaatggatcattcgaagatccttagagaatacatgggctgaatttcaataagcaattctaaccatacactccctttcccaattcgttgtgtcagattgatctagtggtgtaaacctgaagagtctcattatgtagttctgaacttctgatctttggatatgattctcatctctttgaatttcattgcagtgccaaaatggacacactctgtgttccacctgcaaagctagggtgcacaaccgttgccctacatgcagacaagagcttggtgatatcaggtgtttggccctggagaaagtagctgaatcgcttgagcttccctgtaagtactgctctttggggtgcccagagatcttcccatactacagcaagataaaacatgaagcgcagtgcatgtttagaccatacaattgcccttatgctggttctgagtgtgctgtggtgggtgatatcccttatcttgttgcccatttgagggatgatcacaaagttgatatgcatagtggttgcacattcaaccatagatatgtcaagtccaacccacgagaagtcgaaaatgccacctggatgctgacggtaagtacctatagactgtggcgctcttgttattcttattgaacttataagaccttgttggtagagataagattatgttgtgcagattgtattatagaaatattggcacattgaatcgctgtctggtgaggaggtcttccactgtttcgggcaatacttgtgcgtgcactttgaggccttccagcttgggatggcgccagtctatatggcctttctccgtttcatgggtgatgaaaatgaggcaaggaactatagctacagccttgaggtcggcgcaaacggcaggaaaatggtatgggagggcaccccccgaagtgtccgggacagccaccggaaggtgcgggacagccatgatggcctcatcatccagaggaacatggcgctgttcttctcggggggcgaccgaaaggagctgaagctgaggatcaccggccggatctggaaggagcagcagaccccagacggtgcctgcataccaaatctctgtagctaagcaatcacaacattcagaagaaacaaagaaactcaactccactttgcggccggataacatctatcccgttgccatgtcttactgtttttttgtatgctccgaggcaacgccttcatgttgtacctttgctaaacaaacattaggagggtaggacgctcttgtaaagtaaaatgtgtgtatatggcaccccatatcttacaggttggctgatcgagcgttcaagctctctgttgtcttcagttcggctggatctgaaactgcatttttgcttcctgttattaaattgtgaattccattagtcccacaactgcaagcaaatttcagttatctgcatcagcaaatttcagcattggaagcgaagggtcttgatggagatgtgactatttttcaagtgatggctctggttattctgaagagctacaagttgacagcaaaacatggttgaacacttgattttgatctgggagatctacgatgatatcagcagttttgatcagttatcagttattctggacgattggcatggg

SEQ ID NO: 9731 - DNA, 9735 bp, Oryza sativa
attcctgcagcccggatggtccaatatctcagtgcttttgagatttactgcctgcaggtagcacaagaaaatgtaagatataactagattagaaaaaacttatgctacagatggttaatacagctgctagttaacgatataatgtccacatatccaaccagacaaccagtatccaagcaaaaatgtatacagcaggcagacaaaagactaacctcaagagctttgcagactttatcaacctcaccagcatagttgatcttctttgatgtcattataagttcaacaaccgcaatacaattttgaacagaaggatcaaaaacaggcaaggctacagtaccatgaacattgtaactgattgcatggttaaggcgtgggtactcagtactgctataatactgcacattcggtgtccactcaggaaccttttgtttgtacacacgcccaggtagccccagctctccagcattttctccatccaccgagaacatgtacatcatggatacagccctgtactgaagaagcccaatactctgctggtcaagtacaaagggctgtcctgaagtagtaagcacataccggtctccactcttaaccggtgcccaaacttgaaccagcagatgctgatctgtggactccttgaagtatctaagagcctgtgtaagcctctccttaaacaagcatgagctgtccgtgttatcatcaatagataggtgaaactgccatttgctattaatctgatcaaccctcttactagtcgtgtcagaattccctaaataacagaaaagcatgcaatactatcaggaaaagaaggcaaaaagtatataaaagaagaagggataataacattgctaattgaatggataataagcttcactacgcctgaccattcgttccaaacctagagctattgcgacaaacaaatccatgtttcagtaatgatacactatgtttcttatcaagtttgataactgtaattgcttcatgttatttttcaatgaagtgaagcgaatcaacaatgctgcaaatcccatcaccgatccaaaaccatttcttgagtcaccaattaatgaaatggagtagtcctaaattgtcctggtattaaatactagtataatataatgagacaagcaaagcgttatccaactgcttcaactatacaatctagctagtactgtccatggcgtcataatccaccacttaatccacgctttagaggcaccacaccattagagacacacaggaaagcagtgctatgcattgctataaagtaaaatgagtcaggcaacaatagcacttcaaaagggtcatcttttttttgtatgcacagttaatttagtacagcaaatactccccctacctcctatagtggaatccaattaaccatcaaccgatcttggcaatcatttgcattaaaaaaacgcgcactaccaccacgaagtcagacagaaagaaacataaaaattaacacataaaaactagtagatagaaagaaagcacacaaattaaacaaaacgagcatatcattgaaacaaaacacataccaactaactttacaacattttatccattctgttgcaagagcgagtgcaaagattctgtcttgttccataaatcaacagggcaaatctttatacagccaagaaatatgccaaaaagaaggcaaggaagtcaaacataaagctcggaaacttcatggatcatgcactggaggtaaaaggttagcgtcccaacgacaggaataacagcaagattccagctgcccctctgcttcaactttggagcagccagaaagattcccaaggaacgaacaaatctacaaacccgagccaaagatgagaacaaaatcccagtgaaggtcaatttcgatctttcttttttctcccttattcgttccaaattgtatgatccagcaacaagaaaagaaacgcacgaccaatacgaagcaaggaggctcaccggagcgggtccgatggacttcctcgaccacggcggcggcctcggcgggcggagcggtggcgggggcagcgggggcgcccatgtcgagcgggagcagctggcgctcgtcgaacagccacagcggcgagggcggcgtgagccacgacgacgacgaggccggcagcggctgcggtgaggccgacaccgacgagaacagcagcgacgtggtgagcgagtcgaacggccacaaatccccacccccgccgccgattcctcctcctcctccttcccccgcgcccggcaaagacgacgatgggtcaacctccatccttaatcctctctctctctctctctctctctctatctatctatcttctccttcgcttccacccaagaacctcacttcactcagaccgcgctgcggcggcggcggcggcggtggaggaggaggcgacgcggcggctgaggaggaggaggaggaggagaggcgggagcaggagtggggagcgggaggggagcttggccattatggtgggagaggaggaggagagaatggagtggagggggatcaaatgtggctggtggtggtgtggcgggtagtggaccggaataacaataagataatggcgacgattgcgtggacatgtgggggcagatccgatccgctcatgtcgctgccatgtggggcccaccaccctcacctggtgtgtttgggtctgattggaggaggttaaagatcgtgagaagcaattgatttgcagccatctttcggaaatcttctcatttcacgtaatctagacgagaagttggattgtatgaagtagtttcgaattatgagagaaaatgtgtagctgccagaaactcccgcccttttttgcctctttccctttttcctgccaaataattggaggagccttggagttggagctggtgttgcattattgtttgcttggcggttttctgaatctacacgaattatgagggtacccgtggttatcgtcttaccgaaatgaaatctctcggcaaatcggtaactgaattttaaaaaataagtttatttgaatttcactagttttcgtcgtaattgaataataaccacggtttatcaataaaaatgctcatctaggtattaagtgatatataaagtcttatcaagcgtgtatgaataaagaacggataagtcatttcacaattcgcacaagttcaaaaagaaagtcaaactaaacctcaaattttaagaaaatttgtctaagtttcactcattttcatcaataaatgaatggcactcacggttattgataaaatcgcttagtagtggcgttcaatgactaagcatttttataaacctgagaggtggacactatataccactattttgcccttttatctatactttctataaatttataatacactaaatacctaaaactacacatacaagcatagtatttgttaatacttctaagttattaaaccattcaacgaccaacaacaaagttgaatctgtgcattcatccatagcaagactattaaatatattcatgttgaaaggcactttatatacttttttttaacccactgatgatgtcaaggttccattttcgtaggagagggactcaaatagtatgtaaatgcaactgccataatcgaacaaccccagttaatcacacataacacatacacacaacttttattacaaaagtcgcaagtggccgatgccatcatttgtttacaaagttacaaaacaattttataaaaaaccatgttagattcatttgtacatgtgtacatgtacgtagtgagaaaatctttaacaagcacaagtgtgtaatgtaatataatcgtaccggatagaatcacggcaccctcatgaaaaccgcgagcactaggttggctcacagcacgggagagttaggtcttgtttagtttctaactttttctttaaacttctaattttttccatcacatcaaaattttcctacacacatgaacttttaactttttttctttgaactttcaattttagcgtgcaactaaacctacccttagtattataataagagcaaagttgtcgccactgcacgaaactcgaccgcgcaccacgccgccccctcctccaccagatgcaaccccaacacaggcacataataaatttataaataaacaagggtggcagccaactccccgggtggtgcactccagcgtggcaataatcgatcgcgctgcgctgcgcacccccgagaccgagaccaccaccaccaccaacaacgacgacaacgtgcgcgtccacactccacgggcaacgcagccacaccacgtgtagcgccatcagtgggtgggcgtgcccgcgcgcggggagttgcaaactgcaagcaaacgcgggcgttttctcgcggcaaccgcgtccggaggccggcggccgcgtcgcccaccaggtgagctctcgcgagtcgcgatcggtgcagcgcatgcacgcacgcagcggtagcgcggcgtttttgcggtattctagcgggcaatcagcgggggggaaataaaccgggggtgcagcgcagcgcgtgcgatcccgcggcgcgcgggcgggcgggcggagacggggatgcatcgaagagggtttgattttagagcatcacttgcgacttgcgaggggtcgcggcgtgagcacatgcgggatgcgtggacgctgcctgccctgcccaggcgcgctcgggtggcacggggaccacctgggctggatggatggccgattggttggcggccaggacggccgggatccgagactgccaggtcggctggagatcgcatctgcctgcctggagtagtggtgggaagtggctactggttagctcccctccagtccctgctgcacggaattgcacggagcctctcttaccaacataccgagatcatcgcgtgctccctctgtcctaacatatagcaacatatttaagacatatcgtttgagctactgtgcaaaagtaaacgaataaaataaataaaaatatttatatgtaaaacttttatattctgccgttagtggcaccaaaaccattattactaaataatgaaatatgattaagttcaaactttacttttgcccttttgcaatctgggtgttactacatttcacggtgttagagtgtcgaacacgtattagagtttgtgtataaagtcggttataatttagaacttggatttgtactgagcaagagtcggactctatcatagattctctcttaaatagagagacgtacatgttttaaccgcatgacgatttagcataggcgagtggtagactgacaaaggcatccgatcgagagtcgttgtaactctgatatattgcaatatgttaatctaggggcggatccacccattagacagggtgggtcgaccgactcagctatgactcgtgtcgcctcacatccttaagacccatttacccccttataatagtcatgggtcatcaaaattatatataataaggtgtgaacatctaacatattatggcagctatgcgaatggactattaatataatatgtgatgtgtttgattgctcttattgagtaaaaatctccgttctccgtctgtcggatatatgggcccgggggtatgcgaagtgaggggaatctaccttcccatcctgccacgtgtccctacaacctggtcctgcccccgcattccgcaaaccgcaggagcggccggggggtcggggcctcggggtaccacgtcatacccctcgggcccttgcactgctttgccccgaggccctcgcccagccgctgtttggcgggaggagcaagcgaggagggggcccaggctgaacttcctttaatgcgcgcagcgccccaactgccccctgtcgcatttaatgcagtggggcggacgtgcggcgtgctgaactgacgcgcaatggtcaagaatgaccggtctgcgaccggcctgacgccggtcacgtccgactggacggacaaccgtgctcccacgttgcatctgcttccggcggagtggaggtaggtatgacccgtctcatcggggagtcattcggacggtggccaccacaagtcttcacctattaatgagggaatgacagggttgtcccccgtgtcaggcaagggacggcgctgggccccgcttaaggacaagctgtggtttagcttccaggtgaaggcacgggtcgagttccagtcaagatagggtgggtccccacccgaaagaagagtaggtagaggcggtgcatgtggtatccccttgaggtataaaaggaggaccttgcccaccgagaagaggaggactctgagaaaacatgaactcgtggaggagggaacaaagagtgttctcccgagtttaggaacccttgtaactctcagtctaaatcccacaggagtaggatattacgcttcatagcggcccgaacctgtataatttggtggtttgcgagctagctgggagccttgggaacggatacgtaatttctagaggcgagctttttcccccggccgaactcacgaaaggggggtctcacgatctcccgctagagaggatcactcctcgacaccatcccatctatattttaaagctgcgttcgtcagttaatcaataacctagagatgtagtcttcgactgaaatccgtgatcaaatattatctcgggtctcagagtcgtcatcagttttatatctcccatagtgtttcttccatgattggatcttgatgtactatcggggcctttttttaccacactcagccattgtttgcccggtgttttaggtagtacgtgtacgtactaataccctaccaatctaccatacatccaatacccttactgtggccgcgctgcgtccatccaccgatgactgatccacggcgtctctggtttggccacatggcgacgatcccgcaaacactgcttgccctgattgatactcctcttgctacagtaatatactccctccgttttaaaatatttgacgccgttgactttttaagtacgtgtttgaccattcgtcttattaaaaaaattaagtaattatttattttttttcatataatttgattcattgttaaatatactttcatgtatatatatagttttacatatttcataaatttttttaataagacgaacagtcaaacatgtgctaaaaaatcaatggtgtcaaacatttggaaacggagggagtactcagcaattcaccatataaacaaatcacaacatgggccatcaaccttgcctaacaaaggtgcgtacggaatcgggacgcctcttgccgcctcccatccgatacgcaccagggggtactctgcttctactactcttacgcgaggctgcgacgtggtgactcgaacagttctggggccttgttgtcgcctgcccgcgacttgacactttgcctcaccatttttgattaattattaatggctacgagaaaaaaaataaggcaaagggagaaaacgaacgaacaaacaaacaatatatatccagacactgcttgtatgtttgcgtatataattgcgtgtgccacattatatcaggattgatggatgagatcttcgcgacaggtactttgacagggaaatcatgctgatcaacgggaataggtgattttttctgtgctcatgtttagcttcttctcgatttttctgcagtcaaatccaattgtatatatatgcagctactattacacaagtccatgtcgacctcgatcggtcgacctgcaactgcaacttagctaaaaaagaaaaaaaaaagaagaggaccacgagattgaatgaccgattattggttgcatgccgaccacggaattatgagaaaacgacggtgaaattatatggtacgttctcatctcatctccttccttaccttcgatagggagcggaatttaaagtggcggagcttactggttgtctagtggcggagcttcaacaagagccaggagaggcttcagcttatgctgaatccgaatggctttggatacgatttgcggaaggcggtgtgtatatgctctgtagatactcaattagatccctttgtttcaaagaaaaattatagaaattttagaggattccattcatataggattttttccctatagccctttaaattaaagtaatgaacctcatgacctatgaaaaattaacataaggtggaatctcatgtctcaaattattgtgttttttttgtattttgtaattttctgttatacacttgtatttctgtcaaaatcttgtgtttttttctattcatctatttttccactctattttagaaattagggatcaattggtcgtcaacaagtattgcacaatctattgttaatggtattactagcaatgaaaatagtcacggaaattcctgatggccgaggtattatttctgtgtaagtcatatcggttttttcaaaatgtaaaatttgattactttttttagtttcttacagcatcatattgatgccaacattaagtagttaaattgataaatatgattaattactgaccaaccaatcatcatttttgaagagatgctactgattttgactatttctgatcgtttcatcgctaggtaatactacctctattttaaactataaggaattttctttctattttgagacggaggtagcataatattacaattttaaccatatgttaattttgttggtttttcaattcaatttttgttgaaatgtgcaagtgaaattgttttaaagttctaaagataaaacaattttgttccattcatacttcaaaaataatatcaataattacaatccaatctatactccgtatttcttatattactttctattttcttatgtttaataacttcaaatttcaaaattgatatgtatctatctgtatgttaatgtctcaattcggtaatgttgctataatttagtctagaggtttaaaactaataagtatagtttttatatacagttatgtatactatttatctgccaacgtatttatacgcgcttgaggtatctcatatttagcataccaacataatatcaattatagattttcataataattaattttagatttacatgaatttagttagttcttgtgaaaaaattgtaatattcatgtgttccaacggagagggaacaaaaaaaatgcatactcaaagattccgaagcataaatctgaaacactttttttttcacaatttccctttcgaattcactagtggatttacagtgccaaacgtgacctgatatatgctgttgcatatccgatatttgttccatttttttgggtggaatcatgagcatcttccatcgctttcccaaccaacgcccaacttgcccacagaaaaacactaaccaatggtcgatgggaatttgaaacgactacagcacctctcggacaaaagaatcgcatccacaagccagagcactatggacatggacatctactgcttctttattttatttatttgttttgactaacaggtctactactactaatcaacaggactaataaagcattaccaactcgtagtaagtatacttaatggtgatgataaccatcattgattggcgtatagctcatgaatgatggatccatgcatgtcgatggtcagagagttgcaagtgctgaattttgtgtcgaccatcttcttgtcaagcaatatcagcaactagcaagtggtttgcttccagggagatggacagcaaaggtttgttttatctaaaataacctatgttcaagggagagggacatcaaggttaattagtctacgattctatgaacatgtgttatgtaatcatgtttgtgaagctaatccattggttc

SEQ ID NO: 9732 - DNA, 38813 bp, Oryza sativa
taggaaaagaattaataattgcttaaattttttgaataagacgaacggtcaaacatatttaaaaaagtcaacggcgtcaaacatttaagaatagagcgagtagtaaattttcttgaatacccaaggaaaacctgatccagctttagggagattgatgcatgtttaccaagtctctaaacggtatgatttttgttaaaaataacttctactttgtgttatatactacaagtttctatcttgtgctcgttttctgaacggctaaacaatgtgatttttttccaaaaacaagttctattgaaaagttgtttttttaaattatttcaatttactagtacttaattgatgtcgttccgtttagcatgcgggaagaagatcccaattcatttttccttcaaaattccttgaaacgacctcgaggttggtgacggttcaaccatccataattctctcattttcctccacgagctccaaaattcctgtgtgttccaacatatttcaaccatccacaattctctcattttgcaatgatcaaaactctagtacttgactataagcggcacttcgtccagacggccactacaaccgtactacttgattaaactctaaaacaacatttgcaattgcaattagtattccactacttgactcacctacactatcgtagtcagataagagtagttctactcatcaattcaatagctgaaatttatttttccccgaacacgaagcgaacgagagctaattgaagagagaacaagatgaatcgatttggggattgctgaacatatttttttttccctttccgattgcacgaagcgaacgagagctatttgaattgaagagagagcaaaacggaatcgatttggggagagggaggggctatagacgtacggagatgtaggagcaggtggggaggacgcgcatgccgcgctcccgcgcgtgggcgaaggcggcgtcgcagagccgcgccgcgagcccacgcccgcgcttgctccccggcacgtacgtgtgcgccatctccatcaccgctgccggcgtcgtcgcgccgccgccgccgccgccgtcgccggaggaggaggagcgcggctgggcggcggcgaggaggcggtactggaggtaggcctcgccgtcgggcgtctcgaacctcctcgcgtcctccctccacaacacgacctcctcctccgccgccgcctcccgaccgccggccttcgccagcgtcgcagaccctggtgtgttcggccccaaattagattgcaaagccactggaatgttgcgctgcctccgttttttcctttccttttgtttttaattttactgatcaaactgcccgtgtgttgccatggtaaaactaaaattatgctaaaaatatttagtgaatatagttaaaactagttgggtggctagcatcaatttaaaattatctattttttaatacatgattttatttaaaattatcattcacataattctaataattttatagtttttaaaaggtacgccagtcgctaccccttcctcgggagcgcctacggatcgggcgatcgattcggggctgagaaatcgggcgcgtccgatttacgtgcaaaactattttaaaccgatttttctcttaaattaattatccaaatcataatccgattacaccattaaattcgttgcaattaaatcttcaaaaaaagaccacacatggatatattccgacgaaaaaaattagcttattattgattttttttaaatgttgcacgatgttccaccaggtatatcggaattgtctcactaagtagatcaaaaatgtttcactcgtttaaatcaggtgttgtttcaccttatataaaaacaatgtttcagcaaatagtgaaagaatgtttcagttcactacaacattagatttatacatagtgaaacattatgattgcactaggtgaaactgtttgatggtattttggtgattatacatgtacacaagacttactcatgatggacaaagcaaacaagcaatttgtaagttggctagcttatcatttctatgcaatgcttggccatgtatatacacgcaaatacatgcatgcacaggcagctggggatatatatacttagattagtataggtgcatgtataattaaccaataactagccgtgtgaagattggctggtgaggcaatcacgcgcatgcatgcatgtactacagtagacggtcgtatgtgtgtgcatgcctgggtgattaagcaacctatgcatatccgagtgattaatcatgggctcggcccatatggccgaagacgatagctgcctacgcgcgggtggctggacctctatctcgctaagatttcagaagttaatatgcggaagagataaaaccagatgaattaagagataaccaacaaaccaattgattttatctctataacaaacttgatcgagttagttacttcgcgcgagcgctagcgagacgcttatcactggactgtggcccagcagcagagaaacaaagcgaattacaaatcaagtttatctctattgattatttcttatctatagaaataatgatgaaggaatcaccacccagctgcgcatgcgcgggcggctgggcctccatctccccgatgctcagatatttgacgccgggagaagctaagagataaaatcaaagaagaatatgaacagataacaaactggtcgatcaagccttatctacagcgaacttgatgcggaggaaacggcgtgcagatgcggtgagcaccgacctcagatgcctatataagacgtcaacccctcggcagccaggggcattgacgaacttctccacacattcatagaccaacgcatctagcatccacaagcgatcgacacacaacgcagccatccatcctcgacgcggccatccatcctcaacacaatcttccctcgtcatcaacacatccatcatccagcaccggagcaacagcgcgtgcgcggccggagcacaccgacggtggcgagcggcttcggacgaaccggcgtccggcaggggagcacgaggagggagatggaatcgatggtcttccaaggtaaaattaattaagatctgtttccttcttatttcatatgtagcacgtacatacgcatgcatggagaggcatcaactagagtatggagtagtacactcgtgcggccaagtcgatgtgcgctggcgtcatggcgccggatgacggcagcggctatggagaacacctcttttggttggttctcgtcgtcagggcgcacggatcgctgccggcgctctcacacacacatctacatcatcatcacaaccatgcatggagaacgtgaagcgaagacgacgagacgaccacaagcagcttaatggaggttctcttacaggcctaaacctgcggaggtaattaactgggagcttatcgaggccccaggaaccaggagaccacatcgcacaagttagatctgtccaatgacaaattatggagcgcacatacatatatattacattgggaatttatatttatgatcttttaagattaataaagagaatgttccctatgttttgtttacattgtgtatcttggtacactggcacgctcgcacttattttctctctaaacatagagggatatattttcgtatttttccatcctaaacagaaacatttttcggtggaacaaaaaaataaaccaaattcccttaataggtttccaaaatatgtgggttttttttgttacaatggaatatttcgttaactgcaacattagatctatacatagcgacacattgtgagtacactaggtgaaacattttttatagaacaaacaataaaccaattttccttaatagagagtttccaaaatatgtgggttttttattgcaaaagagtattttaattcactgcaacattagatctataaatagtgaaacattatatggatactaggtgaaacatcttttgtgaaaaaggggaggaagaagtgggtgggccaacaggtagcacatgggggaggggcgcgcaccgggggagcgcccgatccggctccccccacgccggtcgcccggcgacaagcattatcgcccttcctcctatgttatttgcttactcaatttaacactacttctattcatacttttttgaactttaaaaattaggccttatagtttttagaattcattgtcttgttggctttcattttcaaaatttttagaagtatcgtcaaacatcgccaatttactattctacgactcgtccactgccacctctctttattgttattgggattttagaaatcaaacataattattgtttgtgttctcttttactttctgtaagtctcgtcaaatcgttagtggctttgccactatactcctctgaagtccgcccactgcctcccctccttattgtcattgagattttaaaaatcgaacatgattatcattggggtttattttttactctccataagtcccgccaaccatcgtgaccatgctgcttaacgacatgcctatcgtcactcctcttaatcgtcattgggattctatttggggttttgtttatagtgtttagatatcccatcaacggccagcaatctactcctttacaggtctattacttctcctctctttattgtcatttgtcatcgttgtgttctagatgtatttttttaaaaaaatgtatatttttaattccgataatttttattcataaattatattcctacttgaactcttctaattatttttaatcttttgaaatttattttatttataatttcgaattttaattagtctcgtcgtttgttttagattgtctcttatttcaataatatttatattttattacaaattttatttattttataatttgtatttaagttgagatcttatttttctttttctattttttgaatttattttattttttatttcgaattttaattaatctcgtattgtgttctatatagactatcttttaatatttcttattttttatttccaatttcaattgttccaaaattgtattcctacttgaactctctctctctctttttttttctaattttggattttatttgattttttatttcaaattttaattaggaaaaaatacgaattacccctcaaactatcgcggtcgtccgaattacccccctgaaccacaaaaccggacatttttcacccccaactatgcaaaccagacgatttacccaccttgacccaatccatagtgattttgtccaacgtggcgcacacgtggcaatccagtcaatgtttttttaataaaaaattgtgggacccgcatgtcatctcttcttcctctctctactctctctcgctcttttctctctcacgcagtgcacacggcgaggacgggcagtgggcgtggtcagttggcgaggacggcgcagggacgggcagtcggcatggacggtaagcaaggacagcgcagatggcggcgcggacggtgcggacattagtgcggagacggaggcggcggtggagctagctaggtggaggactccgactccggcaactcgttgatgcgattggcgaggtaaggacggcggcgcgcggggggcggtgggggcccgaggacgacggcggccggcgatggaggcggaggccgaccgggtgcgaggggacacgcggtgggcggcgggctcctcatcctcgtcgtgggcacacgggaacgcgcggtgggcggcgggctcctcctcggcagtggcgcgcggggatgcgtggagggacaccgccgccatcgcgggctcctcctcctcatcgtgggcgcgcggggactgcggtgggcggcgggctcctcctcgtcgttgtgggcgcgcggggacgcacggtgggcggcgggctccttctcgacggtggcgcgtggggacgcgcggtgggacaccgccaccagcgcgactcctcctccgagccggcacgccgcaccccgtcccagctccccgcgcctcgctccctgtccgtcgcatgctctcctcgtccgctggtgatgcgccgccgctggcatagcgaaccgggcccaagggtgggaggaagagcgcgccgccgccgtctcgcttgcctcaccttgccgctgcagcctcgcttggcatcacctcgctccgccgccacgctcctcccctgccgccgccatcgccgctccgtgtctcccgtcgccgccgacccgtgagagagagagagaggaagagtgagacagagtgagagagagagaagagagagaggaagagggagagagaggggaagtggaagagtatgacaggcgggtcccataattttttattaacaaatgctgactagattgccatgtgtgcgccacgttggacaaaaccgctctggattgggtcgaggggggtaattcgtccggtttgcatagttggggatgaagaatgttcggttttgtggttcagggggtaatttggacaaccgcgatagttcggccggggaggggtaattcatactttttccttttaattaatatcgcgtttcttatatagactcttctttcaatattgcttttaatttcgaattttagttattttcaaattgtattcctacttgaactcttctttttttctaatttcggattttattttattttattccaaattttaattaatctcgtattgggttcttatatggactcttctttcaatattccttatttttaattccgaatttaagttatttttaaattatattactaattggactcttctttttttttctaattttggattttattttatttttattctgaattttgattaatctcgtattgggttcttatatggactcttcttttaatatgacttattcttttaatatgacttattttcaattccgaattcagctctttttaaattgtatttatatttggactcttcttttctttttctccgattaatgtggaaatttttagccccacagcgaacgtagtgacttctttcaaagctgttataatataatagatttgtgataagagccgacacatggtgcctagatcaattttgtcagcaatgagaccatccatatatttttgtacatcaaatttctgcataagcccgattgatcaaatgtatcccgattaattgttgaatagtacattctccgttcaacaaccgtattccgtctttcatgaaccaaaggcgaaaaatcggagctagaagaatgaactaaaggtgaaaacagttattgatgtccatggatcatttttggtgatggccagtgatgtatgcagtggcaggtgaggtccaatcttggtgtattatgtggtaaagcttgaaaaacagtgaacttgaggtgaaccagtcgaaagccaaatgacctgggttgaaccaacagggccatggcaatcctctccctttcctccagcatggcggcaccctctctccattccctctagcacacagcgctgctctcccttcccttcagcaggacattgttgagaagggccatgtgtgaggggcatggtaggcggcatcctaggacatggcacattcccggtcgctcatcgtggtgtccgggctggatagaagcgatgccgttactggcttattgcctgcatggcgtcgagaggccctatggatctgaggatgctagcgtggttagcgctggatttttcatattttggtccttttgaaaaacttatttcgcaaataggcccctggaaaaacttatcccagaaatggtcctttttgaagcgccggagtggctggcgccgtcgtccaacgggaggcgccgtcaccctgccaccgtggcacacgcgaaccgatgtggctggaggagggcacctgccatgttggcgtcgccccccctacccacccctcgtctccattcctgtttctctgtatgtagttgtaacggtgtcatttttgttttattttttcagatgttttttcacatttagaatcacgatacagccaaccacaaaaaaatttaaactcgaacgaaatataccacttagctaagtctgaaaataactagaataccacttagaccataactcttttagtaaaaccctttgatcagcatgttaaacataatgcactctagcaccatatgaaattacttaatctaattcaaaatataaccacatgaaatgatagccataagttaaacagtacagagagatgcaattttttattttattttatttttttgatattttttttcacacttagaagaacatatgaactaaaccatagaaaaaataaactcaaacggacaaaatatatgactcgtagaattttccaaagctctaccaaaacggacaaaatatgtcatttattaaaatatgcgtaactttctcatacggactcggaatcaagcaaataatatatccatgaatatctacagaaaaagttacatccgaattccgtttgcaagattgtgttttcgaggagagaagtttttcggtagagctttggaaaattccacaggccacatatttcgtccgtttgagtttatttttttatggttggttcttttgagttcctaagtgtgaaaaaatatcaaaaaaattaaaataaaaaaaaagttgcacatctctctcctctgcactagttcggagagagaggagaggagaggaaaaattctacatgtcacatattacgtccatttgagtttatttttttatggttggttcttgtgtgtccctaaacgtgaaaaaatatcaaacaaataaaagaaaaaaagaaaaaattttgggggggcgggggcgccagccaatctggcgcattccccccagccacctcagcatcgccccgccacgtcggcgtggggacggcgccagccactctggcgcccaaaaaaggaccatttctgggataagtttttctaaggtctatttgcgaaataagtttttcaaaaaggactaaaatgtgaaaaatccaggtggttagcgaggctagatctaggctaatgaaagagtagggatgggagtggaatccgttggaagtctccagataaacttttgtggtgcctttttgtcttttcatgttttcggtaaagaaaatattttctcaaattgctggctagccaaattgacacgtgactaaaccgccacacgtacactatataggactactgtcgctataaaatgggggttatgagggtaatttgtctggtttgaagagttcttttttttctttgggggagggggggggggggttaaatcgaactactacaaaagtagtttaggagtgtaactcgaactttttccttcttgtcaaacatgacaggttgcagatgcagtgcccccacgagtaccacctctaccgtggactttactttgtaaaaacatattcatcacctaaacaaatgtgaaagaagtaaataataaagaatctctcccccaagtagctagcaacacatttttgtatgcacctgtagcacagtactagtagttattactattgtttatcgtctttaattagcgcaaaaaaacaaagaaagatgtgcagttgtattgctgaagaaaacatgcatgcatcgatcttgagagaaagcaaagcacatagataggctaatttctcctttaccttattatctttcatgttttcggtaaagaaattattttctcaaattgctgactagccaaattggcacgtgaccaaactgccacgcgtacaccaagtagaactattgtcgctgtagaagaggttaggagggtaatttgtctagtttgaagagttctatttttgtttttggaggggggcggggtgggggtgaaatgtttagtatttgaattgaggggggtaaatcgaactaccataaaagtctaggagtgtaactcaaactttttcattcttgtaaaacatggcaggttacagatgcagtgccccatgagtaccacctctactgtgggctttactttgcaaaaacatcatcatcacctaaacaaattggaaagaagtaaagaataaagaatctctccccaggtagctagcagcacatttttgcatgcacctgtagcatattactactccatccgtccaaaaatataatcatttttggatttcaacacagtcttcgagatactactttgactaacaacatctataaaactaagatgttttaaataaaaagagttgcatattataatagtttatttaatgataaatccagtaacatcaattttacataattgatcttttttattttttttattaatagtcaaaattaaaaatgtttgacttaacactgtgctaaaaatgcttatattttgaggagtagctatgctatggtttatcgtctttaattagcataaaatcaaataaagatgtgcagttgtattgctgaagaaaacatacatcgatctttagagaaagcaaagcacatacataggctaattctcctttacctttttcttttcatgttttcagtaaaggaaaagagggaataaatcaatggaggcgagaagcaaaccaaggtgcaaagcacaaagcaaggaacccctgcgtatgctagcattagtggaagggaagcgatcgagaagataccaaaccaaacgaccaattaagctatctattcatctagctgatcgagccttctcctaacatccgtctcgtgctcgcgctcgcgcagaagcccatctatccaagcattccaattgctgctgcttccatcggtcggccagaattgctgcatgctgttgtcttaagttatttggagcattcttcagttcgtccatctagcctgacttcatacttgcttcacctggctcagggcctctggcgctctgctctatatatatactcaggtacgtattagtaataactaattatatttcttgtaacaatgcatcaacttaattaatttgcggctcgctcgatcagtgttacttagtttatttgttcatcgatctttgaaaaaaagaagaagcagttctactgattatatatcaaaacatcaattgattatatatggttgatgtaattgttgtgtatatgtgtgtaggtggcgagtggaattgatcggttgatacaatctgatacgatgggttagattaattgattttctgacgattctcctcttcctgatcaccatgattaaagctgtacaccttctaattgcactttcacattctcgaattatatagcatgtctatttctgtgtttatttccttttatttgatcaattgatttgagacgttgatggcttaacgtgcgcacataacatcaatattagtcgtccatatatatatatattcgcgattataattaagtatataagtgccggaatatatcttggcttggggagggggcttattaattagcgccaaggtgtgaaatggtttagctagcatattaaaacaaaataatatgcatgcatgatgttgtttcaatggcctaaaggaactggcatgcatcgatgtttgccaatttttatctctagtaaagaaaagcaaagtagatccccacatgctcagaacttgtttattatttttatttgaacagaacaaaattcactagcagctggtgataaaaaccagttgattacatatgcactatacctatagcatatgtatgtatgtgcaagttaaccatgtatcatcgacctatcgagcacgctgacgttaaccaagcaagatggtccgtgaatagaaaagcacagacactttattctctttttccttcaaaaataaaattcttcaaaaatgacacatagtttgttaaattcggactccactaagaccccgaatgccagaaatatttttcctacatccgaaggcatcatgattctccggtaaatgatttacaaaaaaactagatgagtgcatatctctcattagctttgttttgtaccgtgttagctagtacgcctgcttcagcaactcctgttgagtgcaggggacattgtagagcaagatagttgttggtgtcctctgtaatataaagtcaatcttacacagtctaatttctattattatggcagaatgtaaattgggatacttttgattgggctgtgcaagggatacttgaacattttgttaaaaatcagagggacacaagagttatatattttgatggctggcgtggttttggagcatcagcagtccttagagctgtagcagatgagcttacatctcgaggagcttggccagaactacacattgataaagtaatccagattgactgctctacatggaaaagtagaagggcaatgcagagggcaattgcagtggaactcaagcttgatgattcggtaattgaaattattgataagacagatgaggaggatgattttaagggagtggatgaaggctctagaagcgagataatgagtgttgcagaagtgattgatcaagtcctcagggatcacaaatttatggttgcttttcataatggaagtggtgattacattgatttaggtagctttgggttcccgcaaattacactatttcgttccaatctaatattatggacctttcggaagaggttccaaggaagggagcgttactctgagataaaagacaaagtgaagaacacccatttattcgcatttgaaacagagtattatataacaagaaacaacattctcttcccagtactgcaaaaagaggctgctgccatagctgcccattatccttgcatgcgggagatcgacccggaaaggatcgtgcattgctgtctatatggactatttctctatctttgtttgcccaaacatttggagaatgagtgggcagcccgagcatcagtgtactggatgtgtgatggcatcatacaaggtgatcaggcatgggagataagcgctgcactttcaaaagaaataaagtgggatctacaaccttctttacaagatgaggtgcgtcaagaattcatagaatcatcctcaaaaaactctgtaagtatccagagattcaaaaacagatactttgatgggcaaaagttttacccttggatcacaatcactgcatcaaataatattaatccagaaacactacaggacatccgatccaaaaatgcagaggcatcgtcttatttcttggctcctgaaagatccagtgatatcacactagtgttatctgatgggttgtttgaccaatggaacaacctccaagttctgcagttgtcatattgtgacttcagctttgcatcaccaccttttattggttgccagaatctaagatttattgggcttgaccactgtaaagataaaaaagaaggatgcaaacaaagtgacctaaggaagtggcagtttctccatagcttattagttttggatctcattgacactatctggtaccaagtattttccgaagacatggcagatctttttgttaaccttagggagctaaatatagtaggagtttattgctctcacatatggggccagctacaaaataagattgaatatgttgatttgtctaggaaaaggaatataaaacttccttccactctaagattcttcaggcttgatgaccgtcaacctacaccgcagtccacaccgggcattgaattatcgctaaaaggttgcatgggattggaaagtttattcctgagtcgaatatccaacctcacggagctggacctctccggaactgcaatcaggatacttgacttcacagctatggtggtggaagtctcaggtttgaaacgactatttctgctaggatgcaagcaactccaagcaataaaatgggacaatagtggttcaacgataaagccggacctagagttgttgtgcgttgacacaaggtctagaagtaaatatcctcagttatttgttgacaagaataaatcccccggtttcttgtcagtccatgctgttattgtggacgcgagaattgctcggtccttatgcgctctaatagagaactcatatcatgttgatatgcatatccatgtcacctcttcgaccatatatggtgaagttcaatccgaaggaacctacaaagatagcattagccaattaagtgatcatgtgaacatgcagcaacaagaccttatttcagcaggccagtaccatgatgtccaacttagcatggttggcgatgtcccaatgcagtcattcccccttcctccgacaacaatgttgagccgccatatcgagattgcacaggggagccacaacctggagagcgagctggatgatgattcaccgattcttactttagctcatctagtgcaggggaaggctgagtcactgcatgtgcatgatctctcaaccatcactcctttgcccggaggacaatggtgctgtctcaagtggtgtcgtatagagaggtgcccgaagatagaaattgtcttccctaaacacgcatggaatttctacggtctggaaaccgcctgggtgtcggatctcttgatggcccgttgcatctggagtaaaggttctctccagtacagtggttccttccaaaatctgcagcacctgcacctgcgcagctgcccaaggctccagttcgtgctcccggtgtgggcctcctccttcccggacctgaaaaccctccacgtcatccactgcagcaacctccacaacatcttcgtgctggacggagattacccagagcaaataaccgtcgaaggtgtagcattcccgaagctaaccaccatccacctgcacgacctcccgatgctgcggcagatttgcgacgtcgagttcaagatggtggctcccgcgctcgagaccatcaagatcaggggatgctggggcctgcgccggctgccggccgtcgctgcggatggaccgaagccggccgtggagatcgagaaggacgtgtgggacgcgctggagtgggacggggtggaagccgaccaccacccttccctcttccaggcgccggtgcactcgcgctactacaggaagaagctgcccaggggctccgtcctcaggtatatatacggtgcatgcatcggaccatgtacctagctagctgctccatcttgatttatttgcataatacttgttctcagttatttcatttgtttgatctgtgcttaatcaatttgctttctctgtctactgttatatttgttgcctaggtgaattgaatccctgggcttgggcggccatgatttggggattgattggcgacgaatgatggtgaatcagtgagatgcttcttgcttgcttctgttgggtgatttgtctccggtgatgttgcagcaagctttgtggtgtgagctgtgtgacgggcacggactgaccgtggctcgatcttgtcctcgtatatggccgagttggccagagagcgagattgccatggctctgaaataataagcggctttgtttgtgcgtggatgcacagaccagctgattgagtgagtgtgtgtttcttgaatttaattagcattctgggtgtggatgctcagatgcatgtgtgtgtgtggcttgatatgatgatctgctttgcgtttgaaacaataataagcagtagccatttgtgcctgcgagcatatgtatgtggctgctgcagtgtgactgtgtgagagtgcattgcttgtgtgtaactgaattctgaagattctgaacagatgagcagctggttgtgtgtgcttgcttgcatgcatgcatccaccttgctccaatgcgtgtatgtgtggtattgtaattatcagaagctatagtttgatctactttctcttctgtttcccagggaaaagagttaaccatctcttactccttgtgttaacattttctttctttttttttgacagtggagatttcattacgcaaatgaaagcatcctgcttctgcactaaagtgcactaagccaaaaacagaaccccttaccttttcccaattgcatggtatgtttgttcttttttaaaaaccttcttttttaacgaacatggcatgttttttcaaacattcagaaagctctcagagggaccagatttaagtcattagcagtgaaccgaaggtcgctctgatgattatagaggtttagaacgcaaaaggtcccgccaggattggaaacgcaaggtctgattctctttttcatcacaattttttttcctaagatgtatcttcttgttccataacaaaacacacgattacgtcgaagtagcaacatacaaactacacaagtaccaaaaccgatatatccaggattccaggtcaaatctcatacgcgtcaaatccatgttcttcacataaatcccctgtaaatccaaaattaagctaatacaacacccccgaagaatatacaaacagtaacttctttttttttaatcccaaaaatcacatagaacaaatgttccatgatttcacaatcttgaatagtaaaccacactagtcagctctgccagagaaaatgatagcctcttgttagtgacaaaaaatggcaactgtcttcccatgcatccatccatacttattattgcctagcccagcaaagcctatgtaaagaatccactggcatataatacttgtttacaaaaaaaaaagactaacaatgaccagtacttatttcatggtttcttcttttggagggccttcagcaatcttgtcacttgtttgcgtttgggcgtctttagactctatggcggtggcctgagctctcttacttgcgatttctctttgcattgctatttgatcttgcattactttcgtcatctcctttatttgcttctcttctttctccagttgcatgtccattatgatcttagcattcttatcgattggtttgaaatattcatctatggcggtttcctgtgaaataggatggaggataagttagcatgtaaggtccagaaacattaaaaaaaaaagcatatcatagaagtaaataacatgtctgattctgttacacctaaatttccatcctataaaatcatggcaaatacgtaaaccaaacaatcaattaaaccatagaagatacggtgtccttcataatacaacagcatgatggctaatccacctcttactgtcaggtacacaggggtaacttgaagcattattcatgattcaagttgtgagatggttcataaactaacatgttctttctcaaaacaacagtacacatttcctatgcaggcattgagacatcgatttggtaattttattttgtggcaggatgtcttacagcttcttcaagctgctgattgagggcttgcatctgctgaaccatttgacgaacttctgatagaataatttgttctggctgcttccgaagctcttccttcttagcttgggcctggaaaatgttcccaatatttaagtattcgtataaatgaacacagtatggcattgatcaactaatgaatgcatgaagaaaaatgatagatgttatcaccatggtccatggataaccaaccatgctaccttgaaagaattgctttcgcaacatttaaagacattggaaggctgagtacttagaacttaataatttctatgctggaattaggttaagtgagcttagcccttaccaacgccaaaactataaaaaaaacagaaaagcgtaatattttgtttctttaaaaaaaattgtttgctcccttttatttacatatcccacaaggacccacattgtcttgtactccctctgtcccaagataactcatttctagtctctaacatttgtcccaaaataagttcatatctatccctcttcataccctcggtctgcaaatcgagttttatctcctccataccctcttacttgcccacccactaatgctactttcctattaatgaggggcactttgttcttttttcctccatactaactttttttttctcgaacacacagaaaagcctccatactaatttgaatcccacttgctagaagtgaagttattttgggcggaggtacttcaaggcagtgcatcatggatcagcaggggtgtgcataataaaagctaacacaacaaccacaccgactgaacagccattacttagcatatttgctaattttatctattggctattcttcttacgaaataactattcaaaagcaggcaattattcaaagtaattgagcatgtaaaaatgctacaacaatccgtggtattttacataattgtatgcagaagtaacaatgccaagtaagcacagttaccctgtacaaaagatatggaagtaaataatcattcccaatacaacgtaaaaaaaacagttctttgtggcagtagaaattgaataaggctacaattagtgggatggcttatctgaataaaaagcagttggtaaccactactctgtaccacttgcaggacatagctgatattttcacaatcaatgaaaccagcaactgatatgcattgtgaggcacccgaaaagagcacagttgtcaattaggcacagaaccaatttaccataacaataatcccttatctgtgccatgccaaattgccaatcagctaaaggagaagattccagcctcaattaaacaaaactctactgaaaacaagataaccggtagtacattcttagcgggcaaacccatttctatttcaagcagctcatcccaaagaagacaattactagaagattaagtctcacactcaaacatggtaaagatgctttacttttgctatcacataacacaattcatagattagatatatcttcgaagaaaatggccgtggcatggttaaaaaaaaacaaaagcaaaaagcacagccttaccctcgcgatccgctgctgcatctgcagcctgtgagcacggatcctcctctcctcgtacccggacagcacccgcaccacgaaccacgccttcctcccgaactgcaccagcttatccatccccggccgcctcgcccccccacttcaccaaccccacctgctccaatccatccaagaaccaaccgatagcgtcatcaacaacatcccctttttttcccctggaaaaagcgaggtgcgttgctattcgattcgaaccgagatggatgcaggtggaaccgagctccacggccgccgcgtcgttccgtccccgcctcgaaaccttctcgccggccgcgcgcgcggcgcgaggaaggatgctgccgcgcggggaggtacggtgggtggcgactccggattgcgcggcagatcggcggcggcggcggcggcggcgagagggagtggagaggtccagagccgcagaggtgtggggaggaaggagagagagatagaaatacaagaaaagggaagggggcatttggttattcgccattttctcttctctccttttcatttcctggcaccgccaaacagccacggttccatgcaaattggtgatagaaaaatctgaaaagaaaatatatattttaaaaaaatataattgttgataatataattacattgtagcttgtatataaatataatcttgtggacccatggtcgtagcgtcaaatccccttgcgtacacatatatgttgtattcttttacttatccacctgcataaatcttggagtacatctaaccgtgtaaaattcgatatattatttccacaatttctattgataaaaatctagccattttaataaataatgggacgatcagtcattcccgcttgttgatcgagaattttctcaatagcacattctgcaagaatagggaaatataagggatgttgagaagaaacttagtatgaatatattgactaaaaaataacatatataaaaaggtacaggagaataaattagagtaaaagttaaagagccgaaaagttgctctaatcggttgagttacgggctttcgacaaataagttgttaaaaaatgaacggggcaactatttcatggtaaaactttttatatttatattattactggccacaatagccaagggggtgtcggtggtggcataaagccgatggagactgagatgggatcgccttgcttccccgcacgtggttgtgatgttgtcaagacaaaaggggaggcgtagcatgggtcgacatgtctatgcgcaagggcacgatcaaattaggagcacggagggcatgggaaatggtgcatcggctctccgaggtcgtctgttcatggctccatagcacggtggggaaaagggcagggtgcgagctgtgaggtcgtggcatagttgagctcgattcgccagcacgagttcattgtcactgaagcataattgactggcatgatgatcctcagagattcactaaggtgaggcgtaggtttcccctaaattgcctcattcggagcatggcggaagcggcacactcgttgtggtcatcatggaggagcggcggcgtaatcattgatctagagaaccgagatactatcgttggtgcagcatggaataatgcttgagaatgtgagagctggggaagagaaggaagaaggagatggagaggagggagatgagttgcccactaacatgtgagacccacgtggatcccacttatcatgtcagtcaagaccagccactatattggcatactgccgagggaataaagttgatacggtgttgttagttggtgaataggctatacttggttcaggggtaaatttcagactcagcgacgatgagggacctaaagtgaacctattcctaggtcttaagattgtttgtgcagtcttaaatgggcctttccttattggggaaaatttttcagtttgctgtagtagcttactcagctgagcgcatgagacaaaggccgagtttagttctaaattttgaaccaaaaaaacgtcacatcgaacttttctacacataaacttctaacttttctatcacatcatctcaatttcaattaaacttctaattttagcatggaataaacacatccaaagttattgttttttttttaaaaaaaattgtactatgaataggcagggagtgattgaagtatgttcagttcactggcatcctccgctgactaattatccaacggattatataaagtggattatctatttgacttgactataatataaatttaagtgatataataaatacagtagaaaaaagttcccatagaaaatgtattttaaaatatgttgagcatataattcaccgtaataatctaattaagcagggtataaaagggacagggcaatcgacccatgccgaccgacggttcatgttgttccgctcctgtaagtagtaaccaaggttgacagtatcccgatctgtattctagtatcttacgtatcttacgatactataaacttatcaagccaaaacgataccaatcccacctaccgaaatgataccaatctcacataatatccttattttcatagtatctcgattctactattcattaacacacgatcctataaaattttagttagtatcccgattctacgacccttacgttccaacaaaatattatttataataagatgatttgaaaataatgtaaataaatatgcttaggtttatattataatcagttaaatatatcaaaaccaatgtgatttgatctcttgataaatgtctctatttgcatgacatatattattactatatttttttatatagaatagctatgtgcaattaatacaaatattaattgaacttaaaaagaaaatatcataatatccgatactacaatacaatcctatgatacgatattactttgagcaaaacgatactacctagaatcccaatactgataaccttagtagtaacacggccatgcatcgtgccatcccaagggggttttagtactaagagcaggtacaatagaagactataatctagctataaacatattttaaagagataaaaaaaagagagagaagagcagcgggctacaaatctgtagccagctgtagcacggactccaagacgtaatgtgtgtatgacaggtgggaccaggtattaatagtatagtaagcaactattgtatgaattgactattacattggctatagatgatttggagctagtagttggctatactattaaacttgctctaaggttgtattcttttcccctctttcccaactcacttcccttgttttccacgcgcacgcttttcaaattgctaaacggtgtattttttgtaaaagttttctatataaaagttgctttaaaaatcatattaatccattctttaagttttttaggctaatacttaattaatctcactataatcgcgtgctttgttttccgtgtggggagctcccgaacgcagcctaagaaactaagcaaaccctcggggtccgtgaatcatctccaccaacctccaaactaaattttgggaattctagaaaaagtcgaggtacaacagactggccaaccaaccatctgactggccaaactctttcgctcactgggcagaatttgctagcaaaaatgccttgccaaattgttggccaagtgcatcctcgtggttgtgcgccatcgttatctgcggccttctcgagtcgccaccttcgcatcctcctaccatggtcagctaaagaagctgaggtgaccggcaaggagcggcacggtgagcaggagcatggccgtcgacacccccgagttgtccgttaatgagcaggggctgtcgagaacgttggtccgtgtggcagcttcggcgaggagcagagatagagatggatgaggtcggggagtaagctgaggcagtccacgctacccctgccaccgtccatctctagagctcaggcagcagcatctagatcctaagctccatgccgttgactccccttatccctggcgtcatcgattcctccttcggcacttgcccttccgtcgtcttgactgctgtcccgcctccaacttattcctgtgctgccatccctgcctccgtccctcccgatgttgtctccgcgtcgtctttccccagatgttagtttgttggacagtagaaaagaagggagaagaaggaaagtagaggctgatatatgggtcccgttgtaatattggatatgaaaatagataatatgttagagtgggtaacaagttttgcttgtcaaattagttaaggagttggctatacgagagttttgatttgggtagaccgttgaagatgctcggaaagaagaaacgcggccgcccaagccccagattggtgggtgcctgggtagcatctgcctgcctcacttccaggcgtaaacaaggcggcaccccgtaaccaccagctgcatgcaaaggccccacatcacattcacatggtcgcttgcgcgcagccgccgcaaacgcacgcacgcacgcatgcgatgcgatcaatccattcctccaccgcgcgcggagttggatccaggtcaaagccgcgtacctataggccgtcatgagttggatatgatggatataactctcgggagatcggctcgatcgatcgtcgtacgctttggacggctcgcacgagcgcctgtctccatcggtttcggtatcggcagcaggtcaggtgcagcgtacggtgtgtggacgcggcggcaccggcccgggagggatgccggcctcgacgaggagggcgaggccccatgcagcgcgcgggccgcccatccgcaccgacgcgcgtacgtacgttagctaccggcgaaatcgcggagtggcacgcggtcaccgtacgtctctctctcaccgatcgatcgatggccggcgcgcgaggaaaccgggagaaacggagctgcacgcacgcacgctcgtcgtgccaagccagcgcgcatcgtacgtatacgctccactgacaccgacaccacggcgcggcggcgttggcgcgggcgcgatccaaaccacgtgctcgctcacgtggcgagccttcgacctacggcttttctgtaaccggtgggggggattgtgcatgcggtttcactttcacgcctcgtctcgtctcgtctccctttcctcgcgcgctccacgccatgagatgcgcgcatcaccgacccaaaaatggtcaactatatatctggtggaatgggaaccgaaggaatctatctcagcatagtcctgttacatttataaacgggactaaaatttctttttttaagtctcggtttttttaatgaatcaagattattatggatttttgccgatcaagtaaagatagtttctccggtagtacttatactcccttccatcctaatttaatcatcatctaagagaacgcagagatcgaaaataataaaaccttcattattaataaattaatcatcatcggttaattaagatgttctgtcgctttgtgttttatgcattacatcacattttaagtattgttccctccgttttataatgtaagactttttagtattacccatattcatataaatgttaatgaatctagacacacatatatgtctagattcactaaaatctatatgaatttgagcaatgttagaaagtcttacattatgaaacaaaagaagtacatggcatcgcaacaatagaaattaattatagttggttgcatgcagcgcattcaaagatattcacttactctttacacaattaaatgaaaagatactttgttagatgatgattattttgagaatgtctcaaaaaatttaggggataattaaaattggatgaatggagtatattcctacgtgtgttttgcatcgtcggtgaaaccatctctttctttaagtagaatcaccgtggatccaatattttattctcaattatctttttctagtccatccctaattatataggtgtagcttattataaactacatgcatgttaaagtagagtaaatgtaacggtgatttgtctaaaagcagttatgtgtgtttcttttataaaaaaaaaattgctgacacgttttggtaacagacggaaggtgtcactggcggaactttgaaatgcctctttccaggaagagtttgacttcttgcatgtcttttatttgagcatattatattaaatagaaatgattatggccatgctattataataaagagacatataagtacttaagtactgatgagggcatgactaagatataatcatacttatcttacatataataagctttgctttagcttgttgacatgtaagataaagtataattatatttgagccaacgatggctttgctttagcttgttgacatgtaagataaagtataattatatttgagccaacgatggcctcatcagtacttatatgcctatttattttatgttttctatattatttttttattgtatgttcaaacaaacgttaaatactgcatcataagttttgtatcttctcgtttgcagaaatatttgtgcgggtgaaggaaagaatatcggcctatacagaaggattcttgaggttcataagtacgtgttggaaagcttatgaaatttactttcatatggtttcgatcccacgtcaaaatttctcctaagcagttgggaatctgcaaaacaagtcacataccttattcatttcgagtctaatttaggtcttgggcttttataattatgtcgtgggctaagcgccagagatgggctaaccttaggatgttcttaatcatatttatttagtagctgtcatagtttagagtcagggtttcgcttatattattctatcgttgtagtttcgccgcttagttcggtctgaggaaccttaacttgtgagcttcattgtatatttgcaatatattcagattgattcttctattctcttgcttgtcttctcgattcgcttgcaggagatagccttatcggcgaggtcaaccatgtttcgattcaggtgataaccaacggaggggtggtgtaatgattgtgaggggttagaacgtcctgttcggagcttttgtgttagcaacatcaagtctccacagtcggcttatccggtacctagtcctcattaagagctaaaaacatatacagcaaatattaaaacatcgtaagagatgcaagcacaactacaatattaatcaacttctgacacacaaaagcatatgaacgagcatcgaccattgtctctattcttccggtagatctttaaaccaatattatcaaataaaccattggcatgtactctaaagatgttacagccatctggaacatcaacaatccaataggtaagactctttaggtcttttattagggatggtgttgccatttggaacatcaacaatccaataggtaaactccttaggtcttttattggggatggtgttgtcgattgaaccattgataacccgataggcaagactctctagtgctttatcgtgggcatcgtggagaaagaaaagataaaatattttagacaaattaagtttttaataagcaccatgaaagacaaaacctaaacttttataataaaaaaaataaaaaccctaaaactgacttaagttaaagcaaagacgggatctcatttcccctcattgtcagtgttgatcccaggatggaggagaaggggatcacagttgaaaatttcatagagttcgacttgtcacatgtctcaaaattttgcatggcttattttgattttggtgagaactagccaaatttattgttgacgaataggctagatatatcttattaatatacaaccatgtatcatataaaccttttccatgtttaaattttataaaattttgtttcttatactttcatagttgttctttaatacatgttatattaacttaaacctctatatcgtgcatctaacatggtcaacattgatacgacatgctccattgaaattatgccagcatattacagtaaatgactaaaataaaaataagaattaacacatggattaattacttgcattttgcggactggtagactggtaatagtaccatgcctaccgtggttatgataaaatgagcaacttagggtttgctaatccggaccgggctcactttttgtgaagcctgcctccattgtgctcgagacccgactggcctacgagcgacagtgagaatttttccgtttcctagttattatacttcaatttgtgtgataacgggttagaatgatttattatgttacaccatcaaacaaaattaatagccaaatatataatttaatatcaattgcatcctctatacggtcttagttacaaaattaatagccaaatatataatttaaaaatcaattgcatcctctatacggtcttagtatcatgaaaatacaatctattaacttattaaaataataaaaagaagctccacgttcgctgtctggcctataaattctcatataaatcagagaaaaagaataacagagtccatataaaaatacaattaaaaaaagcttaatttcgaaattaaaaaataaggaatatttggaggaggagattatggcccatacatatatacaatttagagctaagtgaaattcgaaatcaaaaaataagaaaaaaaataaatataaatgttagagtccatataaaatacaatttagaaataaaaaataaaattaaaagaataaggaatattagaaaaagtgcctatagtacatatatgaatataatttaaaaataactgaaattcagaattaaaaaaaatattgaaagatgagtttagagtccatatacaaatacaattacaaataataaaaattcaatattagaaataaggtatattagatgaagagcgagtccatatagaaatctagaactaatcaaagttcagaattaaaaaaagagtagattttagagttcatatagaaatacaatttagaaaaaaaaataaaattcgaaaataaaaaaaaatagaagattgggagaagaatctatagtacatataggaatataataatataatagtaacgaaaattaaaattttttaaaaaataaatattagaagaatattatagagccatataggaatacaacttaaagataaccgaaattcagaattaaaaataaaggaatattaaaagaatggtgtaaagtatatatagaaatacaatttagaaataattaaaattagaacttaaaagataactactatctatcgcgtatatacaatacaataagaatattacacattgctaagtttgaagtttgctcagctaacacagaatttaaaattatattattattttaatatatcttttaatagaataagtaaatatgtatgctatcatacgaggaaaatgaaaattcaacctctgtaaagaagaacgtatctggacatgaaattgggtttttacaattttggacggaagatgcacacgcacaaggaccttaccacgtgaatcgaacggttaaaataacaaaaccgcccaaaacaaacaaacaaacagataaataatcagaagcacgcaaaatcataccacgtcataatctaatcaagcaaaaaaaaaagaaaaagaaaaaagaattccaccccgatcctcactactgtgtcactgactcactgtagcagcaacagcagcagagtgtgagtgctcatcaatccagcccatccccctgctgctgctgctgctgcttcgctgagacgacgagaggaagaagacgagcccccaagccaagcagacgcctcctccttcttaagcttcccaattctttctctttccctcctcctccgcctccgcctacgccttccccgctagtcccacacatccggcgaagattccggaagtttcgtcgatcctccgatcgatcaagcggcgagcggcgggaggcatggagaggtacgagctgctcaaggacatcggcgccgggaacttcggggtggcgcggctgatgcggaacaaggagaccaaggagctggtcgccatgaagtacatccctcggggcctcaaggcgagccttcttcgcttcttcttcttcttcttcttgtcccttttcgtccgctctgttttcctgatcgatcgatgggtgtggggcgttttttttgctcattcgggtggtgatctgatctctgcagattgacgagaatgtggcgagggagatcatcaaccaccggtcgctgcggcaccccaacatcatccgcttcaaggaggtgaggccgtggcggggggcaaattgggtgttcgcccctgttcgtcgcgtcggtggcgaagaatctgtttgtttttttttcttcttgtgtgtgtgtgtgatggaagaatcgtgccttgcgatgcaggtggtggtcacgccgacgcacctggcgatcgtgatggagtacgctgccggcggcgagttgttcgaccggatctgcaacgccgggaggttcagcgaggacgaggttcagcgatgctcgaatcgactctaatcaactccatttcttggtgagttcttgtgctaatccgcgtgagaatggtgggcttttgcaggccaggtatttcttccagcagctcatctgcggcgtgagctactgccacttcatggtaagaacagaaaaacgatcccagtaaacattgcattctttttttaaaaaaaaaaggatgggaaagtgttcaaatgtgaaattattattcgtgatggattcgcagcaaatttgccaccgggatttgaagctggagaacacgctgctggacggcagcccggcgccccgcctcaagatctgcgacttcggttactccaaggtagggagaaggccttctttaaccttttcttgaatacagtaatcttttccctcgaaacctgcctcaacacctcttttccctgcccggatttcttctagaaatggacaagcttttcttttttcccttgtcaaaaagcactctatttttaaatgatctatagtcgatttaattacctataaatatatattacactagtaatatttgatcttacctgttatacatacattttaatacatacattttaatatatgctacagctaactataaataaaatttatagccggttacttttctcttttatcatttatcttcggtttatagttacctagtctcaaaagatcaaaactttttcttcactgtttcaattcactcccccaagaaacgccattgcttgcaaacgttttcttctacaaatgctaaaaaaaaaaaaaactcctatgtgctttcttgcctaattttctcccccttttcttacgcgcaactgcctaaaagaagcaacattttcgctttgatcgcaacatgacgccttttttgtttcttctcctcgtcgcagtcgtcgctgctgcactcgaagcccaagtcgacggtcgggacgccggcgtacatcgcgccggaggtgctatcccgccgggagtacgacggcaaggtcagtcacgcccattcgcccatcacttccccttgtcatctgtggcatggtggtggggcccactggcagtggcggtagcgtggggcccacctgctcctggtcctcagcgctgagcacgtgccgtcccctgggagtccacgtatcgcggttctcaaggcaaacactaccttggaccgtagacccggcctatgggcgagctgggcagcatcggaaagtgggtcccatgtgtctgtgagtgttgggtctatgggctactatgggctagggtccatgggggggggggacaggtgcctctgggtggtggatttgggatttgtcctctaggagagcggtggagatttgcttgcctgcggccggacagacgcccactgggctgtgggcccgggattgtttttagcccgggcccacacactgcctcgtgattcgtgacagtagtagtactagtacatgctagacagtgtgtagtagtacgcgctaaacaggctgtgtgaaggggccctgagaccatatgctgctgactgtcactctcagttcagctgagtgtgttttgctcaaaaaaaatagaagaagaagaagaagaagaagaagcttgagtgtgtgtttcttgctgcagctgagctgagctgctactgtagtgcattagattcccagctaatgatgctccctccagtagtggtagtagaactccagtgttttttgttgaaaaatctcttctgtaaaagcaagggagggattattcaaaaggacaggttccttccttttgtgtgtgtgtgatgtcgatctagacattcacattctctctcggtttttttttcggtaatcaactaatcacacatcacgcttgatggggatgctcgcttcgacgaggcgtggcggctgctttaacagcacgccagacacaaaagaggagggggggagaaaagacgggttgatcgaattcgagacggttttagtggtcaagagtttgcaccctgtagcttgttacgtgcccccacttgttgctttattaaaatgtggtggcctgaggtaaagtgagattagccggtgatggcatgagattctccagggtacagatgcgagatattttgcttctcgcccgatttgggcagggttaaaagttcggattctttgtatgtttggttgtccagtgtgttttggcgagtgaagtaacggagtgtgattttgtctttagttacatgcaacgctaagaaaggaatgatttttcatcgtttgggattgaaatggaacagacgtgtagggattaggtgaattgtgacaggatccatgaggtagacgcacccctcagtctgtatttgcagttatgcatgtcattcggttggacagcttgcaatttttgttgacatctttttgggttcacctcatactttatgtccttttctgagcttttttttccatcatggttctagtgctacatattagctaattgacgttatcacaatgggccctcggacccaatccttttcaggtagacatgttagactgaacttctctttggccttttctgtggttattaattttctctctctccttggtgtcagttactgccgtcatatcttatgaacgattttcttcaggacagtgattgcattttgttccttccctatataatacatctactcaggctgcttagatttttcacgctgcaaaattggttgcttttgattgacaaagtggacactgccatagataatttgtagatggaatatcaagaaacattttatcatttgcatctagatgttctttttttacaaccataatgtgcccttgatttcaacaacctataatgcttatttccgagttatagagttatgtatttttcagctgatttgttcccgtcatctttagactgccctcaaccacctgttttttatttgaattaatgctggaataatctattgcataaagaaaaaaaaccactgttgtaccgctttccaaaagattactggatgcgtatgtcctataacagtcatggttgttagcctacttagccattaggtgagaaagcacaaagtgccccacagcaggtaaatgtctgtggggggaatatgtaattaccgaaggacatggatcctctgagatcatcttttctatgttctcatgataacgccaccaccctaataacgaatgtcaatacttatgcttaccataggtgtgttctgtcattacctgtttttatctttgctttagtacataagcgtagcactgatgcttgtctgccttttgaatttaggttcatggaagtgcacgtcatctttcctatcattcagtttattttgtacagaagttagcatccattgtgaacatagctgaaatttgcgtacttcggagagttttgatatttccacgcttctatttggaactttgagcgtactaaacataagtgacagcatgctgtgcagaaaataaaaggagccaatcaaatagatgtgctaaatggtgtaatagagcctttgatttttgtttcttggaccattttaaattacagagattattctgaaatgttttgatgatcgaaacaagcacgattaatgttctacaggctgttctgccttaatattctactagaaagaagtgtactttcatacatcctgttcttgcttgtatttatcctttcatttgtttctatcttatctcctgaattcatttacttgtctcctaacatttttggattggatggttgatgcttcagacagccgatgtgtggtcttgtggagtgactctttatgtgatgcttgttggtgcttacccctttgaggaccctgatgaccccaagaatttcagaaagaccattggggtaacaatttaagaacttttcagctaagcattatcagatcacaacttctagtctcttatgctttgtgcattttttgttctcagagaataatgtcaattcagtacaaaatacccgagtacgtccatgtatcccaggactgcaggcaactcctttctagaatttttgttgcaaaccctgcaaaggtactactctatttaaactcagatcaacttactagacctattcatgatttttttaaaaaaaaaatcattcccaaacttcatacagagaataacaataagggagatcaggaaccacccatggttcctgaagaacctgccaagagagctcacagaagctgcacaggcaatgtactacaagaaggataacagtgccccgacctactccgtccagtcggtcgaggagatcatgaagattgtcgaggaagcgcggacgccgcctcggtcctccacccccgtggccggctttggctggcaagaggaggatgagcaggaggacaacagcaagaagccagaggaagaacaggaggaagaggaagatgctgaggatgagtacgacaagcaggtgaaacaagtccatgccagtggtgagtttcagctcagctgagtatttctgtccagcagcacaggaagattgcaaactggagatattgtcataatgtggcagctgatggtcacactcccattctgtagtttgcagtcttgtttttcttttttcagtttcattttttcttttcttctctttgatgctgcaacagtgtaaattaccaaagtggttctgtcactgtctttgtaatgactgatttaagttagcatgcagaaacataatgtattgaataaaaccatctcattgagcatcttctttctcagagttgcagtccctctatccttgccatcctgttactgctattgtccatgtattcggttcatcgcttgggttgggacagagaggtgagattgcagctcttcagaaaggaaaattttgtcagtaaccggaatggtgaaattacaccctccttaagacaaacgaacaataatggattgtggaactaacaaaatggaccaatgtacatgatcaggggcataatgttgagtccaaggtgtacataggaaacataagtgacaataatagaaaatggaacaatgctttgctgaagaccaaatttagggggttggagtgtgcattgtagttaactgaacacagtttgccactcccactgatgtggttacattcagaatgtgacagcaagagaaaatcctaaacagaccaaagcaagaaccaacctcatcagggtattccgccatcaaaatctgcaacgcaatcggcaattccaccatcaaaatctctgtttgcacaaccaaatcttacacctgaatgatgattcgttcttctatacatatgctgacaatcagaaagtaaatacaatatgatagtgtaattccattttaatatacaatgtaacttctatataactttcatataatttggaaccgttagatttacttcaaagtttgtatgcatccgcatgggtgagatgatttggttccccccaccccccgacctccacctcgtggaaatagcgtcacaccgggagttttgaaaattacgtacaaattatgctgcagttacatacaagttatactacgattgtactatatttacatctgacaaatttagggaaaaaattatcggcaaatgtatagatagcccatgaaataattgcccagcgtaaccacgcctctaggctctagacgccacagcccacagctgcttgcttttgacggcgcttggttgattcttggtcgctaattagtcagggctgatgagtgatgagtgacgagacaagatacaggccaagcccagacagaggccaaagcacaaaccctccagcaaaatttggccaaaataatttgaaatttgaatagcccgataaattttgctaaccactagtaaaagaaaaacattttggtatcatcgtgtcgaccgcatgccactatcttctgtgagatataatagccactgggaatttacatcgcttattatttaaagaataattaacaataaatacaagcatatgagttaaaccttgtaggttccatagttccattcattaaccagctgagctcagttcaccacctgcgaaggaaaattgattaaaagtggataagaaaatatgtgattttgtttgggaaaaagaagaagaagaaaagaccagtgatttgcagcgacagcctagacctgtaatcatttaccgaatacaaaagcctcacagctagcagcattgttcttcgatcgatcagtgcgatgaattagtatctccgcatataattaactaacaggtatacacacattcacacaggaattgacagatcaagatgctcgaacaaaaaatgtacaaatctgacccacagatacctcattgttcaatctaatttttttttccatcgattcgatctcctttccaaatcaataaacctccacaggagtagtactcctatacccaatccaagagggcaatgtgtccatcgaaagcaacacgcgtttgtttgatgctgccctagaaattatcaggagctccatttcctgtcactgattctcgtcagagcaaaacgcagagagctgattaaccaagtcgctgtcgcgtgcttgattccacactgggatatcccagatcgagctgccgatcgatcgatcgtttctgcaagcgagaagccaatcaagaaaaagcttcacgcgaacgcatgcatcgatcgacagcgacaagaaccgtgggactttggagagaaatcacgggcgaaagcgatggatcgaaaattcgaaatatcgaatcgaatcaaaagccggcgatgccggataattctatttgcatcgtctcgttgatagctgctcatcaattgctaagaagctagcttggcatgtggtgcattttcatgtccacctgccaaaatggaatctcccatttggggggtgtttggactcatgcagtgtctgaaactctgaatgcgacctgcgttttctgaaactctgaatgtgacctgaactttttgtccactccttggagaaagaggatggaaatatacgttccttacattgacctgaaaaactctgaattctgagagattgcagaacaagtaattaagcagagtttggtgagattcgatggaaaacatggagcaaaagaacatctttaattgctcggtcatcggaggtaaaaaaacaattcgcatctggttagcgtcgtctggatctggccggggtgagggaattcagcgttcctgcctgtggaatttggaagagtctttgctcctgaatttaagaattccggccaagatttggagcatcttgaataagtcaaaaaagatagttcttgtgaatcgagtgctagtttcacacgtactggttgatcacaaagagaaatcgtacgtgtcgctattcttcaaaagacatagaacggtggatgaatgggcacgcttctcgagcttctaacaatgctgtttcttataagaaccttgcatttatgaatttattagaaatattgttgaaatccattttcaactttataatattcaatttcattcttatgtacttgctctgttccaaaataactcaaactatagggatgaattatatattttggaaaagagggagtacactcggataattatcccaaaccattggactattcaaccatttagtacaaaaaatatattttagtgtcagttacttatgttgttttttcaccttaattatcagctgagctggcgcctagtccaccatggcttttcttttacatgtttgcatgcaaatatggacttttatcgtagtacttcttttaaagtttcaacatgattttgcgtttcgaaatggctgtatggtttacacctttctacacgcaaaagaacacgattttaatgctagggtgaatcatggtgtcgatctgggggaccgaattcctattgtttttcagtacggatcatcctgtttccttttctttttcagatgctatgaagaagaagcaaattagtatgtctcatccatagaattatatcgattctcattcacacgcatgaacgatcgatgctaattgagaaagtcagatcgaagtgggggccattgtgcagatgattaattctaagtagatcactgtctatgatgatctctatcctctatcctcacactgttcataaaaggagattaaaagtgattaattaactttgctcggaagagatcggcacaaatggcagcatttcaacaatgctatctgcccagcaaatctttattaggtgcagaccaacagtttggtgaaccactcctgcatggtgcctacttgtcctactatatgtgtattatctcctttctaaatgcatgtgttgacgcctttttgtaaattcttgatgattttacctttgcagttaaggtaacttccttgcattgtcagtgttgaaatgtgattggagtactacaaagtaactgctagatcagcttgtttactgtatgtctgaatctaagaatctaaggctgtgtttagttggatccaaagtttagattttggttgaaattggagatgatgtgactgaaaagttgtgtgtgtatgacaggttgatgtgatggaaaaggactgaagtttggatccaaactttggatctaaacacggcctaagatatgaaactcagtttgattttgacttagcatgaggtcaattggacagtaggaactttactgttctgtaggagaaaaaaaagataaaagaaaattttcaggatacaattaagctagctttaactctgaggattacttagttagctgatcatgcatatatctaactatgtattaactgaaaattatcatgccttgcttattattatgtactcatgtgtatataattcttttcaatctagtaaatctagtatacatgtatgaactatcaaagtataagagaataagaacaaaattgaatttgaatcaagcatcgcaaatcaagaataaatgaacaaaaactaattagaggcgatcctaagaaataggagaatgaactcatagacgatctctttttttttgtatgtatgtatgaactattaaatttcctgtactgtatatgtttgagattttctctgctgctgtcaccgacatcgccgccgccgccgtcgccgccgccacaaggtcgccgtagccagagccatgtcacgccacgccagcgacatggccatgccgccgtcgccctccacgacgcggaacccgccgccgccgcagccgctcttcatcttgagcagcagcttcgcctggctcaccgtcctcgagctcagcttcacgccgtcgagcccggcgccctccatggccgccttccagttccagctagctgctgcgtgatcgccgccgccgccgccgccgccatggcggcggcggtgttggtggtctagcgaggccacggcgtcggcgatctccctcccgaggtggtccctctcgatggcgagcctctcggcgctgtccgccgggaggcactcgtggagcgagtcgaacacggcggcgaagtatcggaggttggcggcgaaccgcgggagcaagctcgcgcttcttcctgtagtggtgttgtcgccgccggtgagcccgccgccgccgtcgtgtttctcgatcaagaacaccatggacgggttcagggagttgatgtaagccattcttgtggcggcgcacgcttctcttgagctcgccgggaacaccaggttgacgaccaccgtcgcgtcgtcgtcgatcctggtgcaatcatggcgggtgttcgatccgttgttcaggatgccctcgaactcgaaccgtaggttggggcagccggcggcgaaccgccggagccgcgcctcggtttcccgtagctcgtcggcgctcgcgccgaagccggtgatccgcagggacaccggaccgtcgccgcagccgcctccgttgtcgtcgtcgtcgtgggatgaactgctggtggcggcggcggcggcgtccgacagggactggatcagcgaaggccactggaacccgtacgagacgtcgaagtgacgacgtggaggcgg

SEQ ID NO: 9733 - DNA, 30700 bp, Oryza sativa
ataaagacaaaaaaaaaagaatttggttttacatgagaatcactttcaacttccttcctggttgattagaacgcttctcaacaagactcttaagaacaatcaacagaaagtcaccctgaaaactgggaaatcaggatcattcatggacttcctctaccatagaaacaaaagaaaacattgtctgattcgtaaagggaaaggacacaaacatgtacataccaaaatagtacgttcatgtacttcgtctactactacatgagtaacatcacttaaatcattgttcccctgaaattagcatgaaaaggaaataatttcttaggaactatcatcacatgacttgaaacacaagtggagggatgttataatgttagctttacatgcaataaaaatattgcacaagacaaactatgttaacatgacggcactacttacagataattttctaagaaggataccggtggtacagaacagaagctttgtcctttcattcctaaaacagtagaaagaacaaagttgaatacatcatagggatcttcaatgcaaaattacaagaattttttcacacatataataatgtgaatatgagaaagaccaaataccgagcactgtcaagacgaacttgatatccgaccaaagaatccttagatccaggagaagattcacacctctcactagacactctttcagccactgaaatggcctacaagtgagtagctataccacgttatattcaacaatctagatctgtttagtataagctgcgtgatcatcatataaaaaggatatctagcataccagatgatctcacagtaacaacactaagatattgtactttatgatgaatttattatcccagaagtgatttcatgaatatgacatgcaatttttatattgcctgcaatgtattgctaatatgctgcaccggaaagataaagaaaagatcaaggtctgcactgtgatcataccgctatcctccggggttgtgtgcagactatgctgcagtaaccaccaagctcagattcaatcatatcatccaaaataaactgtggcacctgcaaatgaaagataatataatcatgtaaaactccatgcttctggaaagatcagaataaactatacaagctggtattgcataacatctagtattgaatatctttctacatgttcaaggaatatatgcaaacctaactttgtaccaatagcagctagcatacctatcgtcaaataatagaagctgattggctgggagatgaagaatatcatgagatcagttcattaacacattccaataggtgaaaatggaccatggaaagaataagatcctaaaacacataggaaggcacttcctgttgaatatgttaagcatggccccgttatcctagcctgttgcactcaattagtcaagttgttttaaaaacaatgtagaatgatagagtcattaagggaaaagtcaggtctatagtctagaaatcctagatcaagttaggcaagcaagtgggagtttcagagctacttggcttcccaaactataggaaaccacgactgccatcagacttgttatgacaagtttcgtgcagcagataattcactatttctcatgcctcaccatcaccaataatgtaaatattataatttcagggagccaaataaagggataaggcataaaaaaagatgatgttttgcacatgatatggttatcttttaaagctggaataacaactggcagcgcccaagaatgaagcctttgtgggggggtacctgagttgtcttcccacatccggtttctccgcaaacaacaatcacatcattctctttcagtaactgtagaaaatgatctttgaatctagagattggtagagaagctcttgcttccagcattttctgaatacaaagatgaggcaattcgtcacaaagagtcaaaggcaaaagaaaaggtattaaattagaagaacagtatagtagaatgtatatcactcttaccaaatagctcgactgcttcattttattttccaaatgttttttcaacactgtgctttccacctgctctgcggatctcgatcctgatcatagaaaagccacattagatatcccgacaggaattatacttacacttacattattagcagtctagtagaggcaagaaggaataatctataaaggaaaaatacttaatacattcgtttgatcattattcagttaaaacaaaaaaaaagattatttcaattagaagaaaaagaaagatatagcatgaatatctcagagaactaatgaggtcaaaatacacggcatgcatgttgtgagcaagagaaataaagcaagattccaaatggaaatatagctaaaaggtgttataattctgtgaaaatagattctacataggagaaacctcattggtgtcgagaaagttgatagaatggagaagataagtctgtcatcagtgacagattaaaaggttatggaaggtaaaaaatggtcaccatccaaatcatgattgtttcacacattattcataaagacaaaaaactgaaatgatgattttattcaaagcttacctgtacgattcaccagataggtctctttcttctcatgaacagagtagctgtcctcgatgctcctagagtcaacagatgtagcaccatctgacgcatcctcaacttgatgtggagttgtattcgcatccatatccaacaacttatccacaaaaccagctcttcgactatcctcagtatccataacccttgaagatgatgatgataactcccctgcttttttgccaaaaccatgtaatatgtagcccaaaggccccaacaaatcgtgattcatcacagaagaaagcaagatcaatttatctaaccttcttgccatcttaaaacaagtgatgcatatggttcaataagcaattggcgcaatgaaagatcagcgaaaaattgatatagagcaaaagctgccactctgttttgtgcttcctgtcgaccaattcagcaaatgtttattgttcagaaatacaattctagacaaggaatgatgatatgtatattcttttctcagtattatgaaatcagaatagttaatactaacaagcatgaaaggtaaaaatgaagaaataaatctgaataagcagtggaaatgggatagcttcccaaacagattaacatgcactatcatatccatccaatgcgcattggggattggtgtgcctccaaaattaaagcaacgccccatcttctaagaattttgatgttcttgcacagaacattgagcactttggatgcataggatagtgcatggagccattgacatctgtatatatgaagacttgcatttctcattgaaataaaaacgaattgtttttatttttgagatattttagaaagtaacagagtgttcattttgtcaatactaacctcaacagatgcatattctttatcttgttcagttaactcgacttttgtcaagcctccagccttccgacttttaccacgaccagtagagccacgcagtacattaacagcatatatgaatttacgatccttttcagatattttactgtattttggcgcttcccaaccaagtttctgacagaatttttgcagaacagcctttggcattttaccagaatctccctgcagaccacaataaatagttagaaccaaatgcacgccagagattaaacagctttgttggttcattgtttatttagcaatatttcgaattgttacattctgcccattgcccaaataatggatctcctcaaatatcgttacaagtgagatatgttagttgtgttctcttctcactgtctagtacggtaatttactgaaacttgaatggtttatatgcagcttttaggagcaagtagcatggaacattgcagcacataaaggccaccccaactatcctactccgtatacaacaaggtttctctaacaaaattgagagaagcggcattataatcaagaaccaagacagcaaaaacacctccaaaattctaaagataaatatgacaataggaggaggggcgttaatataaagtggtgcagatgcacatgaccttcttccatatatcatctatgtttccaagaagatgcccataaccatcatgtgataatttctctattttttgctgttttagtatttctggagccactgcctcccaagcagaagagtcttcaaaaaacaggttatcaagttctacttcctcttcttctacctcctttgtgctggtttcatcaacatccttggacatttttttctccaaactggatcctccatccatatggacaggactctcacatttctttccagttgcaccagagtcaactagatcaccctcagcatttgcaatatcagaatttggaaagacattatctgaactgctgagatcttcctttgagtttccagatgaggatttcgcttgtttacctgaaaacaatcaaacaagaaggcataatataaacctgcctgaactacatataagcattcaaaacctagtcacaattagaagagaaaattcatatggttcactatagaatcgatatccttcaacaagtattatgtgtacccttcttctttcgcctacttggctttgcctcagcagtttccaaacttggtgggcagtgatcttcccatgtgtaggaatcattagaattcacatcatcttcctaacatcagcagcaagaaaaaggaataattgcaccaatatacattaaacaggaattaaaagaaaaagaagagagatacattgaataagcttaatctcgaagtttagcggagcaccatccaattcgtagtggattgaaatgcataagatgtttgtcactaactttaaacggcattcagtacattagaatatttcaatcacaaatgtaataaggtatgtcactataattacgttcgcaacataacgcttcctatcatgtttacaaacatattactgcaaaataaacagtcgaacacgcatattggagagcattttaattaatgaagagttaaaagatgataaaatatttaaattggtgtgacggagagagagtcccaaagtattactatcttgtgttaccagcttgatattaaaacaatacaagatattttcaaggagtgaaaatagaatacttgtcagataaagcaaaattgcacaagattaaaaatttaaacagtcattaaaagagtatcgatattcaatatttgatgcagcaatccaaggaacaaaatcacttgtttgaacatctgtcacctatacctcctcttgttgttccatgtactgccgaatccatgcagcttgtgatgattgcccgtcatccaatgtcacatcttcttctcgccgcctgctaattataatttccaacctctcattgctcccctgcacctcctctgactcacgactctgtggcacccaattgtctttcgctgttgatactaccttaactgagccttctgtccctaaaggccctagaaaagtaatgaacagctgatttaaacatgatagacttcttttttagataatggatttataaaacgcagactctaaagcatacacagccaaaacatgatagacttaacactcaacacttaaaagtttcgaaccaatccatgcctctatgagaaaacacaagcatgagcacaccaaccctgcagttcatgggtgtgtgcatacgtgcagaacctaaaatgcagaataactgcagcgcaaatacaaatgcagcaaaatatgtaaagcactacttcaaacttggaaccagtaaagcacagaacgcaggcaaatcattgtatgcgcagaagcatatattgcaacttcatgcatatgatctgacaaacatgttgatgctggcaaatgcacacgcagagatggcagagttcacagttcaaacagaaatgagactagacagtagacacgaagcgctaagccctaaacccgcgaaaccgcataccagccccagaagaggaagcggtgccactggagaacttgagggggagctcatcgccgggcagattaaagcacagccaatccaacgccgactcgaacgtagccgaatcctgcacccaaaaattaaaccccaaatcatcatcaacaacagaaacgaccaaattccatcgcacggcgggtgctcaacgagtgcttgggagcacgaaccgatagcgcggagagcgcctgctcgatttgcgcggaggagaagccctcgagggagagcttgtcgtacaccccgcgcagccgccgcgccttctgctccctcgactcggcacgcgccgcgggagcatccgccggcgcgggcgctggcgccgcggtcgctccggagttgaggagcaggcggcggaggcggcgctcgttctccgacgagatctggagccgcggcgcggcggaggcggcgccgccgccggccgaggacgacgaggaggaggtggaggagtgcttgggcttctgcttctgcttcggcgcctgctgctgctgcttcttcttcggcgccattccgcctccgccgagctcggcctccgccgccccgatcgtctccgccggcggcgagcttggctacggcggaggcactctctggtaggtgggcccagcgacgcgccgtgtgcgctgtgctttcgcggatactttgcgggacgcgcacattacgggacacgcgttctgggctcgaaagcgtaatcgtgcattcgcgcttcgcgggtactcgcgggccacgcacagcacgaaacacgccttctgggccggaaagcgtatttccacattactgggcttttactgggccgtccattggatctatacacagcctgaaatgtggaaagattccgtgttgaaattaaaagaaattttgaaatggccgagcaaatagcgatcgaacatgtaggcacttttggaggttgggacatgaacatcgagggcgatttcttatttggaatgaacatcgaagcaaatttgacttttgtaaaagtccaaaacggcgatgttgagccgtcgataaaacaatgagatttcgatagcgtttttttgtggtggcgtggacgctaccttctctgctctgtccaactaactaaccccaattggcaaccccgttatgcagcaaaatctctgtctttgaactgatcattagaccgaagatgccttggaattttgagacaagcatcaaagcatgtgcgtttgggaggcagccagcgaccgtgcatgcgtactagggggagaattgagactatacacgcgtggcctttgaatttgtctctagccgattaagtactactatacataaattcttagcagaattatctgttctatacagtagaaaatgttttaaaccattttatttgctgctgttcctctaaacacaaagtccagagatacacttaataatattgtggtaaagggtaagtggcttcaatcccgagatcccatgttcaattctcaacacgcttataatttattcttgaaaaatgtttggatggatgtctctcttcaaatctttcttttctgtaaacacataatccacatattcttcttcacatggagtaataaactaaaagtaccaaggctttgttcggcacattgagttaggaattaatccctcgcagacaccaaacagagcgactcattagcacataattaattaagtatttagctattttttgaaaaaatggattattataattttttaaagcaacttttttataaaattgttttataaaagatatatcgtttatcagtttgataaatgtgcacgtgaaaaatgaggatagcgaagtttagaaagcgcacatactagcacagcctaatgggaccacctatacatttgtcgacaaattttctactaaaaatttgacagatgtaattatagtacaatcgtagtgtaattacactgtaacttgtattaagtttcacgtaattttgaatcgttagatctattacaagattcgttccggtgaagaagaaaaaaatcacagcacacacatatgtgaaaagatttgttcctaggacctctattttactgaaataacatgttaccgagatattcttgaaagttacatacaaattacattatagttacagtgtaattacatgtaagttacagtgtaattatactacgattgtactgtaattacatccgacaaatattagggggagaaatttgatgacaaatatctagcaaaatcgcatcctaactactcttgagtaatatgatatgttttccttaagtatttgtaaatcttttgtagaaaagataactagtcaaattttaaagatgaatagtgccaatatcaactatggctgtgtttagaccctgtctagatgggactaaaacttttaagtccctatcacatcggatgtttgaaaattaattataaatattaaacgtagactattaataaaacccatccataatcttggactaattcgcgagacgaatctattgagcctaattaatccatgattagcctatgtgatgctacagtaaacattctctaattatggattaattaggcttaaaaaattgtctcgcgaattaacttttatttatgtaattagttttataattagtctatatttaatactttaaattagtgtctaaatacaaggactaaagttaagtccctggatccaaacaccaccttagttggatccaaagtttggattttggttgaaattgaagatgatgtgattgaaaagttatttgtgtatgataggttgatgtgatgaaaaaggactgaagtttgtatccaaacaaactttggatctaaacacagctatttaaaaacggagacagtacatatattgagtgacagataacagataattgtgagtgacatctgtatagtgatgaacagttaaagccacatttattaagtagcagatgatttttctttttggtcgtatatatgcccttgtagctggtagtagccgcgacggcttcagtggccgagagttgtaacgggcgcgattatccggcgagatgtcgtcgccgccgtcctcgggctcggagcgctcgctggcgtcgctcgtctccgcggcggcgcactccgtcaagctcaaccgcgcctacctcctcgccccggccgtcgccgcgggcctcctcgccgccgtgctcctctcctccctcctcgacttctccgctttctccgcctccccgcggccggcgttccctccgccgaccgcgggcgcgccggcgaacgcgtcggccctgtcagcgccgcctcgcgcgcccgtgcgcacggccctggacacgctcgggacgcggccgcgggagccgttcacggcgctgcgcgacgcgtacgcgcggtgggacgcggcggtggggtgcgcggccttcgcggagaagcaccggtcgcggtcgtcgccgccgcccggcccggcggcgctgcaggaccccgaggcggcgccgtgcggctcgctgcggctgccccacgtcgcgctcgccgtgaggggggtgacgtgggtgcccgacatcctcgacggcgtgtaccagtgccggtgcgggctgacctgcctctggagccgcaacgaggaggccctcgccgacacccccgacgtcgtgctctacgagatctggccccctcccgacaccgtaagtacacgatcgatcacctcgccgccgccgccgccgccatgatcgaacacctgtaacgttgtttgtgctccgtgggtgcagaggaagcagggcgagccgctgcgcgcgttcatggacatcgagccgacgaggaagcggtcggggcacgaggacattttcatcggctaccacgccgacgacgacgtgcaggtgacctacgccggcaagttcttccgcatcacccacaactaccacgtcgccacccacaagcgcgacgtaagcactctcaactcgaattaatccttccttcctccgaatgcacacaaatggcggaaacattcatcgtcgtctccgtcgccggcggcgggtgcgcgcatgcaggacgtgctggtgtactggtcgtcgtcgcggtgcttcgagcaccggaacaagatcgcgcgggagctgttccgccacctcccggcgcactccttcggccggtgcgagaacaacgtcggcggcggcgacaaggccctggagctgtacccggactgcgcccgcgacggccacggcgcggcggagtggtgggaccacctccactgcgccatgtcgcactacaagttcgtgctcgccatcgagaacaccatcgccgacagctactccacggagaagctctactacgcgctggaggccgggtcggtgcccatctacttcggcgcgcccaacgcccgcgacctggcgcccccgggctcctacatcgacggcgccgcgttcgcgtcggcggaggagctcgcggcgtacgtgagggaggtggccggcgacccggcggcgtacgccgagttccacgcgtggcggcggtgcggcgtcctgggcggctacggccggaaccggctcgtcagcctcgacacgctcccgtgcaggctctgcgagcgcgccagccgcatgggcggccgccacgcgccggcgcccaacgccaccgtgtcgtgacgagacgagacacgacttggccccggttggattgaaagcctatgaatgaaaaaagtttaaaacgtttaaacgaagtgtttgttacgtagcgtagctgcgttttgctttgaatttgttggtctgcgtttgctgtttaggaggagcagaacgattatgaaaaaggctggcatgagatggtttctgctgtccatatttcacattctttttgcagatacggatggattttggaccagcgtgctacagtaaccggttatttgtgctggcaaatactcgttccggttctaaatatttgacgctgttgactttttaaaatatgtttaaccgtttatcttattaaaaaattaagtaattattaattcttttcctatcatttgattcattgttaaatatactcatatgtatacatatatttttacatatttcacaaaagtatttaaataagacgaacggttaatatatgctaaaaaaatcaacggtgtcaaatatttagaaacggataaagtactttagtagtaatagttttgttcagttcgatacggcaattagtaatttaaaaccgtcgtgattccgaaccaatgactagacttgcgtggcgtcgtcaacctcgttccaaggtttttcaacgtcgctgtcgagacgaagagaaaaggactcgtgaatattaggcctggtttagttaaaaaattatttcccagaaacaacacatcgaatttatggacacatgcataaaacattaaatatagataaaaacaaaaattaattgcgcagtttatatagaaatcgtgagatgatttttttaagcctaattagttcatgattagctataagtgctatagtaacccacatatactaatgacggcttaattaggctcaaaagatttgtctcacggtttccatgcgagtttttcattcgtgttcgaaaactccttctgatatccaatcaaacatctggtgtgacaaaaataattatcttttcgcgaactacacatgcccttagttttgtgttcgttccaaggtcttgtgttcgttatcgtttccattttttgctgcagagacgaagaaaaatgactcgtggatatttagtttctgacgcatggcaaatgactcaggtggtgtttggatacagggacttaactttagtctatgtatttagatactaatttagagtattaaatatatactacttataaaactaattacataaatgagaatgtttactatagcatcacataggctaatcatggattaattagactcaatagattcgtcttgccaattagttcaagattatggatgggttttattaatagtctacgtttaatatttataattagtgtccaaacatctgatgtgataggttttacttccatctaaacagggtctgagtgacgcactagaatctccattaatgctgcggcaattttcagtgatttttttttgatgggcaggtaaaaggctgttgctgttccagcgtcgccaatgcattgctgatccccctctctgtactgaacgcgaacatatatgccttgtgcatgaactaacttatcagttggagccaccaaccctcgtgttgtaaaaacaccatactcattaggctccagcttgtcaagcaaaatgcctgctaattgcaaagcgtaaccaacccagtgggatattcatctatctcagtagttgactttcagtaaggaaatcaaatgtttaaagccttattcggttttgagggattgaagagaattggaggggattgaggaggaataattccatgtagaataaaatcccctctaatccctctctcacatggataactaaacatggcctaagtgtctgaaaccatcatcatctaacatccatataattgagcatgcatgattctctgtcaccagggggccatatccagaaattaatgagccaaggcctgggcttccaattgtaattttgggccgcatcttgcctttagtcataggccttgttacttgagggatcacaatattagccacaaccatcaaccacgtgagggaattgcaactgaatcctccatacgtaatcaaaatttattattccactagtttgggtttgacagtgaccaatcagatcgaggccctagggtgagtgtgaaatgtttaaattccacggtaaaagttcagtccatgtgacatccacatattcttttcccccctatgtttgatcattaattacatagtgtacaactgatcacaaccatatagctagcccaaaccacgccttccaaattcggaacgaatggtttgtgaaaaagcggaaaatcccccaaaacaaacacattttcttctttctgtactattttttgcatggatcaatcaaagttttttcaccataattaattagtaatttacacggtccaggaggcggagcgcttgaggacgggcttcatcatggccctgtcctcctcgagggagatcatgccgaggtgggaggggtcctccaccatcatcttggcgacgaggtagccggcgacggaccacgtctgcagcttcctcgcctgcttgcccacgtagcggcccagcttcccgtcgtagtactccggccacccgtccctcgccagcctcgcctcggcgagctcgatcgcccgcctcgcgatcttcagcctccccgtcttgatgcacgccgccgtcagcagccacaggagcactggccgccgcaaattaacacacaacacaaaacaaacatgctcggatcgttagatgagataactactcatttggtcactcgagtggatcgtacactcgttttatacatgccaactaaaaaatcgttaaaattgttttaagaaaagaaaaatgtgagcagatttgggtgcgtcattgtagtactaataaatgttttttttacagaaaaattaaatgcatatggttttcatacttctaatggtctaatcatttttcaaagaaaatatcaatgttcaatttttttttcttcccctcaaaagaaaatgttcaaaattcttaaaacatgacttgaaacacgttcggaacagcatgtttccgtgacttcaaagggagggatttgtaggatgtaattttatcattcttaataaggtatcggaaggtattatattttctaaggatagaaacaatcgaagtacaaaataactaacctggccaggatccgccattgtggtagctccaccgggtgttcttggggtcgcacccggtgacgaactcccactcgtgtgattcgatcgccgggaagctgatcttgagcggcatctccccgatgaggtcctcccaccgctcctcgatgaggtccatgatcgccgccgcctgctcgggcgtcgccatggacgcaaggatggcgacgaagttgcccagtgcgaaccatcggaagtccatccgggcggggctgacgttgccgacgaagtagccgccgcggctgggcatgaagtcgaacacccagtccgggatggactccgggatgacgttgaacttgttgaccgcagtgtgggagtactcctcggtgcggtagcggtagacatcgttgagctgctggaagtcgagccagaagtaggaccgcatgtggtaggtgagtgcgtggagccgtgtcgccacgcggtccatcgtctccttcccctcgggggcgtccggcttcagcatcagcagtgcgcaccgtagcgccatgaagaagagggcctggatctcgattgggtacccgtacacgccctgcaaaaaaaaaatcatttaaatttttattgaataaaaaaggagtaaaactattcaggcgcaagagaaaaaaatgtaaaggctcaaagccttttgcccgagattgctaaaacgtaagccagctaccgtagatgctttgtgttcgtcaagattcatgttttggcctctccttaattttggctattaggctagtcgccgaaagatcatgcggttcctttccttccatatctctcatacgactagcagtattagtgtccgcaggatcttcttggtgctttgctggtgccgtgcggtagcatttcaccactcgagaagcgtcgatgctgcttgttggcactgcgttggcttttcatttcatttttcagagagttcagtttcgattccatggtgaccacgacaccgtcggtgtcagatcgtatccatcagcgtaaatgtgtagttatcgatttatttctgggaatgggagtcgttttaatttctatcgattaggatatggatggttacggttagtttgaccgagctgcagtagctgcatgcatgtacaaacagtgctttttttttctgttttgattattgggatcaattaaccagacagtgatcagtaacaaaatttttcagcattatgttctttattatcagctaaagcagaaacttttttttttctggcagctaaattcatccggtaaggagcctcacccaaaattcatttagcaactgatgccaaaatgatcagcacaaactattttttttaactctttgatggcatataaaagtagatatggtgatcattatcaacaataataacatataggtgtaaaaaataagttttttttttaaattgacaaactagattaattatggtgatcattatcaacaatactactccctccgtttcaagttataagacattttgattttagtctgttttaaatttgactaaatttatagacaaatatagtaatatttataatactaaattagttttatcaaatcaataattgaatatattttcataataaatttgctttgggttgaaagtgttactaattttctctaccatcttgatcaaatttaaagcagtttaattttgaccaaagtcaaaacgtcttataacctgaaacggaaggagtaacatataaatccaaaaagaaaatcagtttttttaattgaaaaactagataaattacggcgatcatgataatcaacaataacgaacaaacatgaagctagtgaggacgaacgaacgacagtagtacataccatcctgcggtcgatcatgcagcagccgtcggcgcagaggagggtggggaaggtgtcgaagccctcggcgaggcactggttcatgatgaggcggatcccgcgctggcactccgccgtctccgccagcgacaggtcgccggtggacttggtgtacgcgcggaggaggatgatccaccagaagccggagtccaccggcgccacccgcccgatggcgctctccccgaagtccgccaccagccgctccgcccctcctcgcttcgcgtccttgagcaccttgaagctcgccggcatcgccccttcccccagcttgaacctgtcgatccgcttctcccacccctgcagcagcagcgtcttgagcaggaagttcttcacgatctccggctccccgttcatcaggaacgccagcgcgctcggcacgaaatccctcacgaacacctgcgtgtatatgcgtgcagtttcatcgatcagattgttgcttttaagattttgagaatatatgctgattggtagcagggttcaatctttcgtttttggcatttgtatcgggggtgctgatatgatgagattatttgaatttttaaataaaatttgtttaaatttgaacaaattttactaaattaaaatgtaataatttaaaaattttggggttttccgataggaacaaaatttcgaaaatttattccggaattttgaacacatgtgaattgtttgaggagctcaagattacgtccgtgggagactatgggcatgtttggggagcttaaaattaaaattctgagaagcagctggttggtagctagcttctaagaatctagaaaaaagctgggtttttcagtttctgatttctagttcattttctggattctacatctacagcttctaagaatctagtctaaaagctggactatttgaggaaacttctaattctgggtaaagttgcagcagctaaaagctcctccaaacagaccctatggctgctagaagttgaggacttggtatacctggtcgtagttgaggacctcgtcggaggagtggtcgacggcggcgatggtgccgaggggctggccgcggaagcagacgagggagcggcggagggcgtcccaggcgtcgaagacgagggggtgggggtcgaaggagaggcgggtggaggacgccggggtgccgcacagggaccggagcccgccgccgggggagtacatgctctcgtagctctccatcatcgccgggtaccctcctccgccgccgccgcggctggccgtgccggagatggagagctcagcgagggagcggtcgtcgaaggagcgctgcctgtccacgttgatccgcggccggtggttcagcatccgcgtcaggtcgaagtcgtccgggtccgccgccgccgccgccatcgacgcgtgcgacgacgccttcctcatccccgccacctccatctcgtacaccgccgccgccgtcgtcgcgtccgccctcaagaaccacaccgtacgtacgcgacgacgacgacgacgacgagaagagaagccaaacgcaacgagacgcacggtcgtcggagagtggtggtgttcacgtgggctcgccggagttcggtgcggcggaggagaggtcggtctctggctcgatcggcttcggcttcgggcttccggtttcgcgcgcgcgggtaaataaaggacaccgacgcggggggtgaggaggaggtgggccccacgagtcagcgacaccgcggattattgctgacgtggcgttgcgtgcgatgggggaagggaaggtggtgggggcggttacctgtctgcgcacaaaagggagtgagaggaggcgagatagaggcgacacatttgggattctttcccagataagggaatttcccaacagattttgaatgaagcaaaagggcaaacttgcatgtttgagttattttcttcgcaaccttatcattggcttaatacggtagaatgggttgagtggatggatgtacgtcatatattgtgttacggaattgatagaaaacttgcgacagttttcttctgtcaaattttcagcccttagggcatccacaatgtgcatataaagtgggtagtaagaaataaaatactactactaccagattatatacattgtgaaatagtaagtaataaatggtaatatgcttattacctagccataagcaataaacaaatgatttctctcatccctctctcatggctaatggttgtggggtccagcttactaccaactttttttatttcaccattgtaactacaacaacaactaatacccactgacgcagggcgcacccttattctcaaagtaggtagtaaacattggtgatgcccttatatccgctccaagattcatgcgggcaacaaggaaaaaaacagcagaatatagtgtcgtggaggggaatcgatcctagaccttgctcttacatagggcagcattccaaccactaagccagcccaaccgtaggtattcatatgctttaatctacttacatagcatttacatcctagttacatagtagttacatagcacttacaccgtaattacgtagtagttataccctaattatatagtagttacatgatagttacagggtagttacatttgtataaaattaggatttgcaaatttttttcaagagcatatgtgttttacttttgaattattcttccttatacatgttgaataatttcttaccattcaatcaactcaactgtggatgctaagatcctatggttaaaaaatttgaaagctttgagcctcaaaaactgtcgacagattactagctagttccttgtgttattatttaataggagtataggacgtaaatctcttctgctacttacagaaggagtttcgtcaatcccctccgcaacgcttccggtatgtgaaaaccctttcctttctcttaaaaataacatctgctttagaaaatgatttcctctaaaagaatccaatcatatgtctagaaaagataaacgagccactcagcccaattctttcaatgaaattgaataaaaaaattgtatcgaagaacatcatgttacaacacacaagtcaataacctttttctttaaaaaataatagtaatcccggttttgcttcaataaaagatagccaatgagcccataaccatagaaaatctgagggcaaaaaatatataatcaaacaatgcgggggtattctatatcttactaattaagtacaatccatctattaagtgatcctattaatacttgttgaaatttcatacaattgtgggggggtcaaagccgggcacatttgcctccactgtcctccaccgttgatattttaattagtttagttccttctcctctaggtggggtggattgagaaaataatatcattggcatccctagtcaagtgatgccaatacatttgtattggagcattttttatttctaaagtgtattagcaaagtaaatagcaaaatgtaattgacggttttacgagactgatgcttacatgttgaatccaccctgctactcctatgtgatgtgtcaaaacagttcgataaatatcgcagaacggagggggtacaatttttggcatgtgtgttccgatgttgcgtgcattgaacatggtacactgtgcgtttgcttattcgccatggtacatactcctattcaacaattgtctagcccaaacatggcaaagtttgaactttaccctaggagaatcttctcgaacttgctggatgctccacccgtttcagattataagtcattttgattttggttaaagtcaaattactttaaatttaactaagtttatagacaaatatagtaatatttacaacacaaaattagtttcatctataattgaatatatttcctgggttgaaaatgttaattactatttatttttacaaatttaattaaacttaaaacaatttgatcttgtttaaaatcaaaatgacttataatctgaaatggagggagttgtcaagtagaatagttgccctggattttattctatctagcattcaagaagatgattttgttgctattagttccttgtttgatgcatggtctcaacatgatcatggggaaacgccatcaaaaaaataattgcaagactagttgtcatactccaggtaaattaaatgtgtgtcacatcggtgtgggttccgattacacaatccagctgcaaacgcaagaaaagaagaaacataccactcttaataaattaatcatttctggaaaaaataattaatactgaatcatttcaagatagaagcatgcagaacaatccatctctttcattgatcatgcattgcaattgaatgcatgagctagattggatcacagaggggaaaagggattgtaaaccaccaaaatctttgttaaccaaatcaatgcaaaaatcaaatcatcatgcgtgcttgagtttgaaacactgccattgctgctggaggaattatgatgaattacaaggctccgcaagaccgcaatgaacaggtcaatataccagcacatgtatgattggcactttgagttttccagcctcatcttttcacttatacttatcagccaattttaaatttttaactttaaatttaaagttaaatttgggttttttccatcgtagtttattttttagtctttgtttttaaatcgttaagaacacatatatgaaaattttattcacaaattattttttatttgtaaatatgttgtttcactttttcctccaatatatcaaacgatgaggctgtttgaagcatatgtacatctactgtatattacgtgaacacgaagcaagaaacaattatacagtgtctctcaaataatttggttggataacttgtgcgtttgattaactgttagtgcaaatagagctgactacgcctatttttttggtggtgtttttaaggtaattgtgaaatgaaagctactgtttattttgtacatcacgttttattttaatttttttttccaaatgaggcttttgggaccaattgtcaatacctgctcacatcaatctcgtcattttaatttagatcttcgatgatgctgttacaaacgacggtgtgaataatctgaagattggcatatacactgtcaaacactaattaatcgttggcaggaataatgctttgttagcagcagtgctatcatagcttggttttcaatcctacatattttttcaaacggggatttgagtttcaccgcttcataaatatggcaattgaaaatgaattaccatcacgtgttaatttatagcacgtgggaataggatcaaagtgtgatgtgtgtcaaagagatatataccgtggcttatcaccaatgtcgctattgaggagcgtcgaattatcgaaggggtcacccctcttttttcaagcataggatcctcactgttatattgtttaagcactcaatgcgatcctatcaagcataggagtatcaatataatgaatccttgtcgatgttacaaaaaaccattgcacaacagtgcactccgataaaaaaaatagacagtcagtcatgtttatatggaataaccatggaacaacatttataaaaaaatatttacttattgtatatattataatggaaaaccatcgtcaaagatttattttagagaccgtgtcattttccaaaacatatgaaaccatagggaataaactttttagcatataaaatttgataggtttaaaatggggtgagctatatttcttttcatttctagctaaaaatattgaaggattgtaaaaagaaaaagagtttacccggcaatgccggatgacgtggccaaccgtttcccgccacgtggaggatctactggtcgctcggctgcccgcgtggcgcgctttgaccggtgcctttgcctcctcgcgagggaagaagaagaggagccctagctatcctatcatcgcctatactggctactgcctgtgccgacggcgacagtgatatgattcagggtagagttaattgggccgccggatatcgcatatcgccattcgattaatcaataatactactcctactagcgttcgagaaattttaaatcttactaatcatgagccttttcgagccttggattaagacccagacaaaaccagaaccgctcgctcttcaagggcgcgcgccgcgtcgtcggtaacgccatcgtcgcacggtgtacggcagcacggctgtcccgccacgcctccgggtgcgacgcgacgcgggcttcgccggcagcagcagccaaccaaccgatcgactagcttgtggcctgcagagacgcgcgcggctcgcgctagctctcgtggcggcggttgtgcgtgccacaccactgttacaagcttcccttggtttgaggtatacacgaatacggcgtgcgtgcgtgcgtggcgggcccctgcagctgcagctgctgctgccggtggcggcggcggcggggtggaagccctgtgcgcgggatggcgcccgttccagcggggcacgggtacccttcctcttacttcgcttctcctctcttcccttcccattcattgcatgccttgcctgcgtagttcgatcctagggggggccggtgtgtcaccgccattgcgtgcgcttggcgttgatcgcgacgctggcatgtcgaaggttacatgaaccggggacaacccggttacacgtcgtggaagagcagatcgagaccgcgatcgatcggctgggctggccacctttttcgcgaacgcgcaaaaaaaattgcatgttgatatattagaagaaaaaaagtttttgttacacgacataatcagccagatcaggctggcctggccacctcgaggctccatgctcacacgagcgcgatacctgcgcgcgtggtgttcttttcctcgaaaatggaggcagaacaagtaaaaaattctgtaaataagaaagaaaaagtaaattatattatgggtcatatatttttatgttcttttttgctttggattatttattgttaccctttggaccgcgtgatccacatgtaaatgacacatggataatagaggtagttagtttcattgacaggtagaccactcggtctaagtgtaacatttggtaccaatatatctactagtccagagtggaaaaacactgcaaaggaaattcaaagtgaaactttagtaagtatatgtggtccaaaatgcaaattactactcaataataaaagcagtagtatgctactggctgctggctggtgctggttgaaaagccatttgcaatgcttaccagaaaccgcaggttgaaacccttgaagcttcatcaacgatcatatatgctgggcaggaggaacttgctggatcacaacgcggcacagggtggttgctcccagcctcccaggtttaatttgagcatatcttagttttctcatgcaggtatatcaatatgcagcaaagcttaactatcgattcattgaaaagagataggtcacctgtgaatcacctgtgaactgactcactgcccctagttcgtaccagaagagaaacatatgttacaatcaaagaaagacatgttaattttgcaacacctccctgcgctctttatatatttcgttccccagtgctggaatgctaccatccaggcattagcttgggagagacaaccactcaacatacaacatacgctccttctcacagttatatcaaaggtagcagtgataaataaaagcctagcagtaaacaaaacctcgctccagatatacacgccttattactattgtatcacttgtacaaacgttttggcaatagttggacaacaaaaatatttttcacagaactgttcaaattagaactgaactaagaatcacattttctatcatgcacatgtggaagctagttttagttctaattaacaaataaacagaggaacagaaggcagaaccgcaggagagcacaactgcacaaggcacaactagataattgccgacagagatacaataatgtcagaatcaaccaataaaaccaggtccttcaggattgcatcacttggaagtttgaaacctgacctctgaactatatatatatgtatctcttggtggatagcctcttttggtaagcttctttcactcttcatgagctcgtcttacctgaggagtatcatcttgcccagtaaagtatatcatgacaccaagaagagcgaagacacatataagaatgtatagcgagttcaggctgacaagagagttcaggaaacccatgaaagatgggccactgactttcttctttgttgttcttcctgctctatatccctcaaggaattggcttatttgagaagcttgatcaccttcctctaacttctctgagccttccacctttggcagaaaacatttttggttaattacagggtgtaacaagttctctattagtgctaaccagccaagcagaaaaagatgtttcagaaaagattataagtagacaggaaaaaactaaaaactaaacataatacttctatgaatatgacagaaaaaatatgagcatgccatgaatatgcattaactcgaaaggtggctttatcagtaaaatagcacaggaaggggttgctgatgctggtgcaggcatggatttctaaggttctctacaattatacttaccacttcatactcctcatttctatcccagacgattagctttggcagctgtgagctcttggaaatatcaaaagtctcgacaaactcatcccattgtttgattccgacatacccaaacaccaagtcacggtttgcattggcagcagacctcaaaacttttaccaactgtgaagaagtttcatctgaatcatcctccaaaattgcaagaacaacttttctgtcatcatcatccaacattttgagtgtctctgtgttgatggggacagtcaaaggaagcagggattgccgtataaaatcttccaagaaacttcctgtgtgcacaagaaaaaagaattactaccacatatttgctaccaagaaattcatgggtgaaatagtatgaacaattgcaggtagctacaattaatcaccctttgttgacataagaactcagaaataatgtgatagtttgaattacttcatattagcatcaagaaaaatataaatatataataataaacacaagaaaagagtaaaaaaatagagttgcctaataaataccttcaaatgggccataaaatacactttgttctttgtactttggatgaagtgaaaccaatgcaggaaccttatcaaaatcataagtgaccatgaagtcctcagaaaaatcttttgcaacagcaaaccatgctcttttcttgtatttccctccataaccagcaatcaacgactcattcaccccaaacccaatgaacattggaaagctcgtgccagcattctcaacaaagctcttgatcgcagagtccgactcaagaatagaaacatcaggtgcaacaaacttattaagattgcggacaagcaagtcagcttttcttgaaccagtgtattcgatggggaccccgtggataaaaagcatcagtgtagggaacccgctgtattcagtaaaaaggaaaggaatattaggcatccaccggcatctatactgtcaagaaaaattgaactagttatgagggaaacatcttactccactccatatttcgatccaagcttcctgtacttgtcagcatttactttggcaactatgatgggctcactcagtcctgccaacaccggtgcagcttcatctaactgcaacagtttattttctcaatcttaagtcctagtataaaacagtataatccacagaaagttccctgctgccataagtagtaagcaaactgtaaaattcgagaacctagtaatggccaagaatgaaacatcttgatgcgtctacaagacaatatgatgattctcacgcgaccacgcccacaagcccacaataatacaaggacttgtctctctaccttttcacagtaaaaaaaaaagctcacaacaatttcctttcttgagttcttccccagagtaatctcgatcataatcaaaacgacggcatataacatctcatttgttgtctaatggtcaacataagaatcatagtgacaatcctaaaactatataataaaaaaaattatcatcctttaccctttcccccacacgccctaatctgcagttcatgagatctcatctcgccgaccaattacgatcccggatacctagtcaaacccaccacccccacaacactcgctgcggtgctgacgagatccacagcgggcggcaaccacagctcgcaacagttgttcactcaattcgcatcgcatcacatctcgcaacttctccgcacgagttcttgatactggtaacaagcaaacacaggtggtgctggtggtcgaggagaggggagtacctcgggggcgaggcgcttgcagtggccgcaccatggcgcgtagaagtcgacgaagaggtagtcgatggcgcccagcgccgcctcgaagctgctctcgtccagctctatcacccgcccgtcgcgcgggaactcctcggcggcggcggcggcggcggcgtggaaggagagcagcaggaggaggagaggaggcagaagcagcaggaggaggagggggaggggtctcgtcgtcgtcgccgccatcgccgccgattccgatctccgccgcgccggaagggagtggtcctgacgcccacggaacttgactagtctcttgatggattggaggggtttattgggatattttcgtattggcccctctacagtagaaacgtgtacattttgctacctacattaggggtctcatcgtttggctttttttcataataagctaaaacggtttattagagaataaaaatgaatttgttggtaaaatttttatatatgtgttctcggtgacttaaaaaccaatgctgaaaaaaaactacgttgaaaatatctcaaaatcaatatcaaaattaagtttaaaaattcaaattttggctttttctttggctgaataggccatccgatggaagcctaggattagatgatgtgaaagttaacctttgttaattaatttggagcgagttgcgtttcgagccttttatcaccaaactttcactttagagtaagaataaaagtgagctataactatataaatttatgtgaaagtaaaagataaagaaaaaacgagaagtattggatcttgagtaatagctagctatacatttgcttcaagacatttacattaaatatatagttagagaaagagatgatagaaaaaatatagtcaaatctattatacattttagttttagtatgagctaatagctactagtaacagttagctatactattaaactcgctcttaaatcatcctttagccaatctttgtttcgcatttattgtactctggagcacataagtgaatcacccgtacaccgacaatctttcaggcttacgtgtagaccatcatttgtaaggtgagatagtagatgcactaaagatgggattagaagtaaaacttcgataacaaagaggtggaccaaagtgaaatctactaaatctgtttacacgaattttacaggtcttttaaatagaaattagtccatttgctccaatattcctccgtaagatcgtataaaggagggcaaacgtacttgatttagcaaattgtaccggctaacactcgtcctttgactaattattttgttaccttgtacccgtcaacattatttgacgtttggagtattaagattagtactgccttcaacgtcaaatattattgactgaagggagtatataatcccgtatgtgaattctagctgacgtactgatttgagtccaaaaacatgtgtgacctccaacatttccgacagattggcagattgcacatctctacaaataatctgaaaactaaaaaagaatatgaccaacatcttctgaaaagaatggactcgtgaagctctgaaaagcacgaacccgtgaagataatactgttgcaggaaagaacggtaagtacagcttttcagaaatttccagcaacaacccatcaagcagaaccatgatatagatgggcagtgcaactaaaatacaatcgtggttagcatattcaagaactcaggttccgcttccatgtataatatccacatcagcaaaagaaaacttgaaaggcgaggtgtaaacaagtagtaaacatgaattccaactatcaatttcaatcacaataagaaataaaaaaaaatatgagttaaaacaactgtgatcacgctgcctggtttctccacagccaggaaagttcatgccatgatattattaacagaaaatagcagtattcctacatcaaacgccatgaaaaggagcttacaacttcaggcaagtgcaaaatggagtaacaagcaataaccaatttaaagtgaagtcccaattttaacttcgcggagtgctatagaaagtaagttcattatgtagcacttagagagcttatccggaggcggtcttcttctgctggaaaacaaccgcataaactgggactgcgatgccaatgccaactgctcccagcacggaaagatacaccttcggcttctggtgcttcatcctgtgcaagttgtacatgtgcttggcatggaggtagtagggctcatcatggccatgccctcccatcctcttcacaccagtggcatggaatccacgagaatctgttatatgcacagagaagagaattcagcaatcagaagtgaactaaaatagtagagttcacaatttgatgatacaggaacaagccaaacatctcgaaggcaaatacacatccaaaccaataactatatttgaagatactactaaacaataaaaaaagaacaagccaaacatcaaagatatatttgatgatactactaaacattaaaaagaagaacaagccaaacatctgaaacgcaaatacacatccaatccaatagccaacaattccaggtctccactcttcccccatccaagctactctgattatctctaagattcgctagaatgcaccatagatacatatagcatgacaagatggacacgtatttcgacccttggcagaaaaccattagtaatactgctcatcattaacatcacagacaaataaactagttaaaaaacggcagcgagcaggtgactagacattttgtgagaaaaacaggttatttgcacaatactctcctctgcacagatgaaaccagggcaaccaaaacgagaaattggacattctgccattgccaaaactaggttttgccaaaatgccactccgcaaaagggattcgttaaaatgccaatctcaacccgtggctacaagctacaatgctatacgggaccaaattaccctcgttctcctcgcctgggcatgtggagctgcttgctgttgggtcagtccatggcacggagcagcgaggacgtcgctggcacagcggctttcggcgaacgacagtgacggtggcgttcggcgagcggcggcaccggcaggaggcggcggaggcgaacgcgccgccgccaccgcctgacgtacgcgcgccgccgccgccgctgccgtccgacgcacacgcgcaccgccgcagccagcaacgcacgcgcacgtcaccgccgccgcccgacgcacagaatttggacatcagaatttcatcacagttcacaagatggccatccgtttgatcatttcacagtgacggcatatcgcagattcacattccaccggcctacggtcgattcagtcaccacaggctagcccaaaaatcaaccaccaacatggtccatcgcgggattcatccaaacgagaatgatgtagcgattgatctaataaacgcctacgcaaaccaaatcacagcggcccaagatccatcagccctagaaacatttcgatcgccaaacccccgattcgcttttccaggagtcgcggatctaccgtccaacgcatccaaaccaccacccgaacaaagagaaacgggaacatatgcatccatcgaggcgaatcgctcgccgcccggcgccgaaaccctaaccaggccgcctcgcgcggtcaacgcgacgcagctcgaggggattggggaggagaagggaggggtagggagcgcttgcctgtcttggaggcctcagcgccggtggcgaggaggcggatcccggagcggaggccgcggttgagcgccgtcgccgtcgccatcgccccctctctggtttcgctcgtgttctcgccttaggtcgcccccgccgccgccggtctggtggtttgggttggggttgggtgccgcggtttcgctgatcttggctccactaccggttaggtcaatctcaccactcccgagagatgcggggggagtgtgagtgggcttcgtaccttgggccccagcgctgtaacatgggccgtgtgggcctccatgggcctgaaaataaaagaagaaaggaaaacaaaccagacgagttgaaaggcttcctttccttccttctcttcctcctcgtctgctccatgcttccagcacattgcaatttcagttcttttcactgcacacttcaattctgccaagtgccaagaaccaaatgtttgaagccatatatgccatggaacgatcacacttgacacactgacactgataccttgagagttcctttttgagttttgataacccagaacgatcaggttgcctcctctatcatgacggagatgctatcaacctcctggcatatctgctcgatcagagggtgattgctgtcgtttgaagagaatgtgacgacctcccccttcagctcgatccagctacacccggtctccttcttcagccctcgttccttcatgaaccctctgacgctggcagcgctgctccacatctctttggcggcatatatgttcgacaggagtgtgtacattcctccgtcggagggtctagccttcaggacatttctggcaatgatctctccaagctggatttccccatgagagttgcacacgctaaacagcgtctcccacgcggtcgttcgatggtcagatgggattctcctggtaaaatcataagcctggtgtataaagcctgatcttcccaagagatcaaccatgcaggagtagtgatcagatcttgggaccaagttccagtcttcttgcatgctgcgaaaatggtagcagccttcatataggtaccccttatgtgcgcaagcagacaatatgcttaggaaggtcgcatgatctggtctaaatccagcttttgtcatcatgtcaaaaactttcaaagcttcatcagcaagaccatgataagcgtatgttgcgatcatggcattccatgtcactgtgtcccgctgcaaaatcagctcgaaaacttggg

SEQ ID NO: 9734 - DNA, 12644 bp, Oryza sativa
  unsure (1)..(12644): unsure at all n locations
aaggatagagggcacatgtatcaaatcaaatcaatacaatcggggcaatatggtccatacgaaaatactaagtaaaaaaactaactcaagggtggctgaggcatatataatgatatattctaatttagagaagtataagtagcacctatctagtttcaactttttataatattccctccgtttcaggttataagacgttttgactttggttaaagtcaaactgttttaaatttgactaaatttgtagaaaaaagttgtaatatttttaacccaagacaaatttattatgaaaatatatccaattattgatttgattaaactaatttagtattataaatattactatattttctataaacttattaaaatcagtttgactttgacctgaaacggagggagtagtatattggggattttcagttgggtctgggggccttttaaagtgcattcaattagccctaaaaaattgatatctttactcgtatatatatactcctatcaatccgaaaattccccatttctattcccctgcgcccccacaccgaaaattctctgtcgcgcgcgctccttcctcccgtctcctctcctctcctccgctcctcgcgcgcgccatctcgcggaggggatcctggtgagcatcgcacttcctctctctgattcatctctctctcccgccctcgattttttcgcttgcgttcgttaaccctagcttctcttgtagatctgcaagaagttcttctcttaatttcagagccttaataacagtttgagtttgtttgttcccccgcaaaaaagagtttgggggggttcaattgaagttggatccgccgcccctgcagatttggtcgcctagcttccttacctatggcggttcaacctgcagagcgcggcgtggaggctccacctctgacgctgtcgatattcgagttcaacagtaaggttgtgtgtgtgtgcgcctccggtgacggtgatgccgcccgccgcctgttgatccggttcaatgctttttgttgatgcgagcgagtatgggaattcttcgtgtctgatattgggtgtgcgcgcgcgccttgctctgcaggtgatgcaggacgagctgcagaagctggcgctcaaggtgaaccaccacgaggagaacatcaggtttctcaagtcggagctcaatgccgtcgaggactcgtgcgctgacctgggcagtgagatcctaatgccctgtgacaccttgcttttgtatatacttttaatttacggattcgtggttatattcgtgtactctagtaatgctatatatcggtaccatgatgcagaataactgcgtagatcattaattaaacactatagtgaataattcgagccttgcgatacctagtttctggtaaataaggcctgttaattattaactatggagcttgtggtcattaatttttagtatgtcagatatattttctgtaaacttgagttttatatgtatgttcaagttggccagatgtggagtcatggatctgtgaagaggatgaatgacccatatgttggcatgaaaatatttatgagaggagggatggggtgtgaaaccaaccatcaccaacttaaatatttaaaacagtgaaaatacctaaatgtagttagtgatgtcatcggaagaggaactcgcagtatttgggatgaatgagcatccttgtgagtggattgcattgtcctgtactttggtacacaatggaggatagctactgttagatgtgaccagtaggcatgggttaatgtagaaagagctaagatagcaaaggtactcagtggaggtagagagagatagagactcaacagtcaacatgaacaggtctgttgagccgttgtttgcccaatagtagctaatgtcttggtttactttatactagctctactcctttttacttgatgttttgggcatcaatacagtatccaatgcatatgtttgataattaacatttctaataatatatttataaaaaatattaagaatataattgcatgaaagtgtttttcatggtgaatctgtaatatcaattttttttgcatattagtatatcttaatatttttgtatatattgatgatttaaattttgaggttgactatacacattctgagacggcatctatttaagaacagggggagtatatgataagctgtaacatgtgtaggaactgatacaccctaatgcaataattctaatgctgacaagcaaatctgacataccttggtagaggtagaccaaaaaaacttgcgttctaattcatgtcttacttactacccatgcttatcctaaggtccatatggcaagccaactgtggcatttgctgcttctgcgtgtgtgcctttaggtgctagtgtgctactacttcgcatgacatatgcatctatctaaatcaattgaggcctctttgagtagaacattggaagttggttgttgagacaacatctctgcattagtggtaggactagcaagctattgcaaaatctttttattatcacgttggaaattgaatctttttgcatgagcctaacatatccaccattcctattatctaatgttcttagcaccattggattattgcattagatggctgtggtaaatttgaatttatcatgcaagtaacaccatttggataaagatatcaaagctatctataattccatatactctttctttaactcatttccataattccatatactttttctttatcttattgcccctatttatatgctgaaccctggaacttttctcagttaaaataggcaattattattcatcgatggcggcaattgcaaataatgacacatctgttgaagaagctgaacaacgcactattcaaagtatactcaaacaggacgagacagcagctgggattatatgccaactgaagattcgtcattatcagcatgcatcaaagctgccactgatgaaagatgtccttggtgtcgtagctaccttgggaaaaataaataatgacaacctcagcaggtcattattctctctttgttttgacatataataagatttattgcaccaactggtgcaaagttaatgggcagaattatttgtttacttttgaggtaccatgaatttgttatagggtactctcagagtacttgggattggacaatatgcttggtgtcgtctgcaagacttatgatggtgtcgagggtcttgaaacatatgacaaggaaggtatggttgataaaaccagtggcattcatggactaggtcgcacaattggaaaatttttagatggaagattcactgtcttttgtcttgaaaatataaggtgtgttttcattgtgccgttatattttggactctactggatggacaccttaacattataactattacactttgcaggccattttctggtgattttatgatcgatgatcctcagaggaaacttcttttgcataaaccaaggttgcctagtggagagttcccacctggttttcttggttttgcagtaaatatgatacatttggaccaggcaaatttgagttgtctcacagctgggggccacggtcttagggaaactttattttacagcctgttttctcagttgcaagtctataagactagagctgaattgcgaaatgctattcctttgataaatgatggtgctgtttctcttgatgggtctatactaagacctaatggctcattctgcctaggtaataggtatgcaattatatggatttatcctttaacatcacatcatatacttttatttgatcattagtgttctgcatattgtgggtccttcggtgatatttaattgtcctttcattttatgagtatatgcgtgatacattaccctggtttgcttactacataaagtctggtaacanaatttgcactgttctgtaacaaggcatattaagcttaattccacctcttctttttgttaatgattatacatgaccttacttttgaagggcaagcttacgaatacaatttcctgtaactgcaaatcttggggtctcaaacttacccgtaactatcactgaactggaggagcaagttaaacataagaattgggaaaaggaaaggcttctcgaggatataaaaagacaagaagatttgttgaaccaagttaaggatttgttcacaagaaaaaggaacagttcatggcttatatcactcaaccaggaatgttacaggtgaacttacaatttattctgttattttcttgactgtactaatttattagtaatttattgtcatccggagttacagttagataatgaatagaattctctatttctatgaagtgccactgtagcaagtacacatataggtcgcttgcttctaacaacggaggggaggccggactgctggaggggtctgctagagaatctaatacacttagcttttttaatattttttttccaaaactagatgtttgtaggatgcatgtagctgccttgtcactttgagagcaaatgggaggtcagacgtgtcttctatctgatacgctaagcttggtttttgtttttcctgaaactagatgtaggatgcaggtagctgccttgtgagagcaaaggggaggccagaggggtcttctagatagtatatgttccattttgaagaaaagaacttgtttgatgatataagaagtataactttgttgctgcagtcaattgatgatcgtttgtttgatcaaattgtggctgattgaatggaagtagcatgtgcattagtgcatagcaggatccacatccattctatggcttatgttagcaatgttaacttacatatgaactagcatctaatattgtaacatactagtacaagctatacttctgttaagacacctgaagagcaatactgtaaattattgtccatatattcttcttggatagggtaaaatctcagtcagctaactatttaacttgcccggtggaaactggcgaattctaggatgaggtccaggttcaaattgtttctttgaggataaattgcatttaatttatacttcatttgtgcccatcatttatgatatgtattttcttcaaatttctattttcccccaaaatatattgaattcagaagaatggaaaatggtgatacgacaatggatctgatgtcttcactttttcagagagcatcgcaggcttcaccgacaattccttcaccagctactcctggaagcaatccatttggatcaaggcctccccacctgcggtaatagcataagactctaggcatttccttcagattggagtttgccagtgatagatgatggcttgatggcttcatgccgtcagaatgcattgtgcaacaatcttgatggcattcgaggaaaaaaaacaatcttgatgttactggcataccatatgttgctaagttagtctgtcattttgctagttgcaagttgcaacagattatactctcttagtttttttttaaccctttcatcagctcttttgcatcttgtcaaaagaataccctttaattagctcttctgcatctttgttagaggaagataatagagcaggtagcgaagaattgaaggaacatgcaaacgggatgtaccttctccattaatttgttgaaatgcgtgtggtttcagaactttcctgctggatgatgcaaggaatttttgttttgaacatggtgtagaaagcagctttatcatcaatgaagaaacccaactttgatgagaatttaccagtttcaatttctcttgctgatctttaagtgatgatgatccaaagctgtagtagagatagatgtataactagggtgtcaccacctttatctggcatcaacacaattgcatgcgtggtgttgccgtttgattcaattttcaaatgactaatcataataacgttagcctatactttatgtccagcatttttaaagtttggttgtatacttgtatacattctgaaaatgatcttccgtctcaaaataagtttatttttcatctatcctacacatataccaatacaaaattaaaaaaataccctcaatcaaatatcaatgtaattatttctcaatttatctattcctaatgcatttatcctctacttgcttaaaaataaacttattttggaataaatagatgaagccaaaaatgattttattttaggacggagggagtaccagtctaatgttttttgccgttgttcataatacattcagcaacagcattaccaataatgtcgcagtgtcaaggctcaatagtaatcaagccagtaaatcaacaatctgatattgctactcttatcataggatagtagtactttcaaagtttcgatacaatttcgctattacacctggtagcaatatgcaacccatgaatgccatgaggcactgggatattacgtcagctacagagttttgcaggctggggttgaagttttgaacatccttgtccagcctagagaatgttaaaaatctgaaataattctggaagccatccttggtgatgcacactgcctcctacttgatcacctcatagacaaatttgcttacatttccaggcttgaaatttcttggactggatcacctctcagctctcgctgcaagttggaaaatccaagtgagatcaactgatatgctacaatgtacgagcaagatttatacatgtcatttcttatacaaaaggagttttttttcctcaggaattctctgttttctgtaaaattcctactaaaatcataaaaggagtgtgtttttttttcttggaacaattcttagtttcctatgaaattcctataaacaccataaactcataatcatgtgataacggaatgaattgtgctgtgccataagctcataatcaaaatactccctccatcccaaaatgtacgacgataactaacattataaaaaaacaaaaaatccctccatcccaaaatgtacgacgacaaccagcatcataaaaaagaaatccctccattctaaaatgtacgatgataaccaacatcataaaaaaagaaacggagggagtagtaataccttttgtattttttttgttgttggaggggaccttcttccctctgccggaagccacatcgtccatgctctgcccctgcctccggtaccggccgccggaggcgacgaagcccggggcacggccggtacgccttgataggccaccacccgaagccggggacggtggctatgccgccctggatccgcccctcgccgttgcaacccctctccacctcctcccgcccgcaccctctgcatccctgcatatacatacgcagttacgcacacggcattgtcaagaaggtgcaagaaaaagttgagctggtatttttgaatttctctcttctttgatacaagaatcttactacatgtacataaagtagtttttttttttggcaatcttcagaagtttcttttttacaaaaagacaaaaaagagctttggcttacaaatcatgaatttgttactcaagccaatatatgtagagatgaatggaaaaaaagtgcttgccactccaaccaatatatatatatatatatatatatatatatatatatatatatatagagagacacacacagccactctagccaatatatatgaataagatgaaaaaaaatagggggattaagagtccaatgtcctaaccgctagaccatggaaccattcgttggtacggagaacaaaacaaatctaatatccattatatcaaattcaggaacccatttccacataaattccaaggatttattctgacattaaaatggaagccaagaaccactgattgatgctaataacatgccaattatagattctgaaacatgaagctccatctcagaaaacaaacgtatacacacaagtatgaagcatatatatttacctgaagttggggtcatccctgtagctgacaaattcagtctcagaaactgctactccttcctcttgagaggaggaagcagcagcaactgcctcttgctccttggtcaccacagaagcagaagagttggatgagctgctgctgctgcacagaatgctccctctggccgcctgtggatgcttcttgcagagcagtgaagagctgaggttgcctgtgaggaagacggggttgtggacggcggcagaagcaggtggagcagggagctgcagccacagggaggccgccattgttgcgcctcctgccctctcctctgcttcctcctcccggtgaggtgagagagagagagaaatggaggtggaaatttgggggtgggggggggggggagattggaggacgaactgggtgccacgtgggctacttacctttgtggtgggataatgcgtggtggatgttgctcgttggattttatttttcttccggaaataaacatattgttttacgtgttcttccatgaagaattttttttagggaacttccatgaagaattgaacagccactcgtgtaaatgactaaatgagcccccaaaaaaaaaggcagaagaatttttttttctagggatcttccatgaagaattgaacagccactcgtgtgtaaatgagccaaaaaataaggggcggcttcaaaagagcaattctcccaaaaaataaaggcaggaaaaaattgatgcaaaaaaaggttccaccgagatttgaactcgggttactggattcagagtccaatgtcctaaccgctagaccatggaaccgcttatatccaacatcctaacatatttaaattaataaacaaaagaacttgtccctgccgattgctaggtccaggaaacactgcattatgatcaatataatggtcctatagtgttcctgttcagttgattcttgtcttgtgctgaaactctgcatatactatcaccaacctaacgaaccaccaatacttactaaatttgttctcatttcatttggttctcgtggaatcttcatagaatttaaaagtcatcaagataaaaaaaacgctgtctcttctctcctctgaattccatcagttgcacgaacagaaactgtcagtcacactcgcatggcagctgacatttgatttcccaggctcgccgccggccggcggcgccggcacgctcgcctcgtccagccacgcaccgccgccgtggctgtcgtcgccaccgccggctggtgttctgctgcgcgccggcggccggtggacggcgctaggcacggggaacggccgcggtggcggtgtgccgccgttcgattgtctttgagcggtccagattgagtgatcggtgtttggtcagcgattttgtttgggccttcctgggtgttttctgggcttcaggcccaataccacacgtatcatttccaggcccacctctttaggagaggatataagaaaattgagatatttaaatcgaggttagatgttagcacatgattaatggatgagtattgattattttatatctagaaaattgattaatataaatttttaaagtaattttctatataacttttgatagaaaacgtacgtttaacggttcaagaagcgtatgtgcgtggaaacaaatcttccatctttctagttatctcgaacgctgtcttagtttaaattttagattagactgcagctgccggagttcatggcatggatgaagcacatcgtcgccggtcgccctcacccgccgctgcggccacaacgtccatcgctaggcaagtagaaccctaacatttttaatggagcgcactgtgcacataaatttggatatagagattgtacttgtactcttgtaggtgtaattggtatgtgacttctcacagttggtggataagaggtacctgtccttatatgcaaattgcactatatatagtctataaatagatcatataatgttatagataggacaggcctggttcattatcaaaacaattaaacctgaccaaatattaggaatatagtggattttggtatacttttacactagtgactttcgggagagatttgggattacaccatcatataaaatagaacccgtctaaatgttatccccataaatagacttcactaaaatggcattctcaaatagaagctacacgctaaaccttttgcaatttaaaatgatagaaatgtcatttgtccctctacttatcttccacctccaggctcggtgcaacaattggggtgggaggcggagtcatggagctgatagggtcaacgagatgatggtagatcccttaagtcaatatcatgtgtgttcttcagtgataaggcatgcactatcactaccacctaccacattggagctccacaaaggacagttggtacatgagcatgatgagaaaggacagccaacactggagttccgtgagaccaggaacttgaggaggttgtggctacataggagcttgacgaggacaatgatgcatgggcttgaagagatcacaacgcgagagctggatgaggacgacaacgtggaagctaaaggaggttggcgggacttgtgattgagcattgggccttgagctggtggcagtgcgagaaagtgcctaggacggtagtgaaacatcaaggactaaaggacggatccagacaacaagcatggtagaggagggtcttcacatggaggacataaggaggaaccatggcagtgaggggatgaggtggccacaacagcctacaccccccgaggagaagacatggatgatgaggttcagccagaactagaaaagaagtgaaggtccaagggcatttctagtgtgcagctctttttgcaaatggtataagagtaaagcccatttacataatgatatttaggttaaacctatttttacgatgacataatttcaagtttttcgaattttggtagtatggggctctgtttggtttaaaagttcacaaaattttagtatacttttaagaaagaaagcttccaaaactatcatattttagcacgaaaataatggtcggattttgtttattttgtgcccttaaaaaattggtaatgataaatcgataagatcaaaatataaacatatctacatctcttttcttttagagggtctattcgactgtttgatatagtatacacaacacaactagccagtatatccgttgccacagacataaattattgtgcttgctagctgtgttgcagccgaacacaaacccttccatatcccaaccgtatcctctgattgtataatgtcaccgcgtgacattacttcaatccacaccatccaatctaaatcaacggccacagattaattggtactccatctaactaatcaaactaactagcagagtatgtactatgtaggtatgtacttaataggtgggaaggatttttttttaacactaaagcagtctcttcatcttcattaaacattaacccatcggcttgtagattaagaattgccccgttccgacgacagaggatgtggcagcacaaaattgatgcacaggattcacttcctccaggataatgtgctaatcgctgcatctaacaagtactaagtgaaacctaattatcatcatgtgccgattcttccaccagtcaacgatgtttgcctcttgaaaatgcaatatctgatctagggacaattatagctgcacaatttactaattagtttgattaattgcatgtcaaataatctacggccgttgatttagaatggatggtgtggattgaagtaatgccacaccgtgacattactgagtaatgtcagaggatacggttcgttccatatcatgcagattacctatctttggtatcggtacaacagctatcttatgtaaaaatttctttatgaaaaaaaaacccgtatactttttttgttttaaaatatataatattcgattagccactatactataaatgtgaaagaagcacaaagaatactactacctttatctaaacttattttataacttgaaataaatttgatccattccataataataaatctacacatattccctcctcccctcttccaaaaaacccccaaccttagattgaattttttttagacgaaggtagtccttccatcccatgaaaaacaaatatagtactggatgtgacatattatagtacaaataaatcttgacacatatgtctttaaaaaaaacttaacctaggcaagtatgtgacatctattacaatgaatctggatagtcctttgtcccgatttattatactagaaaatgtcacatcccctcctaggtttagtttttttagaatagagggagtatgtatgtccagatttatagtattaagatgtgtcatattcggtaatagattgatttttgatgagagggagggagcggttcagatggaacagtagtccatccaggcaggcacctaggaaacccaggaattatggccgcatttatgttgtcggtatcacccgtatcacatcacaatacgtcaatatcacatccggatgactaggtaaaccagtgccggagtcagtccagtcactcacaaaatttactcgccggaaaacccaaaagaacggaaaagaaaaaaaaagtcaggcagtcgtcgccgtgctcgccgcggcggggtccatcggtgtcgccggcgccaccaccacaacccagacgaggggagacggcatccaggatccagcaataatagcgcgtcgcggtggtcgtcgtcctcacctaatccccccccccccctccccatccatctattctcagccaaaagctcccctcttctctctctccctctccctctcgct

SEQ ID NO: 9735 - DNA, 5718 bp, Oryza sativa
  unsure (1)..(5718): unsure at all n locations
ttcctgcagcccaaagagcacaatttgaaaagagagtttagagttgttcctataaatgcatttctctccaagtttacaattgagggggaagaaactctagtttggcttgcttattctacctttacaaccatgattcaattgcatcttaatcagatttaatcttaatagctaaaattacttgcattgctcaatcctattaatgtgttaattcatctttgtccctgcccaaataaatgtcacgaatgccacatccgtcgtggtaaaagaaagcaatatgtcccaaacaaatgtataccaaaatggcttggagcgagtttcccccttcccccaaagccccaaaccgctattgaatggcttaggcatactatatccgccacattgccatatccgggaaagtccaaaaatatcttacgaagtacaaaatctttcttatatccattagtgccaaccgagcaagagggtggggaagggcataagaccccatggttttgaaatttaataaatatcacaaattctacttccattggtgaaagtaagcaagaggtaagctatggcttgtagcgagccggtcctctatgctctatgaagtggtttgggttattaggtatcctacatccatcaacacttataaacatagggaagtttaaatacaacctttttatacacattagtgcctaaggggaggaagaactgaagaaggtagacatggatacgaaaacccctggttttgaaatttcataaactaaatttatttaaaacattgtcatttacccaccagtaaattttacaatttctagctccttcaatattaacataagattgaagaatccatctaattaggatacaaatattaataaaccaaagtcattctagtaaaaaaaactacattataaatcacttatctcctcttgtggcttaacctgattaacaaatagaccaatccctcctcaacctccgtctcctcgaatgatcaaagagcacgtggccactatatgagcaaaccaattgtcctgagctgacaagagtccaaggcttgaattgagctagtttctccacccccacgagccacggatccatcggctcaggttccagtcccaccgggggtagagaaagcaaggcaccctcttcgtcctcctctcacaccttccctcttcacacatcacgcgttgtctcctcctccccttccccttcctcaaaatctcctcaacacgccgccttagcctcagccccagctcctcagccctgcgcatgcttcgatcttggtgaattcagggagctcgtgaggttacaattaaggggaataaacactagtttggcttgctcattcaacactttgcagcagggtccaattgcatctaaattatctgcagtggtcaattctactcattaattcatttatgtccctgcctgaatgaatatcacaaataccatatccatcggtgaaagaaaacatgcggacccaaacaaatataaacaatggcttgaagcgagccggctctcccatacgccacaaagcggctcgatatcctatatctgcaacatcgctacttttaggaatgttcgtaaatatcttatacatgctagtgccaatgggagtatgatggtgtgttggaataggggaaccagccccatgattttgaaattcaacagactaaatttgttgaaactcatgagatataaatgttaccatttctagctcctcaattattaacaagcgaataaagaatccattaataataataataataaccatattataaatcaattatcccctattttaacttaacccgattaacaaatcaacccatatgcttcccactctccatcgactcgacttgaatgctcgtagagcacgcaaccacactgtgtatgaacaaaccaccagcgcgcaaagccgagaagagcccatgggtcggcgatcgagccggctcccccgcccctaacgaaagccgcggacnncggctcngggncnttncgnggncnttncggggnncttnnccgngnngnaatttccccnaanaaaattttcccncccaccggtgtagaaaaggcaaaggcaccctcgttctcctttcacacctctccccccctcttcttctctctctccacatcacaagtcgccttcctcctccgcccccgaaatcccctcgcgaaccagagaaacctgaggcaccaccatcaccaccaccgcctccgcctccgcctccgcctcctgcgcgcgcggcgaattcgggggaccctcgcgctcgcgtggggtgtgggtggggggagatccgggcgtcgccgtcgccgggggggggagggtgctcggattcagccagcggcgggtgggggggcccgcctctttcttcttgggggggcgcggaggagaccccgcccgtcctggattccgtggccgcggcgccgattcgggcgcgggagccccagcacggtgagattttcccccgctgccttgctgcactgtgagaattgccgtatctatactgtactagtttgttgttgttgttgttgttgatgatgtggctgctcgctgttgcggaaacagtggaatggatgggggtttgggatggttggggtttgacgagctgggcgggttgaggcgggaggagggtttgcttagggtggaatctgattggccgcgatcggcacgggtgttttggctgtatcctatagcgtgaaaaagataggaaaattactggttgtatcactttttgctgggtcaggtttggatagaattcaatcgtgttttccctccatgtcttttatccgttgaaatggtgccatatgaaatgtcaggattagttataaattctggttgcacactttgtggacgatttctgttatttgagtgggttatttagcgattatgtgtccgcgaatataatctgtactgacgtaagagcagtgaattttttttatcactcatcacagtgtgtttttagctggatgataactgagagttttgttcctgttattctgagttcagcacccgattattcataagtccaaatgatattttgttgcttgtgtatttgtctaaaactgtgcttgtggcgtccagccagtcaattcttgtgagtattacgcatttttagtgctatatttggcctgatatatatactatcttgagtaggtattatggtgatgaagatggaggctgatgaggatggtgccaatggcggaactggtgggacatggactgacgaggaccgagcgctcaccgccagtgtgcttggaacggatgcttttgcttacttgacaaaaggaggtggtgccatatccgagggccttgttgctgcatctttgccagtggacttgcaaaatagactccaggagcttgtcgaatcagatcgtcctggtgctggttggaactatgccatattctggcagctgtcgcgcacaaagtccggtgaccttgtccttggatggggggatggctcttgccgtgagcctcatgatggtgagatgggacctgctgcttctgcaggtagtgacgaggccaaacagaggatgcgcaagcgtgtgctgcagcgattgcactcagcattcggaggtgttgacgaggaggattatgccccaggcattgatcaggtgacagacacagagatgttttttctagcatctatgtactttgcatttccacgccgtgctggtggccctggtcaagtatttgcagcaggcgtgcccctgtggattcccaacactgaacgtaacgtatttcctgccaattactgttaccggggataccttgcaaatgctgcaggatttagaactattgtgctagttccatttgagaccggtgtacttgaactgggttcgatgcaacaggtagcggagagttctgacactctccagaccataagatctgtgtttgctggggcaattggcaataaagctggagttcagagacacgaggggagtggccctacagataagtcaccaggtttggcaaagatttttgggaaggaccttaaccttggccggccttcagcaggcccaggaactggcgtgtcagaggcagatgaaaggtcgtgggaacaaaggactggtggtgggagctcattgctccccaatgtccaaagaggtttgcagaatttcacttggagtcaggctcggggcctgaattctcatcagcagaagtttggcaacggtatattgattgtgagcaatgaagccacaccgcgcaacaatggaggagttgacagctctactgcaacacagtttcagcttcagaaagcaccaccacttcagaaactaccacagctccagaaatcacatcagctagtaaagccacagcaactagtgagtcagcaacagttgcagcctcaagctcccaggcaaatagatttcagtgctgggaccagttccaaacctggtgttttgactaaaaaaccagctggtattgatggggatggtgcagaggtggatggcttgtgtaaagacgaaggtccgccacctgcattagaagaccggcggcctagaaagaggggaagaaagcctgcaaacgggagggaagagccactaaatcatgttgaggccgagcgccagaggagggagaagctcaaccagcgattctatgcactgagagccgttgtacccaatatatcaaaaatggacaaggcatccctccttggtgacgccataacatacatcactgacctacagaagaagctcaaagagatggaggtagagcgagaaaggcttatcgagtctggaatgatcgatccgagggatcggacgcctcgacctgaggtggacattcaggtggttcaggatgaggttctagtccgagtgatgagccccatggaaagccaccctgtcagggccatcttccaagctttcgaagaggcagaagtccatgcaggggagtcgaagatcacaagcaacaacggcacggccgtgcattctttcatcatcaagtgccctggcgccgaacagcaaacgagggagaaggtgattgccgccatgtctcgcgtgatgaactcagggtagaatcagttggggagtgggcgccaccggtagaggcagctttacttcgttcgctggttgcagacaagcagcaagcagtcggttggacggacacccatccacccacctttcagcgctgttgatagaagaagtttgtaggcagagaaagaaagctcagattctgacttagcgatccaaggggaagacaaagctctcaagttaaaactgccattgttgtatggtaggcttttgtggtcggtgtagtttttctctttttgttgtttattggggagaataccatgttcttagtttattgcttgtggcagaaccataaacagtacatctcgtcaaatgcatgagttgggaaagaagtcacctgcttttctgctaattctgtgtttttgtttgtatctcaagtgagttggtgtttatacttcggcatgttactcggggaagctgggctacatgggccagtaggcacatctgtgatctgtgttctttcaatctagtgaccttttggggaggtgactctcatccatttccatatcaggtttttgtcggttcttattttcttagtgtgtgtgagaggaatgaaaacgagaaaattgaaaagacacgtaagaggtgagatattagtcattattaattaagtattaattattttaaattttaaacatatattaacatgatttttaagtagttttatagttttttttaaagagataatccataaaatgccattgacaagcg

SEQ ID NO: 9736 - DNA, 17342 bp, Oryza sativa
ttaatgcttaatctaatcttaatgatgctagtttatggacatcacaacagttgtttaagtccatgtatgtactatgctcactgacccatgacactagtcctagctcaactaaatggactagttcagttgtcacctattatagctgaaggcatcaaagtagcagcatctgggaaacaattttgctcttctaatggtattctacaagaagacaaaaatgggaagatattgactaacaagcacttagcattagattgtaagaaacaaagattattttggcactaagctcactgtttaattgctagtagttgacagtgccatctcacagggcattggaccatccaaagtagtagatagaattgtataatatacatgacttgacaatctgaataatacaaggtgcggtgtacattttagagggaacacagtattttcagaataactgtgaatgatttactgtatgttagcttcaccaactgtccatgtaatcttgagaaaagatcacaatgtacagcatctaggttaattactagtttaatgacttcttagcaactatgagttagattgacttcaagtcttggcaggaaagatgtcagtgttatcaaactttttctaagctttgaggcaaagcataccctagacaatctactggcttcttctaagccatgaatagacaggcaataacattaacaatttgagcctaatagtgaagagaagaggccctatatatataggattggaagagaatatgccgcaagttgttgcacctatcttgaccatatttcatagcaaatcatgctccactctgcagaacagaaaatattttctcctcagctccggtgcaccgtgaattttcgcatgatgcttccccaattcatcctaatctgttgctatatatcttagactgcatatctcatatatagttatgataacaaagatcacattcttgattcaaagcagccaagcacttagcctcaactgccattaaactaatcttgctcgcaatcccgacagaataacatggcaagctttcatactgtcgatcgattctcccatccaatgaactctggtttgtgatgcttcttcggtgatgcgttcatgtgagcattaagcaaagtgtttggcgtggtacgagataattatatggcctaaaagctggctagtggaaaggacttagaaaattaaagaagcattagcaaggggttaggctctagtatggaaggcaggcatttgcatctctgaccattaaaggacggcttaaggccattgatatggatccacttgtcggctcacagttgcatcctctgcctgtatttttcatcactggaatgttatttcttcgcgctgcgagaataaagcgattttcgcctttcctccgcgcctccttcttccctgtttctgctaatatatttttatgtccttgattcctgatgttttgagctcaagtttatcataatcatcatccgtagaccccctgaagtggatgctgataagcatggaaaaatccattggctgctgagacacactgcaatcctgttaattgccactgccagcaatctgaatgttggatccaacactgtctgcacatacaagcattgcacttggcctcagctctcattccctcctggcctatctcctgcttgattgccaggggccatacatatcaaaatggctcatcacctggggttctttctgtgacaccaacttctgctgatgacccctttttatgccggttaccgcacccgaagatcggcgacggagacggcacagggagataccctgctgaaatttcagtgtcaagaattagatgattctatcatagatcagtagatcacactgttatcacactgttactgcatgtgcatgagcacgagtgcagattagggagtgaaagctttctgtccaggatcttggaatgcactgcagcctgttggagtgaaatgggccaacagcatgtgcattccagcgttaggtgatagaattgacctgatgcgatgcagagaaatgacgcgggaaaaataaaaaggatccagacaattatctgatgcagtgatgcagccgctgaattggtgcagaggggtttatgcagctggggacatggtttgctttctgcaatgtgcgttgtctatctagttttggccttctgaaatgaccatgggggactgactggtgatgaagagaaaaagaaactgaagaatttctgccctgtccatgcatgggctttttcatggagagatttgagtccagatgttgtaagatgcaccatggataagtttgctgcaaaaatctcaaatgtctcagattacccaggacaggatggttactgcgtcattgcacaagatttgatggcattggagtctcagactctcagtggtggctctgacagacatttgggaaacagctcaacacaggttcagcatatgggtgtagtttgtacagttcaattgatgttcagatgattggaatgcactgttgaaaacaaaatgtccaacgccacaacgtccaagaagagtacgagagatgtgagtgaaaaatcagcaaagctccataggctaagatgaggatgatggaagcaatcaatcacatgaactaacaaattcaaaattatgaagtctatcaagaccaactgggattcatttttccaaagatgtttcagatattaacaggaggtaacagttgccgctgagtacctgttccctttgcctctacttcttggcagacatctcacttcccaaatttctattgcatcatgcataaggtgaaactgcagcataaatagtatccatgcatcctgacaaaaaacaaagggggcaatgggttcatcagaaaattcaatataacaacttatcactggcaaaaacaagacacccagtttccattctgcagaaatgtttgcataattctcatcatagagagaccaatagaaatgaaaagagagagaaatttcgtgaagtagagaagcttcgttgttagcctacttaccgggccttaccggccaatgcagctgaatcccctgcacacgggcgagccaggcaacgaagaggacgcggcggcgacctcgccggcgaacgggagtcggcagggggagcgccagcctccgcatctccgtctcacatcctggcctcggggaagcatcgcatcgccatgccatcgccgctgacggaggaaaaaagcagctggtggtgggacgccgggagctgcgggcgcgagcagcactgcggtgcgcccgcgccgccgcggtgtgcccgacatgccggtggtgtgcggccgcgagattcgggtggccctcgccggcgccgccgtcggggcctcgggcggccctgtgcctgtgaatgagtaggtgggccaaattcattttgtgggcccaattcattggtgagatatcgataggccaaattcagttgtgggccgaatttaccgacgagtgttaagtgggccaaattctggggtgggttgaatacgtcgacgagatagcatggcccaaattgatctgtggtctcaaattgttgaggggatttacttgggctgaattcctttgtggcctaaaaccgtttgatgggaatggaatatgatcacttgactccctcaactgaccaccgaatctaaatcgtatccctcaaccgcaataccagaaatcttgacccccgaacttacaaaaccggtgcaatttgactccctcggtggttttggagagtggtttcgctgacgtggcgcacacgtggcagtgttgacctagtctttgtaccacgtggcattgccgtggcgctgatgtggaattaaaataaaaaaaatatgcgggcccatttgtcattcacaaaaaaaaaattatgggacccacttgtcccacatgtcatcctcccttatcccttcttcctcctccctctcctcccttctctatctctccctctttcgcttcatgcgagagcggcgtccggatcggcagcggcgacggcgggcgatggacggagcggcgacggcggaccgagcggcgacggcgtatagtggggatcaaaccaccccacaaactttggcgagattcggaacacggcggaggagttcgccgtcgccgagatgccgcagccgccgccgtcggtgcgcacgaggagcgtcacctccgtcgcgctcccgacgcatggagatggcggcggctgccgcctcgtgccgctctccccattcgacgcgtactgggtcgcgctgctgcccgtccaccacgtcttcctcttcccgtccccgccgccgccgccaccaccaccgttcgaagacgtcgtccgcgcgctcagggactccctcgacgcctgaagctactccctcgtcggtgtgctggtctactcgccggaggaggaggaggaggaggaggggtcgctgtccatcgtcattgtggccaccgggatgcggcactcctccctcctcggtgtgtcccaccccttcagctcctcctccatcgccgccgcctcctcgccgtgctccatctccacctccattaaacttctctcccccggcctctcgacgcctgaagctattgccgctgccgcttcaactcgccgtgaaccctcgctggatttggaagaggaggagatggccaaggacggggaggggggaagaagggataagggaggatgacatgtgggaccagtgggtcccacatttttttttgtgaataacaaatgggcccgcatatttttttttattttaattccacatcagcgccacgtcaatgccacgtggtacaaagactaggtcaacactgccacgtgtgcaccacgtcagtgaaaccaccctccaaaaccaccgagggagtcaaattgcaccagttttgtaagttcgggggtcaagatttctggtattacgcttgagggatacgatttagattcggtggtcagttgagggagtcaaagtgatcttattccgatgggaattacgtaggccgaatagagaagtgggccggattggttgatgggaattatgtgggccaaatgttctaacgagaattcagtaggacaaattcagtggtgggccgagtcattggatagagggtcaaattaagtaagtgggcctaattccatgatagaatttagtgggctgtattcactcgtgggcagaatatgtcgacgaaaattacctgggcctatttcattgtcatgaaataattgggctgaatttgtctgtggtagggccgaatgagtttacgagaaatcagtaggcaaacctaagtagtgggtcgactttgtggaataagttcacttcatgaccctcaactgtgattgaaatctaatccataaccctaaaccacaaaaccagatatctcgacccccaaactcctaaaaccggtgtaattcgactccctgcgcggttttgggaggcggttttgctgacgtggcgccacgtagcgcctacgtggcaatattgaccgaatcttcgatccacgtggcgttgacgtggcacttacatggcattacaattgtgggacccgtttgtcattcacacacataaaaaaaattgtgggtcccactgacatgtggaccccacatgtcatcctccttccttcttcctcctccctctctcccttctctctctccccccttcttcccctacgtctcccacaggcggcgatgggcgatggtgccgggcgacggggaggccaaacggcggcggccacccggctagagcagcggcggcgctagaggcaggtcgagcggaggcgacggcgtcgggcgacggggcggcgcaaacgacggaggcctccaggcgccgtgcaacagcctcgacctcgacgccaacctgctccgcggcgacatccagattgagccggcctctagcgccctcgcgcgccccaggccgtccgcgccaccctccgaggccgacacgccgcgcgcctcatgggcggaggctgctcggctcaagcggaggcgacggcgccgggcgacggggcagcccaaacggcagcggccgcccggctcgagcggcggtggcgctagaggaggatcgagcggtggcgacagcgatgggcgccagggaggcccgagcggaggcggcggcgacgacggcgggcgggccttcctccgtgccgtcctctccttgttagctgccggcgcccgaagctccgccttcaccgccccccggccgcccgctctcgctgtccccgcgtgccaccggccgaaggggaagaaggggagagaaagagagaagggagagagggaggaaggaggagtacggcggcggcggctgctgcacggttcgccgctcctgccctcgcccgtcctgtcgtcgtcgctccggccctcacttgcgcgccgccgccgctcgttctcgtcgcccgccgcccactgaaggggaagaagggaagagaaagagagagaagggagagagggaggaggaagaagggctgacatgtggaccccacatgtcagtgggcccacatttcttttttgtgtgaatgactaatgggccccacgcatatttttatttctaccgccacgtaggtgccacgtcaacgccacgtggaacaaagactcggtcaatattgccacgtaggtgcgacgtggcgccacgtcagcaaaaccgcctcccaaaaccgcccagagagtcaaattgcaccggttttaggagtttgggggtcgagatatctggttttgtggtttagagtcatgtgcaccggttttaggagtttgggggtcgagatatctggttttgtggtttagagtcatggattagatttcgatcacagttgagggtcacaaagtgaacttattcccgaatttgttgaagggaaataggacaaactgagggacctgaattgaacatattccgggataaactcattggtgaaacattggtgggcctaaatcactcgtaggccgaattcatttgtacgccgatgtcgttgacaggaattaggcggacctaattgattcctggccttcgtggtctcaattggtttatggtaaaagatgggttgaattcgttgacatgaattgattgggttgaattcgttcgtggtcgttggtggcccgaatttgttgacatgaactaatcgggttgaattcgttcgagggcctctgttccagctacaatactcctattttgagctttttttatcatcatcagtaagctcatgataaggcatggagtaatccggtggctgctgaaacacattgaaatcctgttaattgccagcaatctgaatgttggatccaacaccggttacacatacgagcattgcacctggcctcaagccctcaactctcattccttcctaacctatctgctggagccataaatatcaaatagttcttcatctggagatcttgaaactgaattatcaaattgtttagatgggagaaataaatcttcatggatgtaacactttcaacagaacagagaccacttgctttgtattgcgtatggtaatgacagtaggattcagatatatctgggtctgtcctgaacaacataggggggaaacaagatcaatgaggcaaaatttcaacatttgctttgtatagtaaatgaacgaaaaaattacactactgggtttacagatgtcctcaaccaaaccaacaaattcaaacttatgaagtctaggcaagaccattgggcttcatttttcaaagatgtcatatgacagggaagtccctaacagttgccgctgagtgcctgtaaggctaacatttgcctttactttgtaatcctggcagataacatggtcatcactttccaatttccattgcgtcatgcataaggagaaactactgcataaataatctccacactttttttgtcttgaaacctagcaccctgcatcatgacaaaaaatggcaagggatcatcagaaacaattcaatataatcgctgagcactttcaataaacttttccattttgaactgattaatacccttaattcatgcttctctcaaaatcagaaacatttgcacatttctcactcgcagaaaaacattaatcaaataaggatccatttttcctcctcaaagtcataatattagcactgacatcaacaggaaaaggaaacaaagattgcacacttttgcatgctcgcaagcatcgttatagggggatatgtacacacatggcacttatgacccaaaatgaagaagaagaatgtgagcacaaaccattactattttgtttggaatacctgcccgtacatgcaaactgtaatgtaaagggtaaaaatcaatatctgctcaatagatcgattcagcctgatcaaatataaacaaacctattgattatattttagagtataaagattataaacagcttttacacagggagagggactatgggatagcatattttcttttcatctagttagctcactgaatcgtgggttgcacaaactggaaactccacatgaagtagttaacatagccattctaccaaatgagctctgctcgttttcagaagctgcattgtcattatgaagagggggtctgcttctacccttgagttggctatatatcatatatatgatacatgaacaaggaaagcagtaaagatttagcaggcgttaaagcaccatttttttttatcactgaaaagtaaggcaccttacagtactagatctaagaaagagccaaaacccaaagaactttacaagtgctcctctagaactggtccatgactttgggtcagccaattagggtattttacttttgtgtgtgtgcatgggagggtgctgggtgatatctagctccatttgtggggtttattgagtagctctaattgttagtatggcgtgcggtagtcaagcgacaaccacagacaatgtggagggctgccacactatcatgggcataacagatgaggggattcaatctcccaagcttctgcaacaaaactcaaatgcaaattcttcccatggcttctagttgaaaacaagattctaacagtggataacttggtgattcgaagatggtattatcaacaaaattgtgtccttttcagtacacaccaagaaaccgtagtacacatatattgcaaattgcaatgtccctcagtccctccacgatggaagtctagttcttagccctgatttgggcattttgagatcatccatcaagtggacccgatccacttaacaaatagcaagtgacccaactaatgaccatagacatgcagagggaacttaaggggatcatcatctacatcatgtggaacatgtggaaggaactcaacagacagatcttccaacacatatcagccactgcccaggacattgccagcatacaagaggaatggaaggcatcgagcaacagcatatgctgtgctccatcagaaggacaaacgaacttgttctctgtatttctgctgttttgtacctcacccctcttacgagttagctcaaggagggcctcttggcagtggagttgtaccctgcatcactgtatttttcctcacctcaataattgattggcagaggtcctgcctttctgttccatcagaaaaggaggagcacataaaaatatacgtacaataaaagatctgaaatttgttcggtgccacttctagagaaaaaaaaattgtgtcttctgatttgagttgctaatactaaattgtaaatagaaaaaaaaattgttcaattctcttttcaactgtgttcccctaacacgaaattctggatcttccatcagcagatggtatctgcacaatcaaactgccgattacgaaaaggaagctgagaatggtgcgagaatatagggactacaatattcctgattgtgctagttaagaaatctctcaaggaaaaacagaggcttgtgacaatcatagatcacctgcagtttatgatattaatggcaacaataagacaaactaaattagtatgagtgattcctagatattggggctggtcagatccagcatctaatgcttaaaagtaggaatcatcagcctagtttccaaatatcctatttaaccttcagcctcaaattaaccagcattttttgctcttctaccatatccagtgtcatcgtatccagccatgagaatgccatcaaaagcacagatcttggtcaggtctgtacccagatcaaaagcacagagcttgtggacaacatccagatgaatggttgacgtttagttagagattcccttttccagtcgggccatcatcattttcgcagcttacgggggcacggtgacagcaggacagatgcactcaacctttttgttctagttcactcaaagaacttgggcacaatatccggtttagccatattgtcatgattgcagtggattatagggtacgaggatcccaggaagcacactcaatttgaatcagtcaatgaatcagaattttagaagtgtttgtaaaatggtcataactcacaacttccttcagaatcacaatcctatgcatattatatgaaggattgaatgtaaaatcaatttgtcttaatttaaataaaattgattagttcaactaattttcttttttaaaaatcttgttttgttgcttggagttataacatgttatactgatcatattggctgcaaaagatgagtaagatttgcaatgttaaattgaaataattggaggaaagttgaattcagtactgtaggcttgtgtaaaaatgccttttgaaaattaaattttgaacatggagagttatacaaagatatttgaaaattaattaatgttccgcagactaggcagtaggcacccatattaaaaattgtctgattcatgtgtatgatactatgatggatatgaaatgtatgatgcatttggtatgtttattgtaaatgagttttgaactaagttcagagatcagactgaaactagctcaaattagtttaattaagatgaattcaaattagtttgatatctcaaacacagggtttgaataaagggagatatgtaacattcttttgcaaatcccatgctgcatagaattaaggcaggacaaggttcaccaactactggatcagccattgccactttctcctctgacttgcacatcatcctttcaggtaatctccatctaaaccctgaccctccagatcagattatcgtgcttgttacttacttgaaggtaacatttcccagttacagactacaaatgctattcaactacttgaatgcaatgagcgatcgtgttaagaagttgaatgccactgaaacaaccatgatgttccagttcctttactcttcatccaaccaaatgggtgtaattaacaccaacaactaacccattcagtggtaggaaactaggaattatgaagtttggtcggtctgtagtctgcaattctacctcacaaccgttgttgttagagtactaactatgttttctgcctttccaccgccgaatcaaaaatttagacaattgaagtgaacgcgagatcaattccgtgaagtagagaagttgtaattacctttttacctatttaccggccaatgcagctgaatcccttgcacactgcgagccaggcagcgaagaggacgaagaggagcacgagatccgcgaggacgatgagccacagcttccgcctccacgtccacccggcgccgccgctgcgggcgcggcgctccctcttgggcgtcctccgcgcgagctcaccttccctccgctccgcctcctcggcctcggcctccgctgcggccacctccccggcctcccgcgcgagcgcctcctcgtcggggaacggcaggcgcagcgccagccgcggcatctcgtcccgcatccggttcccgggtaggcatcggagccgccggaggaagagcagcaggtgcgacgagggcagctgcggggcccgcgagaccgccgcgagcacgagcggcggcgcgaggagcaccgcgtgcgcccgccccgacgccgtgtgggtgacgtgccggtggtgcgcgggcgccccggcgacgagcgcggccgcgaccgccggggcgtcgtcctcggcggcgccgccgtcgtggggcgggggggcgtgggcgaggtcggcgacgagggcgctgtcccggtaggcgcaggcgtagagcagcgggtgcgaggccgggagcatccgaggcagcgtcgtggtggtcgtcgtcgtcggcggcggcggcggcggcgagagagcgagagattcacgaggatttcgggggggaagagaagaggaggtggcggtggctggcggtgtcgttggtacagcaacggaatggagacgaagggagccagactggacacactggactagttctctattactagttcacatttgagtttttaggaaaaaaagaaagataatgaaatgtgtatatttttttaaaaaaattgatttcctttaacttttttcactcttttttttattttcttattttttaagtttactaaaaagcaaatgatctaatgcggatttacggaataaaactaatagtgattatctgataaattagcagacggaaaaataactatggtgttccattaattattcgtacctgatcggctataacccctagaaacaaaagttttcattgggcgaattttaaacgcttatgtgacagagattataaacaagtactagcatacacatctcaattaaagaaaaataacgttcctgaatttagtagtttagctttggtggcatggcatgaactgttggttatgtaggagtattaggttgtagtttgttgagttgaccttactcactcactttgtgatccatcaacttgaaaatttgaaacccttttggtgttttaatgtggtacatgatcgagatttgacatttttcataatcttctgctaatgtttgtttttcttttggctagggaccgtttcagctgcaagcttgcaacacatatccatactaaataattatgtcggcctaatagattactagatccacgaaggaaaaaatagaaattaattcaaattcataacgggcatccatgtgggagcagttggcgtttggatctcaacgctctcccttccactagtactagtccttgacagcgtgtttagattgacctgctcaaattatttactatatttatttatttaattttattattcactataacactatcagatgtaacagatgtagtacagagctgggatggttgactggttaagatagattactaattttgaacaattaagacgaaactattagcatttgttccaataattaatcaaaaaagatttacaaaaaatacactgctatacaatactattacaagcactatataccatttcaattctcatttataaaccactaatagagtgtagtttaaactcacaattatacgagtatattatggataaatatacatgggcgcggattaaacgctagaaggattcgcggcggtggagcacaatcagtggcagatggggcacagcatgaggccgttctcgttgcacttggcgcaccgctcgacgtcggcggcggcggcggtggcgccggcggcgaccaccttgcagctgccgccgcactcccagcacgggacgaaccgcgcgccgccgcagccctcgcagccgcggccgtccttggcggcgcaggcctcgccgcgcgccctggcccagcgcatcatctcgcgcagcttgccgctctcggcgagctcggcgcacgcgtcggcgccgccgaggtagcggcccatgacgaagaggcgcggcggcgcgtcgccggcgccggctagcccgcggagctcgcgcaggtactcgccgtggagcgacacgtcgcgctcgtccacgacgacgggggatccgcccgccgccgacacggcctcggcgcacgcctccaccgccttccgcgcgcgctcgcagtcctcgaacgtgcgccgcacgccgcggagcgtcgtggtgtacagcaccaccccgccgccggatgcccccgggggccgccgctcggggtacccctcgaacgggtccctccgccgccacctcgccgccgcggcggcggcaccgccgtcgttccccttgttctcgcggtcgcgcatcaggaaagggttgtccttaacgacgcgccgcccggtgagctccggcggcggaggcctcctgtcaacctcctcgttagcgccacgcgcggacggcgccgccgccgccttcttggcagctgcctcgatcgccttcaccggctcaggcagcaccgtcgtcgtcgtcgtcggtggctgcggcggcggcgcaggctgcttcttcttcttcttcttggtcttcttcttggcgttctccgtcgtcgtggtgttggagctgagcgcaggcttgatgtcctccagggccttgctgacctccgaccacgacgccggcgcgaggtcgtagccgtcgagcttgtcgagcagcgggagcggcatcacggtggtggtcggcttcttgccttcctcctcctcctcctcctcctcctcttcttcatcctcctcctcctcctcctcgtcgttcttcttgccggtggcgatgagccagggctcctcgatggcgctgatgtcgaacagcgagacgctcgtcggcggcgggcggtagacgtcggccaccgtgacgtccttggagcccgcgcaccccatggctaagctcagctcagctcagcttggagctaagtgagagctagtgatggcgtctcactctcactctctctctctctctctctctctcttgtgttcaagttgtggagggaaaggcaaattaaggatggtttttgagtggctgagtagcgataagatgatcaagtgagagctgcacggctcatgccgggttaacgtcaatgctctccttggcgagttttgcttctgcacctctgcgccactggaattagatttcatttcatatttgaattcctctcgttctcgaaaaatcagtggtagtggttaagccaaaaaaaaaaaaagagcgtgcatttgaccaaacaggatatcaatcttagccacagtggcaggactaaattgcatctaatcagccaaatcacggtgaaaaccgaagaatcgtacaccctgcattccaaagaaaatctaatcctgactattctatatttctatatattgagatcatctattgtaaatatttacagtgactttaggctcactaacatgtgagcacgtaacaaagagggtccatatgtcaataactgaaagtcatgtgatttaagttaaaggatcacaatccgtacatgtatatgtttagaatcattgctagaattggattttccttttaggatgaaagaagtatggactaagctagagcctatagtggcacaaacaaccaaacacccaatgtattttttggaagggcttacaagatatgatgttgtcttgtactgttattgtttcgcttacaatgattacaagttgtttgtaacgacttatcaataatcaaagaataatttgtaaataaaacttatatatacatgtgtgtttagcaatctaaacacaaatgtcggaaaaaataaactacgttgaaattgtttgtaacaaactatcgataattaaagaataatttgtaaataaaacttgtatatatgtgtgagtgtttagcaatctaaacacaaacgttggaaaataaactatgttgaaaaatcccaaaatttttagaatttaaattttggctacaacttacataagctaaaagctcaaaaggtaaacgatgggataattggctataatactacgtacttgtggaacatctcaaatactccctccgcattttaatgtatgacgccgttgactttttgaccaacgtttgactttttgtcttattcaaaaaatttatgtaattataatttattttattgagacttgatttatatcaaatgttctttaagcattgacataagtatttttatatttgtataaaatttttaaataagacgagtggtcaaacgtttattaaaaagtcaacggtgtcatacattaaaatacggagagagtagttcatagtccttttctctctctcaaaaaaaaaggttcatagtcattggataaaggtgtctctggtaaccatctgaaccataaagcaaaatcatattccaaagccggaactagatacgttgattaactcaatactccatccttctctatatataagaaattttgattggatatgacacattctaatacaataaatctggacatgaagcctatctagattcattatactaggatgtgtcacatccaataaaatttattatatttagagacggatggagtagttagttagagtgcaaacaactggttattactgcataactaaggataagaacagggagatcacagatcagagacctttacatcctgaatgcccgaaagataacaggggcaagaaacgtgattcacagctagttgcagactcacgatatcgaagtatcgtcacagtgcatctcagctgtgaaactgcagaagtaaaaaaaaaaaaagcagcattaaattcacggaaaacccatgaactgatgcagtacaggttgtttgacagcgaagtagaaacctgaggctgaaagttaacaggatagtcccaactcccaactggtaaaactatgttgctagttcgtccttcctttcctgagaattatcagggtttacaaaactacggttatcacgtgcaataacattttcagtttttaaaaccataatatacctcacagtaaccttacagtttacatgataaccacacggttaccgtcaaaccttagagtggcgataacggtttagtaaacctttaccactactcgtattttaccaacacaagctgctgcattcagaatttcagacgtcactgtgcaggtgggcccaccttactaatgacgtttcttggcatgtcatgagagtatgagaccccatgtagtcaactggaaacagttgggcgtaaactgtaactagccaacgtagtttcatctttggctgcattgtgcatgtcattttcgtgcagttctttgccacaagctctttctgcaacaatgcttgacaattctgtagtatgcatagctggaagctggatcaccagaataaatggggttgcttgaggccaatgtacatgtagtgtgtacagaagagtacagatattattgtccaaaatctgcaaacatcagcctaaatattttttgaggtgctgtttctactgccttgaaggccatccaaacatggcatggtttgattgttgatttacttttaaagaaatgagagtatatatacgtaaaacagacagatgaagttttatggaaaagatacttagactgtgttcgcatgagctcgatgggaacttattccctccgcacggaaaacagaacggtccattagcccatgattaaatggagtagctaattttttaaaaaaaatagattaatttgattttttaaaacaactttcgtatagaaactttttttaaaaaaacacaccgtttagtagtttaaaaggcgtgcgcgcggaacacgagggaaa

SEQ ID NO: 9737 - DNA, 22070 bp, Oryza sativa
atagcattttatccttccagcatattcttgtgcaatctcatcaacaattcggtggaccattctgcagggtccacaccatgaggcccaaaactcaataagcacaggtatatcactgcagatcacatattcattccaagaacatgccgtaattgttttggctgtacaaacaaacaaaacagagttgtaagataactcctctatatttgaacgtaaaactaaacaacaaatgatgttatatgtcacaacagttgctacactcaagtaactacaaaagatgctaaatataaccctgacactatccgcttgctgagagtaacagttgctatccagcagccctatgctcatgtaacaaagttaggaaaattgaacatcttaaaatgtgttgtagctactagtatttacggaggtgaatatgagccgagttaattggtttgcctcaatggtgcagtttgcaggaacagaagcagcggccaatatcctggaaatgaacaactgaacggtagagctgccgaaaactaagagcagccaaagaaagaataattgaagaattgaagtttagtgatatttcactacagctccaggattttttttcgaacgaaccggcactacagctccaggatcaatcatactttactagtaacgtgtttatttcaagctttcgacatgtatcaaggtttcaacttttctgtggtactgaactggctgacccatttcttgtacggttacactacccgaaaaaatggtatacccctacattgcattctctagcaagtaaaattaagctgcttccttacggcttctcccttgaagagtgcatccatcataccactgttcaactacattagactactacatggaactggaagcaatgaacatgagaattgtcactaatttgtcaaccacacaacacaccaaagggggcaagggcagttactacacgacaccctaaaggcagcagaaatttttggcacaagcaaacggttagcttcagggggagggggggggggtggatcatcatcaaccagcgaggaggcacactccctttacctccgcgaggagaatacgcgcagctcaccgtgcggatccggtgcgccgcccagcggcgccggcagcccggccaccggcgtgcggcggaggaggaggcgccgtacccggccctccgtcggccgggcgccgcgagcgccacgccgcggtagaggctccgcggcggcggcggcgcggggcaagcggtggcggtggcggccatggttgttggtgttggttttgggtggagactcgtgcgtgcgtgcgtggcggaggatgcgcggtaggtaggaaaatttacgaggcaaatccgcacgcgacgcgagcgagcgagcctagcgcttatgatgatgaggacgacgctgacttggaggtgattttggagtgtgatgcaattcactcaaaccttattatttcctccgtttttattatatttatcaatagttttaactttttttacaaaaaaaatatattaaagttaatcgattttataaaaatatatgatagtgatttgaccacaaagcaaatatgttatccaaatttacattgtttaatgaaactaatttggtctatcttaacaaagtttgactaagataaaagttaaaaagcgatatattgcatccctgtgtacaacaatgttcaactaggccttcacataacaattccattggaccatgtgtacctcatcattctcatccttcaaagaccaaaccggatgggcaaaaactcatctcgccctgcaatcccctgcatgactgaagatctgaaagttggtagggcaagaatgtctgaatctcctacattcttcagggaacaaggttctcgcagcaagcaacgcctccatatccaagaatctcacttacgtttgcacggtagaaatgatgaaaaaccaggagcttttcgcaaaaccttgatttgttcgtctcgagctgcccatgctgctgcgtcccggtgtatcgtaccatcagattcagagagagcacacttggtttcttgtctccctgatcaagactcatgaaatggaatggacacatgacgaacaccagagaacaaaaccgcataggcaacagctacaaagtcagagagaaaacactggaggatgccgtcctggaagatcttcatgttctgcacctgcagaaaatggttgtgctcatataaaacttttgcgacaaaatctgtaaaatggaaaaatgcatgtggtcatcggttcacatacacatctatatttgagtgcagaaagattatttttaaaacccattttttataaaactgagctcttcgtacaaaagtcaaccttcactaaaaaaaccaagtggagtaatttttttatgggataaaaaggcttagcgcccagcttttctgggaagctcaacgggattttttaaaaatatccggcatttgacacttgaaacaagacaataagatgacaccagctttgccacctcatcatcaaactacctatcagcacccaaaaaaaaagaaaactccatcatcaatatgtgactatgtgagcagtgttagatgctacaccaccagatgacaaaaaaaatccattcaaatgttttgtttggtagttcagactctctgaaaaagaaaaaaaactactccacaaaactgatgtttttcctattggattaacaactaactggagatcacccaacgttagaaataaagggctcgtatcctttaccataatgacatttttatcataggcattgacatataaagcaatatgaggatggaacctacatgccactgactgtaatgttagtgcaatatgcgatgtttagttcccaaacaaaaacttttcaccctgtcacatcgaatgtttggacacatacatagaatattaaatatagacaaaaaaaactaattacacagattgcgtgtaaattgcaagacgaatcttttaagtctaattacgccatgatttgacaatgtgatgcttcagtaaacatttagggcaaccacaatgtggggtcttaagcctctaaagtggtccttatacattgtgaaagtagtccatatagtagtctttagtatgaactacccatatgcataatgcctacccataagaataaaataggaattgtcagggttatggataccacatacctaatagtagttgactaaatctcggcagggcccaccacatatcatgtcctatacggaaacaacctgcggatgtaggaggagttccggataaggaaagacaaccggagttctacgtggaaacgataaggactactcggattgtatccatattggtttccctaattctacttggacaaagggactcctatgagtataaatacaaggccccctaggaggagaggggggacagacaatcaatacccaacacaatcgacatagaagccacaacatacaagccaacatactccaagacaagacgccggattttgacttcagggataggcatggctattcccctacggtgtctccggataccgtcaggagagacgaaagcgctatctctgatctcgccggacacggattcgaggagcaaggctaccctgttgtcgactacgagtcagaccttcagaccgccatgtcgacaacagttagataggctaccccacatattgtactggtgtgattatggtgaataaaaagcaacatcggcttagggctacctgaccgctcagggacccaaacctgtataaaaatcttcgtctccatctcttttacctcagtctcacatgacatacaacacatgacatacaattgagtgggacccaggctaatgccttctcttaccatatacattatagcaaacagtataactaatgccgggtcccaccttattacctaagtagacattatacattgagcatgcccttactaataacgatttacaggcgaaatttataatttattttgttattagactatgtttaatatgtgtcccgtatattcgatgttatatgcagaaactttacatccctatgactaaacagggccgcccatgattgtaaagcatcgtaattcgtaaatgaagtgaattggatcgagtgacccaggtgggccccacgcggcagcgacccaggctccagtctctactccacgtcgacggctcgttgacccccaccggctcgtgcgttggcggttttgtcggtttccccctctctctccctctccctctccccctcgccgcgctcgcctcgcgtacgtacgtacgtcacgtcacgtagccgcctgcctcgcctcgccccgcgccgcgtcgccaactcccccacatgccgccgcgccgccgcgctcccgagcaccacccacccgccacgcccgcgcccacgcgccaccagctacgaggcggaggcgtccccagtgtagcaccaccactatggcggcgcggcggaggcacgtggcggcgggggcgggggcggcggcgccggctgcgggggagtgggcggcggtgacagccggtggcggggctgcgtgggcgttgtcgccggtggaggaggtcgggacgaagcaggagctgatgcggcggacggggctgccgccgcgggacctccgcgcgctcgacccggcgctgtcgtcggcggcgtcggcgtcgtcgtgccgcccgtccgccatcacggggcgggaccgcgccgtcgtcgtcaacctggaccgcgcccgtgccgtcatcaccgcgtccgaggtgctcgtcccgtccccgcgcgaccccgccgtcgcgccgctcgtccgggagctccgcgcccgcctcgccctcgccgcctccccaacccccgcgccgtcgccgtcgccgccgcaggtgacacatgcatgccccccaccctaccttccttcttgcattgcatcgtacgtcttcttcttaagcaaaagctctgatctctcactccttttcttttcttttttgaaagcatggcatggcggtggggatggacgggagcatctcgccatcgcaggcgagccgcggcggcgaggaggccgccggcaacggcaaggatggagaagctctgggaggaggtgacaaggctctgccgttcgagttcagggcgctcgaggtgtgcctcgagttcgcctgcaagtctctcgaacatgaggtgtgtgttcttctaccttgtctccatgctttttacctgcagtgctatctccatctccaattctccattcagaattggatggaaatgcaaccaatacctgatctttaagtgcagtgtagctatgcataacatgcattaaaaaaaaagagatttgaagagagatacatccctccaaacatttttcaagaagaaattataagcgtattgaaaattaaacacggaaccttggagttataaccacttactcattgctactgcactatcaattgcatctcaacatgcaatttgcttgggttgaatttaccatgaatagtgagtggctcaccaaactatgcaaaaagttatgcattgttgtatatttgtattaggtttgacattgtaattgtagacatatgttcaattcctatccacattgatttttctaggtatgtcatatgatcttttaacactcaactagacgtccactatcagtatcttgcacatgtatatgtctttccttgctttggtttatatcaccttcagaaggggaaaaaaagaagtggatttgtaccttgctacatttcgacaattctttagcggcatcccttctaatccaaccttttttattatatgaaaatgacttttgttcttctgccctgcaaacatgcttctccgattttcatggttgttgagatgatgctaagtatccatgccgtgccggtaacattcagtcatgtgtctcacccttttttacttcctgatagcactataacaatgtgaagacaaaattcatttctcgagcacattaaaacggtagtgtgtttagcaacttagcattcaggcaattctgcactgaaattgcagttcctaagaaaaatttgcttgatacatgattgcatcagacttgcacattggagaaagaggcatacccagctttagatgaactcacctccaaagtcagcaccctcaatcttgagcgtgtgaggcaaatcaagagccgactcgtcgcaatatctggcaaagttcaaaaggtcagcttcagtatatataccacaagcatatgtgaaactgaaattacttcctccgtttcacaatgtaagactttctagcattgctaatattcattaagatgttaataaatatagacatattaaattcattaacatctatatatatgtgggtaatgctagaaagtcttacattgtgaaacggagggagtaacatttatgtataccatggatcagatagtccattaggagtaattctgaagtgtttaagtaacattgccatgtgtatctcgtctgacaggtcagggatgaactggaacacttgctggatgacgacatggacatggcagcattgcacctaacggagaagctcgcttaccagtcatcaagattcgacatcgataaagaagcaagcgagctcgaagatcacaggtaagaaatttttttcttccataggttgatgacacaagtcgatatgcttcatccaaccgttgtcaacatgctacagatgtgtcgtctgaatgtctgaagctctgaatgcagcagcagggatgaagaaggagtcgagggaggcggcggcggcgacggcgacgacgagacgatcgccggcggcggcagcttcagccccaacaccgacgagctggagatcctgctggagtcctacttcgtgcagatcgatggcaccctcaacagcctctccaccgtgagtagttcctctcgccgatgaacgtcaatcatatctggacgtccacccatttattgtatgtcaactaaattattataatttttttttaaaaaaattaataagataaatcaatatataatatatcattccacgaatatataagctatcaattgtaacaaaagtgacaaataaaactcaaattagcagttaaatttgtttttttttacaacttatagaagtagaatttacttctataatttaaacttatatgtttgtgaagtgatatattatttattaaactatatgttaatttttttataaacatttagtggacatgtaataaacgggtggacgtcccctagagtgattagaatccatctcgatttttttataaccactaaatgacctgcattaaacgggtagacatccgctcgagtcattaaaacagattcccctctctcgccattgctaacgaaggtgaaattaaccatctgaatttatctctctctctctcacggatgaaactgaagctgagggagtacgtggaggacacggaggactacatcaacatgatgctggacgagaagcagaaccagctgctgcagatggggatcctgctgtcgacggggacgctggtgtccagctgcgccatcgccgtcacgggggtcttcggcatcaacgtccacatctccctctacgactcccccgcctcctccgccgccttcccgtgcgccgccgccggcatcgtcgccggcagcctcgcgctctacctcgccgccctcctctgctacaagcgcgccggcatcctccagtgacgttattactagtactacatgtaaaagaaacattgtttttagtattaactgtgaccatgagtgattaagaacgagtaattatgcgtgtgatagtgtgattacggtgttctaggcctctttgtttatatttattattactacctctatcccataatataacccataaaaaatgcatggtcaaacttaacacggtcactaatactaatttttgtcttataatttctcatatattataataaggattatagtaataaaattataaccatatgaaagtaaatttaaatatcaattcaatgatataatttttagcaagtaaaattcaattcatactatacacaaaatattttgaagataaaatctcaaaatgtgaacacctaggatggagggagtagttttttttttaagtttactacttcctccgtcccaaaatataagaactttcggttagatgagacacatcctagtatgacgaatctggacgaacgcatgtccagattcatcgtgctgtactatgatgtgtctcatccaaccaaaacttcttatattttgggataaagggaatatgatttataagccgacgaatttaaaaccatgtggaatgacatctctatatttgactatcttacgctattttttttcaaactactactccctccgtaccaaaagaaaacttaacttatggagtttgaattttgtcccacaaaaaaccaacttctaccatactacctacccttagcaatgctttattacttcgataccatttacctattttaatgatgtggggtattttgatcatcttcactctttactactgttgcattgggatgttagggttggattttacatgggatagagaaagtaacttttagaaagtaatataaaaatgatttatggctttaaataagaaaatgctgtttatctgtttagatgacttttcggttcataataaaccgatttataagtctaagtctatacaaagagtattcagggttggtttggtttatggcttaaataggcattaccaaattttgtcagtgccaaattttgacaagttttggcatgattaattttggtaaggcaaagttgtgtttggattgaagccaaaatatgctaagtttactattgaaatggcctattttcttaggcatgtcaaatttcgggttcaaaccaaatagacactaacactattgaaattgtcaaatattgataagtctaatttagacctcaaaccaaaccaacccttggtgtacaggagcttaatgatgaacactctcactgacaaccctggcccagacgtgtgtgccccaactgtcagtgtgtcaccaacaacccagcatctacggccccacgtgtacattccatttttctcctgagcgcagcgatgacgacgaccaggagctgaggagcagcaaaaaagaaaaaaaaatcgattagttcacgcaaaacccaaaaacgaaaaaaaaaaaatcttcattgagtgttaactacggaaaatatctgacgaattcgtcgcgaaatttcgtcctctttttttcgtcagaaacgaactaagcagcggggatctcgggatagcgaatccccagattcggactcgatctcgctcccctccgatggtccgtctcccggctgccggcggcgacggcgacggcggcggcgacggcggcggcgtcctcaacctgacctaggtacgaacaagtctcgagctctctctctctcttttttcccccttacgcatccagtatagtttgcgtgatctgatcgtggcgcatctgttcttggcgatggatggatggattgggagcagaaggaagaaggtgtgaatctctgctttctcgcgcgatccggcggcggcgggatgcagtaccaccagggcggcagccgcatgccgccgttcgcgcgcggcggcgcgtacagccgcggctacaagcagctttacgcgccgccgcagcagcagccgccgccgcaggacaagcacgaggtgctcatggaggcgggccgcctggcggcggagtacctggtggcgaagggcgtgctgccgccggcctccctgcagcgccgcggcgtcggcggcgggggatgggtccagctcccgcctccgcccccgccacctccgccgccgcagggaaccctggcgttctatggtgcccagaatggccggcggcggttggatgatgatgatgatggtaatcctaacccccgctcgcggcggaaccgcggtggtgagaacaataatgatgacagtagtagtagctacaatggtagagggaagaggaaattcggtgcttacagtaggcattcggattgggggagggacaaggggaggagtagggggaattcggatagccggagttacgatgatgaggatgatgacgggcctcctggttataggagagagcggcgaggtggtgggagatttgatgatgctgggagtagcatgtcgggggtggcagcgtctaagacggaggccatgggggagtcggagctggaggatactgggtcgaaggtgggctctagcagtaatttcaggaaggatgtcgatccgccacaagaagtggagggcgttgataagttgaataagattaatgaggagagtaatccatcaaattcagaggtggtggagcaaatgactaatggtgagagcactagtaataatgcttcttgtattgttattgatgaggaacagacgaaggcaaaatatttgcctgtgccctcagatgacaaggtttcagatgagaagcctgacgatagtagtgttttgaatgagaagattgaagatgacgagactttagctgagaaagctgaagatgataagacttctgatgagagggtaccaggtgtgaagaataacttgcgtgatgattgtaataatttgctgagctattgcagttatccaaatgtaccgacaaggcggcgatcaatagttgcacacaggaatgcagcaccagcccatagggaagttgctgttgccgaacagattgatctggtttcctctgaagatgaaacccatatggccactgatgttacagggcatggcagctccttgactaatacccaggaaggcaacaaagatggccttgcctgcttggaacataccgatacaagcactacttgcaatcagatggtggagccagtaagattccagacagaggaaacacagattggaactgatgatttgagaggacagaaaaacattgagcaacattatgcagttcacgaatctagggaggagaatatgttacctcctaaagtgggtgttcagcagcaagttgaggaaggaatgcagatttacaatgttgatacaccgccacaagatgaagacttgattgcttcagctgataaagagaaagtagctggtgtggcattattacctagtatcaaagctgaagctgttgttgcgaaggaagaggacaagtttggtcagtcaagttcatttaaaatatgtgatctaaacctagttggtagtccagaggttgctgaattacgaaatgatcctggtttgggtcaattctcaactgctggatgttcaatggagccacaaaatcagcaacaagagtttagaaatacgggtaacagtgcagatgataccaacatgcatgcccaaattccattgcacaataaggtggttcaagttattgatcttgaagatgactcgccaattgaagctggtgcatgtgatacttcaaaagcaaagtgagttccttccacctccctcttatttgctatgtcattctgcttttatatgagtataattttttcttttggtattacggtttgatgatacagtacctagccttaaaggcttgtcccagactagttactattaggcaaccagttttgtgtagccagcgatgaatggtagctggcccagacgctcagcaatacaaaaatacaggggtgactgccttcttccagtcgctgcacaaggagaatgagtctaggcctttgctgtcttcttattgttgttgcttttcatgttctgtaggagtggcagctgatcttgctgcctaatcagcagacttgctgtcaatctttgtactcttcgctctgatcttaataaaatttctctgtcatctttatggctagcctgactaaaacagtatttgtacataatgcaccgacaaccatctaatttccacatccaacctatgcattagtttatttctgtttattttctcttcatttatttatccattgtggctgctaactacatacctttaattgtgtatgctagagaggaaaacatggcaaaccctgctgtgaccacagatgttcttcctggtatccaagatggatataattttgcgatttcagattatcttggtgctgatataccatgctaccaaccaatgcaaacagatcttcccaatgggatgagcctaaatgattcagaggtgaggttttctgatattgttatacatcatgtggaggcttaataataggaaaatagattcaccactatccagtaccagtagtgacatttgaggatttgtgaccatatgtttgcttgacatgcgtagacacatatagtcaccataagttcataatactgttttttttccatgagtaagagattccttacactttttttcctcctgttgcagggcattactgtcatggatgattcaatatatggttctcttagcgatatcggtaattgatattacttaaccactttttcagtttttctacaacaatgtgcgttatgtctttgtcgtgttgattttcgatgttgtatttcttcacttgctcgttgcgaaaggatgttgatttcaaaggctatgaaagacatgcctaagctttaattcgtaaacctataaactgacaaatccttgtagcattattcactttagacaattttggtgtgacaaaccgatttgcaaaattcctgatatttatggtgcctatggtaattttcattgggaaaagcatcagtaccagaagtggttcataatcttaatacctattgagcatatgaaaattgcagccaatccatgacagctcatttctctcaacactgacttgcagttcttttaattcttatggttacaggttttatggaggtttgggaccagcaacctcaggactacgagaagttcttctgaccaggcgccaaattgctgttgtcagtgctgtgacagttctgtaaccctgtaactgcaataatcagaaaaacacacacacacaacacacatacaggcacccatggtggccatatgatccaggccaatgtcctgtctaactacacatcatatatagctggagcctttgatccttccaggtcaatatcaacagagcattcatcctaaaaaggattgttcttgtgtaaacagttcgacaagttcatgtaccgtgaatacaatttactctacaactctagatataaatacattgtttcacctcggaaaggaaaataagaatacattgtttgattatctgctccctgttgtgatattgtctgactgctctacgctgaatttatccataaggccataagagatgtgcaatgcaacatgatgttagggcccacggtgcggccgagcaacacaagcaaatgccgctagctgttcatgtccaaatctccactcattttcgtgggagaaataaaatcacattgattgcacaggggaaaagaaattcatttaaaaatagtagcttgaaatcgctatgaaaatgtacacataaagacacccatttggaacacaaaaccttcgcatggtatggacagtaaaaaaaatgagctcccaaagaatggtgctctagctataacttgctactgatttcctgattttgtcggttggatttccaggattccagtttccagcagattcagacagcggcatcttctttgctatcctccacaggcttctctgtagatggggagctcgtctcctgggtgccagagccggttgagaccttcacagtggcaggccttagcagcctctcccttagaaggaacccgcgtttgacttcatgcgagacaatcccagccttgaactgatgagattcctcgcgtgcgatagcctcatgaatcttaacataagaaattagaaggtatgagctcctgctatggcgcatgtaacacagaaataacagcacaatgcctttgtatttacatgtgcaaatattgtaactatgtaagtgcgcgaatcaaactttttatatgagcaaaagatgtactggcatatacccaaacttgtgaatcagccgtttagaccacctgtacataaaaaaggtgatataaaggataaattatactacttaccgaaggatcaaatggcttgccaactgtttccacaactcctacacctaagcttctcaatgtctctactaactgcttgtatatgccttgatagcttgtgctaatcgtctgctctttatcagtctccggggtgatctcttgattcaccttctcaaaactatcaaccagagtcaatagactctgaacaacatccacctgtatatttgaggtaaacctagcacgctccttttcagtctgcttccggaaattctccagatcagcatttatacggaggaacttgtccttccctgaagtaatttcggttgcaatactttcatactgagcagctgagttactcctttctttctcaatggcaatgatagcactctcaattccaccaagagcctcatcatttccatctagaaaagctttcttgtatagacgaagtaggtccttcataggggggaaatcttccccattaacaacctgcataaagctattcagtttagtgaaacttgatgaaccacactctttttttctttgagaatattatgagtcacgctcgatgaaatacatagctataagttcaaacaaaacacccaaacaatcatcaattaccctgttcctcctctcaattcactttgctcatagtagtatgagcattcctttagttatttcattgttcaagttgcaacagtatggatttatagtcatgcttaacaactaaaatccgtgctctacccatagttcaaaaactcaatttagccaagaaatagcaacattagccatgtcgtccaattactcatgtgatgatttagaaagcaacgcagattccaaaattagctcttgttttcccgagtttagccaaccaacaaaaactaacaccgcatggtttttaggttcagaccatgctgcattggcttacaaaaaaaaagaagtatttagcactcaccaaaactcaaaaatgtttacctttccccactaaaatccagcattactcactcgaatgctctaattcaagcttcttactaacaaacaaaatgagctatatcactgcgaacatacagtagaaaaccaggaattaagagagcacaatctacatatccttttttttttaaaatccaccacgaaaacggggctccctatcccctcatcgacgaagagaggcgaaaagaaaaaaaaaattctccacgaactaaatcatcactcctcgaagccgataacagcgagaggatgagaagcggtcaaaagggacggcggagcggagatctcaccttggggtcagcggcggcggcacggagcggcggcggcgcggcatgggtgcgccggagggagagcagcgagggggtcgccggcctcctgctgctgctgctggggctcaggcgagcaggggttgaggcgggtggggctagggttcgggggcggtggaggtaggtggggcttgcggcggcggcggcggcggcggagaaggtcgccgccatattctatcgttttgctactacttctcaactgttcggaaaatactgtactacagggaaaaagggaaaaactgaaaggcaaatgaggaaattacacggtacacaccaggggttggcacttgggcccttggcactgcttgtgtgtaattctacagtggtttaaaattttatatttcatttaaaatagaaataaaatgattaatttaaaatattattcatatgattacagatccagctcgatggatttgtggagttaggaatacacagcttcaagaaatattggatctggaggctggagctatgtcaaacatccacgaagttaaaatttaaatctgaaaaaattaatttggacttgattttaggatttttcatcctagtcaaaattaggcttacccataaattatctttgacccttttcacttatttttttatcgtttattagttgtagcttaacctactagaggcttagaacgtagaagtttgtgaaaattttagaggattctttaaagtttttttttagaatttctttacttcaaagaaaacttgaagtgatattaattatgttaagaaaaatctaacaacctagcggtgtattcttcaaagagaaactttatttggatgcacacaatctacgcgtaacatatatgtgcacatatgtatacccacacatttgaaataagataggtttatgctcataaccatcaagatatgtttacgctcataaccacctaatatatatgctctaaatgacccaacaagctatagagatctacatcaatacaatattatgtgtgtgcaactggtagcagctttgtagccaaacaaaacacaataattcgtgagttcttgtcggctatgaagcatatatagttctggggctagagaaaattataacacgactatttgtacaaactagctactacaatgattattaattatatgaatttggactagagctaactgttcaatttattattatacttttgatatggtcctattgatgtaacatcaccaattcaatattactgaggaagttccctcatacggatagaaaatatatagtttcttgattgtttctatgctaataaaaacaatgtgatctagctcaagcctaaattgggcctaaatatttgcaatttgagcaaaaaatttatttggttccttgctaaaaataaacggtaccaaattttagtataaccaaatttcggtaagccaaaaatatagagataattggagtaagccttgtcaaatctcttcttgttttaagagaagtttttagagttaccaaaattcgataggatactagtggtagacggatagctgaccgttgccattctccaaaattgcaaagccaaaatttgagccataaaccaaagagagcttttcttagacccattttttgcactctttaaagatccagggatataatatggtgtgcatctagcaaaatataccccataattcataggatgtggttgcgaattagccgatgaaaaagaagacaaaaagaaaaaaaaataaaacgaagtatccagaggccacgagtccaggcgcttctcccccccgaagctcgcgcgcacgcacgcacgctgggcgcttcttcttcccccgcgcatcgtccgaaatcctccggattttctgaggaatccccccgaatttccttgcgtcccatcatggcctcctcaggtaattcctccgtgccaattcgtggtattcatcaaaggggggggggggatttctttctcttttttttttcaagcaatggatggtgaatcgagggctaggcgaaattactaattaccctcgccattttcgtgcgtatcctgcccttagcccaccgccaccgcctccggcgatccccatccatcccgcgatccgatacccgcgcactttttttttctcgaatttgcgttaaccctagcttcagttctagaaatttgtttgccttttaaccttgatactaataacaatttgatggttcccaaaaagttcccatgttagaaccgccactgtctattgcaccgtaaaagtatgcagcaaccgaggcgcttgatataatctattgagcatctaatgaagcagggctagatagaaaaaaaaagagaagttcagattgtcacagctgcaactgcaattgcttctagagttttgcatgagaaaatattatcgcagtcttaggacttcttatttctgttgtgaaatcctgggtatgttatcagttctcactttaacactcgcttgtatggtatgattatgcatttttatgcagatgtctccgttgatgttcggccagagtttaactcttttgatcatttgagaagcatacgatatattgcaacagatagaccatggctgagtaagtacagcctgaagctagccttttcttattttgattgatatggccttggtcattagcacaattgaggattaatgaactatcttccttttggtgtctggtttcgctaacagcgttatatggaataagagttcaacctgtaacaccattcagcagtttgagcagtagacctgatctggcactcattcatcaatgcctacctgatgagctgctttttgaggtaatatgtggaccgatgggcatttgtcttcatatttgtatcatataaaatgtattatggtaaaatggaattcctcatctctgtagtataatttgcttccttctaattgataaaatatcactatgtaatatcctcaattgacatataatctttttctgctcaagtatataagtagctttgtggctctattctgtagtacctccttgtatcaaattatcattacatcagcatgaaagaagtgggaatacttagctcagtaacaaattacatgtctctttgctgaactacacagatctttgcaaggatgagtccatattctttagggagggctgcttgtgtgtgtcgcaagtggaaatatactgtacgcaatccgactttgtggcggaatgcttgcctcaaaacttggcaggttagtttacacatatctattttggttggtttcgtatgcgatgttttgctcaaatatttgaattttacatgtgaagaggactggaatggaggctaactaccagatggtgcagtcgctatatgattcttcttggaggaaaatgtggatgctgagaccaagaatccaatttgacggtataagttcaagaagaattttatcataacatatgttcaaacattaatttgatgaatgttaaattcatatgcgccaactaggctaatatcatagcacacatcacattctttagatttgtgtggaaagaaattgtctagattttaatcaaactgataaaatgtctcatcatgagctgtttttctctcacttggctgtttaaaattttaatcaggtatgtactgtacaatactggtaccttggtcaaatattgtacaaaagtatgtaagcaaagtaatgtgtcattcattctcaaattttcatgtgtcactagcctagagctcgtgcattgcaacagaaaacaaattgagtttctagcttattaagtcaattaataagcacttatttagtctaagtaatactatgaattttcttttaaacaaataggtgattttgaaatttgggggagccaatagtgaaataggggatgacttgttgaaaggtggtgtaataatatagattgtgcggcccagatgttagtggtaggggtggtgtgggaatggacaccaccactactaacattttaagtagtatagataccggcatacatgtaaaacaacaaaatactactactgtacacatgcatcatactcttgtgaattggctgtgcaaagacggtggtgggaggaggtgcatagcagcgtggaggcggacaaatcacagcatgtgctcaggcttgagcattgtgcactgagcccaggaagaatcacaggttcagagcagaagagctgcattgacatgttgatacactgtgcaccagtaaaaaaaatctaggccagaggaattttttaaaatcattgctgtctcgcatagcttcatgaggtgtagctttttcataacaccaagatctggttccgatctgtctcatctaactgtttgtgccaccatgtttacttgtggccagaggctgctcaactcacttgtcaattccaaaaatgcatgaacaacaagaaaacattttgttgcacagatcttggagcacaaccaatggctgatcggagttcgtatgtacctattttgctgcctaaaaaattccaattattactggtccaaatgaaatggacatcaattattatggtgacaagtgaatgatcagttgattgtttttgggaatgtgtatgccagtttatctgttcaatacactgaatttcacgcataattctatgtttattatcactatggtacacattgatttcgtgcattcactttgggttgcatgctgagacaccatgacatttttaaagtacagtaagaatagtatgacccgcagtgaatgcgcttttgactcattaatgaatgtatgtcgaggcatatcaggctgttacattttgactgaatttcagctgcagactaatcctgttgcatactgcgataatagtgtatttggatcagtagtttgctactgaagactagctgaaaggcattgcattagttttggaacttttctgttgttattgctgtaattgctagagtaccctgtattgtggctatactttctttggttctttgagcgaaatttgatacttgttgcttcttcaggtctttatgttagtaggaacacatatatccatacggggactgcggagtggcagttcacaaaaactgtcaatgtggtatgatattatggtggtattattgttcatttgattatacttacctgtacaaataccggtctttaggatttggttactgcatatttctattgttggtgtctgaatagctttagtgtttagtattaatttatgcgcttattgtttccaagttaatctgttaatggcatggtaatgatttttgtttgccccccaggtttgctactatcgttacttgagattttttccaagtggaaaattcctctacaaggttcatatttgaattccttttgttttctacagtatatttctcgttagtgtaacatcggttgatattttaatttcctgtgaagagcagatttccccacagaagattaaggatgttgtcaagtgcatgcatttccgggcatccaaaggtgattgtgtatttaaaggcgactacgtattgtcagaggatggccaggtgaaacttatcgtacttgtttattcgtccttgggcaggatacatcaaattactgccaacattaatcattaattagttttttttctggcacacagatagaactggcactcctgtatccagggcgtcgctacacactagttaggatgcgcctcaggtattttggcttgaacttctgtctatgttttgaactcttgatgatttctcagtgcttctaatttgaaatttgtgcggacattttgtaggcttagaggcacaactctgggcgcaaacaacaggttggatgtattgaagatcttaaccaccggggtgaatgcaaccgaactgagaaactggaaaggcagcgtgcttgaacttgtggagacctgggatgaggatgagacgcatgatccagaagttcctgctgttacccacagcaggggtttgaccccatttgtgtttgttccatttgaggaggtatgacctatgatctatactactgttaggtgtaatgctatgttttcatttgcgccccgcgcttttcttttgttttctatattggaaaattatttcatacctagatagcctagtagaaagaactgactaattaatggctttgactaaaatgttcaggctgatacttcagtgatgaatctgccagtggagaagatggactactttgtccctgggtgatcttgcgcacaaataatagtttttccaagatatatgatgaagacgcaatttcgctgatgttagggcaataatgtgcatacaccatcagacgtcagtctttgttcaatttcatgctcatgttgcttgtatactgttgtatgaataatgctatgttttgttggtgcttgaaagcaaacattttgttggaccatcctcccgcagcaataatggtccaatacttactagtacatggtgttgccttgtaaatagatcatggtgcaactgatgaaacaatacatttgtggttcagtacatttctcaccaaacactggccttgtgatatgtagtacagatgagaaccacatgtaatataatgtaatgtaatgactgctctttctacattgccaggactgcagattaggagaatttggtcctcggatacattctgaaatatacttgtactgaagatgaacattcccagcggtatcatccgcgttgtatatggcttgaaaggggcattatgacattatgagaagatacacttccatgagctgtatatatagctgattatttagggtggctaatttgtagcagagttgcatgaatatttcttctacatgctgctgggtttgggttctttctccgtgatcacgagctcgttccactccgggttgcgagggaggtaagtctcctgcaggttttgaaacgaagacgtcagagcaatgacagtttttgcctcaggccttgagttgccaacttatattgagaatagcatttgcttttcagcagatgtagtttgttactgtcttggtcctcttggacatgaactaaaatttgatgtcagaaatattactcccttcttccctaaatgtttgacgcc

SEQ ID NO: 9738 - DNA, 10466 bp, Oryza sativa
tttggatttcccatattcatgctgatcaccacacaggtgtagctagagttcttgctttgaggtctaaattgttaaaaggggtacctcacaagcccttacttgttattggaccaagaccacttgaaagatttctaaatgcatattcaacactcgaagatcttgatatgcagttcctagactgcaggcagactttaaagcctagtatagaggcttttctcagtgacaatgctactgaatctgccacatctcaacttggaagcactatatttgctcctggaagtaaaatggagaactacagccggaagcctgcaagtccaagagatactacagctctaactaatttgaaagatgtcctacatgaatcaggtttggaagttctttacagtgtcccagttctgcactgtccacaggcgtttggagttgttctgagagccaaggagaaggtgagcagtgctggaaaagctattccaggatggaaggttgtttattcaggtgacacgaggccctgcccagctcttgtagatgcgtccagagatgccactgtactaatacatgaggtaagatgaacataaatcttttggacaactaattccattattaccaacttgatatccactgccatttccatggtggctatgattctatattcctcccttttgagtgcttgccatcactgcttatgctccaaggtggtttccaaaagttcaatatattatttgagttatcagttctgttttttctgtctgtcctagtgtcctgtagtaaaatatttcactctccaattgatgtggacgacaactggccaagtgcatcaccaactaaccttgcatgtttttgtatactgttagctgcagaatgttctcttctaattattgatgatattaatcactagttaatggcaataatggtattgcgtgtctaaactgtgcaatactcgtttctccaggcaacatttgaggacagtatgaaggatgaggcgatcgctaggaaccatagtacaacaaaggaggccatagcagtaggcacatcagccggagcataccgtataatcttgacccactttagccaaagataccctaaaatcccagtttttgatgaggttgatatgcaaaagacttgcattgcgttcgacctgatgagtgtgaatctggcggacttgccagtactgccaaaggttcttcctcacctgaagctcttgttcaaagatgagatggtggttgacgaatctgatgagatccaggaggctgttatgtagtactgatataagatagaatagtgtacaacaatttaaatagaatgatttttgacctgagaatccaattgtagacagcgccatccatgcgatatgttactagtgaggccaaccaccctgcattcagatactagaatagctgtactgtcaatttttggcgttgtcttgtgcaataagcattgtcggcaatttgcaagtctcgtgtgcgttgaaaagcaagcgtgcgacctgcccttctaatttagtattttgatggacagttaaggctttgccgttacagatgatgcgttcaattacgtgtcatgttaatgttagtacttggggtttcagtgtttcacagagtgagtcccatttcagcctcacatatgttccacgtttctcactcatcaaggcaccatccaaaccccaattttaaattgaagatacactttcagttttaaattcttgaatttgtttgtttagttaaaaatactggactgaagaagtctttgattttaaaaggtccttaaatttcaactttaaaatcccagtggctttgtcccaggctttaactgggtgtgcgatgaatttccatttgcaggaaaccgacaatcttaggaaatgggatcctccacattagtttacccatttgtgcaccatttgctctgcggtgaccatctcgatcgctactgcaaaaatagtataacaacaaaatgtcactgtttgtggcatcaatctactatgttactcacaactataatgaaccgcagagaggatccatatcaagtggtatgtaagagatttaaaactagtagaggagagtattgcaaaagtactcgcgacacttgtctctataagcacgcctatatagattgagacaatataaattgaggggctgttgatgcccatacagattggtgaaattattgtcgatatctcgttgttgatgcacatgacatctaaactaaaaagaacaattagcagtaagtacaaagcattacccgtaaatacaaacattggtattaagtcaaatactctaattaaccataaatataagcactaacgttatgtcgagacttttttttaatgactcgcactagatagtgtgaagttcataatgatagagtagaaaaaaattacaagattataatcatgtaatgtcgtaacaaggaaaacgaaaaaagaataccaccatccacgtaccgataacatcaacacatagacataagagaaaagctagcaccgaaccggccatcgctaatcgtgaccagccgccgctaggccaataaaggaactacaatcaagatcgcccaaaacccaaccattacaaccgacatgaaactttgttctatccacatctttgggatcaaaaaagttacgtcggagacttgaacccatgatagcaggttctaccgaaatgatttacaattttggccgtgtttagatccaaagtttttcttcaaacttctaacttttccatcacatcaaaacttacatgcacaaactttcggcttttccgtcacatcgttccaatttcaaccagacttttatttttgacgtgaactaaacataatctttgaaaagtttgattttgaacacggtggcagcaaagtgacacgaaactttccagtgcgactagtagcagaatctcgggttttgccgcattacccctctgagcctcagcctcactcttggcctctcccctcccctcccgtcgtcacgaaggaaagcgaaacggttatcgcgttaaccaccccgcccttcccttccccgacctgaccccgacccgccactagaagcttccatccaccccgccgcacgtgccgctcacccgcgccgcccacctcccctcccctcccctcctctcctagacccggtccaccgccgcccctctcagatccgccgttgccgcggcggcctcggcagctcggtctccccccgctagggtttcgccgtctccgatcggaggggcgcagcgatggatcagagcaggcgggcggtggagtcgtactggaggtcgcggatggtggacggcgtcacggcggacgacgacaaggtggcccccgtctacaagctcgaggagatctgcgagctcctccgcgcctccgacgccagcgtcgtcaaggaggtcgctgacttcgtcctcaagcgactcgacaacaagagccccgtcgtcaagcagaaggttccccttctcctcctctctctctccccttgtgtgatctcgggtgcgagggtattaggtgggtggcggcgaggtggatcgatcgatcgatcgattgagtacttatggattggtgttcttgtgttctcattgatgatgatgatgattagttctgtggccacggttcttgtcgaactctggatggtcgaaggatggcgcacgtatccggggagtgatttgagtgggtgactgatgatttgtgtgattgttttgagttcatgcctgcctcctggattgccgatcagttgaggggagaagaggctgtcgaagatatagttctgttttggccttctggatgtgggtttaataagggaaacggcgaaagtagggaattgcagttgttgaatgaaatagttattggttgtgcgccacagcccctagcataaaagagcagtgccttggtgaaggtgtaagggagaaactggctatatatttttgttcttcactactaggtggcaacaatatcttgctcacagctcacctggagttgatggcctgttaccgtggattcaaattagctagaatggattcatgtgtcatagtccctatcaattgaaatttaaaactagcctactgcttcttgaagagctgagaatattctccacatccaactatctggcatgtaactgttccatatcgactgagaccttagtggcttgtatggttgtttttggtgaatgctgttttatagagcagaagccttatgtggctaatgaactacaacaattgttatagctatggaccaatggaaggtgtttttttgtaaactatggtgtctacttttgatttggatttaagggatgttttttttttttgggggggggggggtttaatgctgaaccaaacacatacatttgaggttgtttagtgaacttgaatgtgaattcagatttcaacttgtgacaactaattttaattttataaatgaattgctttacattcatggcatgttgcgttctgactcctgatctcgtaatggtaaagctcataccagccttctgagtagactctctgcgcaaaggaaatgctgcttatgggcataatatttgctttgctaagcatttgtactgaatgttacacgtcagtcctgagcagtggcacattgcaccttttgcaaacatggtgacccccacatatatcatagaatgtaccctaatgtttttgatggaatttttaggctgtcctaacttatgtctaacatttaagtacagtggtgtttaattattgaggagactagcttctgttcttcaattctgtactaaccttttcaattgctcttttccaggctttgcggttgattaaatatgctgttgggaagtctggtactgatttcaagcgggaaatgcaacggcactcagcagctatgcgccagcttgttcactacaagggacaccctgaccccttgaaaggggattctcttaataaggctgtccgtgaaactgcaaatgatgccattgctgctattttctccacagaggaacctaaacctgctgttgcaacagaaggtcttggcaagcgcatacagggttttggaaatactaattttgagccatcaagagatgacaaaaaatctttccttagtgagctaagtgaagtagtgggcattggcagtgcttccattaaacagggtttgagcaactttgctgcttctcattcatcaatgataacaaatgataatggtggtccgtacaagagcccaaaccttcgtaggtctctgaccacagaaatggataaatatggcaggtatgatccaagtgaaattcaaggcgagagccgttcttcatctggtgcttcaaagaatgttagttctggttcatggggtcctagtccatccagttctgcaccaactgatgatactggttcaagtcaaacaggggttaagactcgtgaagagagacttttagatacaattgcaacttcaagtggtgtgcggttgcaaccaactcgagatgctctgcaaatatttctaacagaagctgccaaattggacgcagttgctttgagccgtgcccttgagaacaaattgaattctcctttatggcaggtgactttacgatgttctttgttcatctacttcaaccttacaagttacaatagttttacggctatgggatggggtacctttagtctatattatggtttacactgcttctggcaagtgactagtgtatattgatgcacaaatcgatattttttcttattccgcagtcaaatggaagtactttggatatctaatatatagatactttaaacatatgtttgttcaaattttgacaagtgcttattgagatttcaaacttcaaaagtaaaaacactatttatgagttgacttgtgaccattcacatatacttttttatggtaaaagttcagagctgtatatataatagtgagtggtatgtaaacatattgatgcttaacttagcttccaattttcaggacagcatagtttatttgaataataaattaataacatgtgaaaaatacagttccggcatgaactctttgcatgttaaaagtgcttagttaagggcttttacacccgcctccctactttgcggtttaggacatgtcttagcgtatttaaagatttacccagtaggcagcatactggttctgaaaaaaatattaggcagtgggcagcatatccttttaacatggtcaaaggaatcaaaatgttttgccttgttatacattccaattatcaatggaagtccacctagcatctgaattttaaaaccaggcatctaacttctcaatacttccataaaaccccctgaagtggttttgcatggtggtttcacctataaccccatgaactttcattggaataaggtttatttctactaggggttagcaatacggagtatgttcagaattagtgcattcattatctatgatgttctctgaccttttcttatatttttgatacaatattatctcacattatttatatacatgattagatcatatttataataccattttatcttgaccaagcacttccaccattgttttcactttatatattcataaatattcaatgcatttgttctacttcaggttcgcatgaaggcaatttgtgtattggaagcaattgtaaggaaacaggatactgatccttattcaatcattacttcatatttctgtgagaacagtgcatctgttgttagatgctgtgagcttccgcacgtttctctcagagaaaaggcttcgaaggtcagtaaagttgcaagccattaataaataaatttgtataatgcaccatttattttctgcaaattgctatgtagaatacatgctttgcatctctttgattctatctctctctaggctatagctatttccacctccaattattactatataataaaccgtgccattttcttaggtcttaaatctgctggttggggaacaacctactggaagcaataatttttcagaaacaaagacaacagtacctgctgcacagatgcctgatttgattgatacaggggatcaagatgacccaggagctcaaaattcagctcaggaaggtagcgagaggataatggggaatagcatgtttacttcttcggttgatgatttgctgggtggtgaacctattgctgatataagtaccaccaccagtaatggtaatggaggtgatccgtttgcagacgtttcattccatgagacagcagatactaaggatactaacgacctattctcggggatgacggtagaagaaaaggcaacagcagccttgcatgatagctcatcaataaacaaaaatgaattgtcagatatatttggcagcagccctgagccattcttccaagaaagagtagaggataaaggaaccgtgaatgatttgatggctggtttgaaccttaatggaactgcccaagctcagcctgggattaaaacagaatctaacaatactgtcaatgtttcacagctctttgacatgaacagtcagacaacaaatgtggctaattctgcagcaatgactggtattcttggccaaagcttttatcagcaacagcaggttcccttgcagtacaacttgccatcacagatgctgttaaatccagcatttgctgggcagcaattaaactatggtgctatgagtgttcttcttgctcagcagcagcagctgctgcaaaatctaggaaatttcaatgctgggttgggacattcgtctttgaatgcaatgaacagcggaaatgcatctgtgcttcctgatatcttcaattcaagtaaccaacctcaacatgttgctgtgatgagcaactcaaagaaggatgaaactaaagcttttgattttgtttcggtatgcgctttcatcatgtccctaatttattcttatttcatttcatatatagacgtgccaatattaccaactgtcataatgcgtgggcagtatgaatctatggctctatgctagttgcataagatgttacttcagtttttgacatctgaagcaccatcctctggtgttaacagtcctagttttctttcaggatcatcttgcagcagctcgtggttcaaaaaagtaacccgagagcgatgggtatgttcagaatgtagcaacaatgcatttgtttggcttcacgcaaacttcactcgtactccatcgattagctggatcaatctcaggacaggttttgcatgttgtgctgcaacagatgacccaagaaagaaagaaaagaattcacgacgggggattgtgttgtatcatgtatctagacaaatgtcgatttttatgttgaaataagctgtacttatcttctcagtttcttttgatgccttgcctttttttttttcttttaaagagtcggacattgtagattgttctcgggcgggattttgtttttgctgctgtacaacagcatatttggttcttttgacgggaattgtaaagcttgctacgttaataacaggtgccatacgggaataatgatgcctcttgaaccatactgctcacatgttgagtacattatatctacgaactatctgcattgtgcagattatgaattactccctctgtttcgaaatgtttgacgccgttgattttttaagcacatgtttgaccattcgttttattaaaaaaatttaagtaattattaattcttttcttatcatttgattcattgttaaatatatttttatgtaggcatataattttacatattttacaaaagtttttgaataagacgaacggtcaaacatgtgctaaaaagtcaacggtgtcaaacattttaaaacggagggagtatgtattagcagcactagtatctagtgagataaactttggaagaaaattactgacaaatagacttgtagctgagttccacattgttaaaaccttgtagtaatgatgcttatggttgtaaggtaattgcgatttagaaggaattggaatttattcttgcattgtgattaatatttctcggaagaatgtgttaggtaacttcatcaatctcaagatatgttggtccagtttttcgtagatgttcataaggataaattgtgcgtgtgttcataaaaataagtgtacatgtactatggacgtctgcgtttgtaccgtgtaacatttttttctctcgttttgagaattgagaaaccttttttctcttgttttgagaattgagaacaaaaactttgggttttgctagttaattgtcgacaattttcagctttcaatttgttggctgttcgatctggctctagattcgccaagattcgtattggtggaggaagatccggctctaagatttgccaagattcgtgccggtggaggaagatggaaaaagtttacaagcacaccatggggatcgaacccaaaacccgttcgatttggctctaagattcaccaagattcatgctggcggaggaagatggaaaaaatttgcaagcgtgccatggggatcgaaccgaaccctgcagtatacacacttgttccattaattagttgctccgttgcatttttatgagagttactgatcgaacacgtactataattatataataatagttacatttcaaaagctttgattgtttgtgctggttgcggcagcacctaaaagtttttcatccaaaaaaaactttgttgtatagctactcccaaaacttttccaggctgtttggcctaccgtacggctcctcctactcaccctcaaaccaacgtgtcgaataaacggcaccagtacttctttccccagcggggaccacgccacagaagatcataggatccggggggcccacctgcgaccaggtttccctgacagccctggcccacaccgtggactccggctccaactcgccacctcgcttcccttccctccctccccgagttacacctgaccccgtcgaaccggagtcgccctcgccgaatcccctccgctgacgagtgggccccaccgcgtctctgggcccactggtcagccgccgccgccgcggggtgcgaaccccggatcgcataaaatcactacgcgcacgcggtttttccgcctcggccgcacccgcactccaaccagcgcgagcggcgtcctcctcctccgtcggcgtcggcggcggcggcgacggccatggacttcgggtgagtcggccccctcgtcgccgccggccgaccgaccggacggcggttctcctcttcccggcgttgttttgggacttatttttatttttatttatttattttggaatgtggtgtaggtacgtcggcgtggggcaggggagctcgtcgtcgtcgtcgtcggcgtcgtgccgagcggcggacgtggcggcgtggggatcctccacccagcagcagcagaagcggcagcggtgccaggtcgtgagtcgtgaccaccccggcggcctgttccgtctcgtccccgtaataataaatttcgctttccccgagtttgatcttggcgttgcttggtggcgagtgcggtgtgcggtgtcaaaatctgcgatcgaggtgcatcgcgtttaggggggtttgggcggggtcaggaattgggggttttcgtgttggggggggg

SEQ ID NO: 9739 - DNA, 25191 bp, Oryza sativa
attcctgcagcccgcatggtaggatggctagttgggagatctagataaaagaagaaaatgatgaatgtctgacatgatatgtcggtatcattggtatatatgctgggttattcgtgtttgtttagtgttttgtgtaatacgggactaacatatataattatatggcgtgagcctcctatctattctgttggtatgtgatatgggtggttttatttatgtaataatgacaaaattttatgtcaagtgaggtaggagccccaaaataataaagatgtttattttatataattatagaaacaagaatggacatattaatctatagcaataaaaatagaacctttctttttttgcaaatgcatttattcccaaccttttggagtcatatttaataacagaatgtactactataatcggtaaggatttccataagtaaactgcaaagtgcacacactgtgcaaatcactgcgccgcagccgtaaaaatggccggctgcaagagcttgagccagcagacataattagtgcgagttcaaacgagagattagcttatgattacctctatccatgtgccatgtcattctttttgatttttaggccaggtgcacctagcctctttgcatgaaatttgctatggagacacaacatgtgagttcactctttgctagagttcaaccaactctttgctagagtccaaacttttttttcaaacttccaacttttccatcacatcaaaacttttctacacacataaactttcaacttttccatcacatcgttccaatttcaagcaaactttcaattttagcgtgaactaaacacacccttatatgagcttctttcttccgaactacatatgccattgggctaaaaggtgaaaagtaatgtgcaacaacatatttaattagttttgcattttgtttgactgagactaaaatcagacgcacacacagacacattacatgagcttcctttatgacccttataaaattatcagcgacacctatatatacatgtgtgcatgtaatgtacaacgtctctattattagttattatgtgtgcatcaaattgtacatttctgaaaaaagcgggtatagaaataccaattaagtctaggactcgaattagcctcgtagctaggctaactacatgcacgtacattcatatatacacatagtcatttattagtatatctaacttcgtctagttcaatagttttatttgatctttaaaaatatacaaatacaaggcaacaataaatgttggaccagtaaaactagatataaatgtttcttcagagcagtatgtataaaaatatcgttgtaaccaataaaccatgaagtgtatataaattcactcagccgtgtgtctatatagccgtttgaacttgttagtaaagaagttaatgttcatatctaaacatttaaaaaaatttcatactcattcaaattgggtatatactcaatttgaatcttggagcccatactccatgtagcaccagttaatttatctatatatatatggcttttggttcccacatggaggcgggcgcttgcgagtgcatataagaattttggggccattggcaccaacaaatcatatatacctgggtatgcgcgtgagagagagaaatatacgtatagaggggggccacaatgcaaagggtggtgaaaaagttagcatgcacaaccctaccactacacatctaccagtatgcttaacccatatgcaagaaaagctatatctgattttaattaatctctgaagggattgatcattgattccataatattaaactaatcacacttcgaatttcgtaggccccttttacaggcttgcaaaagcattgcatatgtttaatggagtctcactagagtcactacgaatattccccacccagcaacaagagattagtactacataacaaagcgagaaatcactaatgacaggagaaaaaaaagattattattattattgatatttattaagtatagttaaagtacgaggaggctgcgaatgattgagcccttgttgtagtagagggcagctggcattgcaatatctttttgccgatgaggacgtcgggttctgatagatattgcaaggatttttttttgaggtattatatttgatgatcgtgcattgtatttcttcaattggtataccacttccattattatttaaaatggtacttatatttcttcgaatgctacgtgacaaattaatgcgtccaacttaaattggagacatcgttcaattggtaagccaaggcactaatcccccaggtctttcggagtaattataaatttggtagaatttttctaatctcaagtcgctcaattggaattcgacacgcgcacaattgaaggttaattgtcgttgaagtagcatgctctaaaattgtgtttttttcaatatcatatatggaccctcttcaaagatatttaaaggtgtaaagatcttcctgtaaatgttgggagtgagccatagactacaactttgaatgaaaatgaagaacttttgccaattttccaatcgttattcattattggcactacatattctccctctcaatatttctgatttaaattagaagatcagtttatagactatagacacataaaaaaaatgaaaaaaaacattattcacgcccgataattaactttacctttgattgacatgattctacactcgtagagtccaaactagcatacgtgtgtcgacattgataagttcgtgagggaccaacgttcgctcaataagctatggtggaaacatagtttcattacaacaaaaatgtctttatgtagatatatttttctattgttatagagacacttttcaaatattacaatgttgtagagacatattcaaaaatatgtcataaatgtcttatggtaaattatctctgtaaataaagaggcattttaaaaaatgtctctatgtcttgtggcattttaatagaggcatttttttatatcataacagagtataggcattctctagagacactgaccaaactactataatatacatcataacaccactatgcctcgcaccatgcactctaccaacttgttgggtttgccatctccgatatgctccacggtgaccccttgagacgtgtgggacatgatgcctactttccccccggtaatacggggttgtagtgagagggggtgaggttgatgtgctgaaccattgatattacatgggtgtaactgactgtgcgagcacacgaatgaaatgagtcttgacgatgtgaacaaagaggaatgacagactataatgcgcgcgtttactacatgtatgtgcacactgtccaataccttgcatcacattgagaccgatcatgaccaaaggacttctatgcctctcttttcagtggtcgcgggccaaccaactagtggccacgggaccaccctactggaggaccaccgcgccacgtcgcatggtgccgcatgcctgtcctactcagtggtcgttcaccatgatgtcacctagctgctacacgcataccctgctcaggggtcaccgtgccatcgtctcctggtggtcatgggcccaccctgtataggggttgccgcactctgttgactggtaggagcaggcccaccatgtcaagggctgttgcaccacgtgacgtgctctgtctattttaggactaacccctgtctatttcgaataattataagtgtggatgggaacatgtaattgtaatactgacaacatgcttttattttttaaaaaataagagaagttgtgactctttaacataaacgaggaatgcacacaaccattacatcacttaacaggctaacaatagactaaaaaagagactaaaaaggcaaaaaataatatgaaaaataaactatcatgttagggttaatatagaaaggcttcgtcccgcaactcagaccactgtaagatcatcttcgtgaactctatggttgcaggaaaatatgttctgggatttttagttttcatggaaatgccgtagaaaaacaggtatgactcgtcgatatcgctagattcaatcgcggtcaatgttacatagagggattaatttacaccccggatctcaaaataccaattctcgatggtgatacttcaagatgggaacacggctgatcgatcacttgatcagatcaatagagtcactttcttgaggcaaatttaaataagattaatttacttgctcacttttcttactgtgagagcagctaagctagcgaagttgacacatggagattccagattcttgcacttgatcgctcctttaatttggaatcttcgctaaaaaaacaccacctttttcttacatccatcagaagaagatcaattcgtttatgttgtgtccaatcctatgcttaattatatgcttttcaaaagttaaacgtactccacatatgtatcctgtatatatacttatatagttcatccccactaaatatagttaatattatttctctcttctcttattaagtcacattaccttaattatttctagtcttttaatgatagatatatagttcaaattgtcttttctttcttctctcttaaaaacatgcaatctcaattacttttagctcaaaattatatcaaattgttttaattttgtacgtattatgtaacttaattttctacagcaacgcgaccagatgttcatatagtatcttataaaagtatgagcagtactagaatactaaaactggagaataccgaatgtacttacttataaactgtaggggaaattaaagcacttaaaaaatgtcctgaatttaatcatattaaacatttatataagcatctacgtctagttcataaaaaacgcgttcgcgaaaatagttcatataaaaagacctatccccaaatttatttattctttttaagtttttctcccattaagataataattggatgtaacttatttgaatcaaagatagctagtaatgaattctattatcaagaaaaaatatacacaccaagattagggactaattactactcctatcaactatatattaacggacatgattaaccaaaatgagagcgttcattagttaattattatattaattaaccgctcatccacatcatgcgtgcatgtatatatggtgtttatttttaatcagtaactgaagttatcatgacttttaactttttgcctagaaagaagtcggttaattactttacttacatggacaagtacgtatgtactgtactgccgtacacgtacgtattttggaatataagatacagggagtacgtattcttgtacgcacacaacacaagactcgcatgtatatatatattgcattggcgttgagtgcacgaacacgcagttggagcacaaaaatggcgtgagtgcaatggtcttcttgtaagaaaaataaaagggtccaaatcctggaaaaaagagaaactgatttccaaaaaactttaaccgttgttgaactgaactgtcaataggattaaaaaataacagaaataactagaacacgatttccgtctaaaagaggggaaaaaaaggtaagtacgtttgtgacagaaaagtagggtgcatttttacatattcacccaccatgttttcatcttttcatgatgatgattggattttggtttagtcccaaaatcacctggtactttaccataattcgttttcatttatagagctatgttgttatgtcgtaattgattagtagagcatttgcatgattgacgataatctttttaattatgagataaaattttgtaatgtttgattatattgagtctaatggtagagatagaacacatggatctaagaaatggaagctgttgaagacgcccgatcacgactaagtgactaactagctattgatggagagcgagttagaggggcagctgatctagtatggtggtcgaagaaagtgatgatatgcatcgcggtgtctaaggcatggccttgagtggataagcctagtatttgcgctgaggatcatcctgtcgctaaacatctcctttggcctgcacgattttttttcttctcaaggcgttgtacaacaccacctcttcatccacatggaagaaccatcgtccagatctacgtagggttgcccttgaccttgctggctttgcttttcctcccaatgaccatcgtgcccatagccaatcaagagttggattttaatagagaatacctgtagcacctactccccccatataaaaagaacaacttctaaaaatgaatttggataaacatctatccatattcatttatatatagtaatcgattttttttcttggacgagggatgtatacacaaagatgctagcttccaaggatgcacagtaaaaccgctcttatgactttatatatattttttaagatcacaacttacattttaacccgatgtcatgaccaactagcggcttataaatttatacatcaagaattagtcttataattcacaacaaaatatgtatcacacaatttttttaaaaaaacgatgacatatacggacaaccttaaattccatatgtgcatattacacaataattattcctttctcctttccacttggtgttaatttgcaccgcacattttcttcgctgcacagaaaggtcagcactacgttcagagaatgtgtatgctacacacaccggccagaaccagagcgtgtgcttatgaatcacacaaacttaaacctcacacagtacgtagtccctgcagggaaattattgggtgtggctgggtggtgggccatgtacacacagattgcatctcactgttggctctagcttgaccggtctaagctagattggcagcaatgtcatctcatctctcatctcatctcatcaggtggtggccctggacttaaaagggctgtgtttagttcacactgaagtatgaaagtttggttgaaattggtataatgtgataaaaaaatttatgtgcgtatgaaatgtttaatgtgatgaaaagttgaaaatttagaaaaaaaaactttggaactaggcctttggccatccatggagcccatgggcaggacaggagatcgatcggcagatcgtccggcccccacggcatccgctgctgctgctgcacgtgtagcatgtaatcctctgcgtccttttcgccgtgcacagcttaattttggctttcagatcgatcgatcgatctccaagctaaacccgtgcatgcatgtcgtcgcatggccaaatggactttgctgctggctgcatgattgctttgtgcgtcgctccatcaaagttcttcgtagggagaagaaaagaaagagggttcatgcatgcatgacgcgttggctgatctgcagtaggttcacagttagggcataataatcccgtgttttatgcatgtatgcgtgtttgtttttttagaatttttcgttttacggaaaaagattttatcgctctatcgtcgcgtcaaagatttgattgctccatctctaagagcgtattctcgcttagaatcctgggtgagatcatcttgtcgtgttagtttttgattgaataggtcaacctccacacgatcttctcgtgtaccatgccatcgctaagttagcctcaatctctctaatatgagaacactgtccaatcagacatcccatctctactcaatcatttctctagcaaggaagtgagaaaacatgtgactacatcggtaatggtttctaatatgaaatatatataggggcttcaacgcggtcgagactttcattgttccaaatttacgaaggaaaggttccgaggtaagcacaagcaagaacacatgatttcttattgtgatggtggatgaattgatgttttttttatcaagggaagataaatgaattttactagaaaacttgcacacacttgtcgtaatatccattactcgggagttgaggactacacaacctttaacaataattttgataacagtaagtagttttggtgatagatcaagttgggtggttgtcataaaaaaatgtcatcatatcgagaacacaaataagggcaatagtttcattaatatgctaaaatctcccttactctatctctagagaaaaaaatgtcacttttgacaacagtgaaatcattgataaatacatcaaaactttttattgatagtgaaattattgactgcaagtttttgccaatagtgaaatcatcgaaagtgaaaccattagaagcatttatgaaatcatcgatagggaaaggtttgacaatagtgaaatcatttacggtaagtttttaccaaagaacttacataaatgctataagggaagaaaaaatgtggtaacattagggatggtttccaattgagacaatgattcggtttctcctagagaacttgcaccaatgttgtattttctattattttgcgggtggacaattgtactgatcaaatttgtggtaacaaatatgacaactaataattaaattttagaaacggagatatttagtatgaggccacctaaaatactcatggtagcaagttgggtcaaagattcggtcactctatttttaggtcaaagatttgatcattatgtctccaacaacaaattcttgcttacaacacaagtgaaatcatcatctcattagttggacttttattgaataggtcatcctccacaggatgttctcacgtaggcgtgctatcactaggctacctctatctctctaaggcaggaagcgaccctatcaagtatctcatctatacacaaccatttctctagcgatggaagagaaactttagcaacaccgatgatggtttccaattattattgggacaatggtttcgtttttaccaaggaactttcacaaatgatgtataatatatattggtttgggggtggacgttttgcgctggtcaaagtcatcacaacaaatatgacgaaagataattaaattttggagatggagttatttagtatgcagccacctaaaatacatcaagaaaacaagtcgggtcaaagatttgatcgttctatcgctagcaataaattctcacttatgacacaggtgaatcatcttcgctaattggacttcgatatgtcaacctctacattatgttctcatgtaagtgtgctacactaggctacacatatctctgcataaccatttttctagtgatgaaagacaaagtgtagcatctctcatagaaccatgcatctggcaagagaagagaattgtatcaacatcaggggtggttcctttttttggagggggcgatgattcagtttttactaaagaacttgcagagatgctatagtaatatattatttggtgggtggattattgcgtcgatcaaagttatagaaaaaaagagatataataattacattttatatatggatctatttggtatgcaataacttgaaatatgtcacaatattaagttggtgggtcaaagatttgatcactctatctccagcaattaattatcacttgcaactccggtgaaatcatcatctcattatttggacttcactatgctacccccatgtctttaagctaggaagcggccctactgaagtgtcctatttctacacaaccatttctctagctagggaagaaagcatagcaactcacacaaccatttctctagcaattgtagagaaagtgtacaaacaccagggatggtttataacttctgttgggacaatgatttagtttttaccagagaacttgcacaactggtgtactatctattattatttttcgggtagacgattgcggtgataatgggatgatgaatacataggttacataagtgagaatgtattgttaaaaatggagtgtcaaatatctttgactccgcgatagagtgaccaagtctttgacccgactttgctaccgtgaaatatgtttaggtagtcacatactaaatagctccatctctaaaacttaatttttatctcatatttgtctctctacctttagcaactcttctgccgcttcagcctaatcacctcctttctctcctctatccctttgcaccaccgcggctttctttaatggggtgagcctaacaaacactctgacacaagaaagcaccaaccgtggcagaccaaataccagtcaagaccacctccacctcctccctccttactcggtgcttgcttcttctcctcactttgctcgttttcctagagaggccaaatgttattctatctattactttgcaggtggacatagttgcattgacaaaagtcatagcaacaaatatgacaaataacaattaagttttagagatggagctatttagtatgtgaccaccgaaaagacgtcacggtaacgagttgggttcagcgattcagtcactctatcttcgagtcaaagatttgatcacttcatctctaacaattaaaacttacatcaccggcaaaatcatcatcccattacaccccctctttgccttctctaccactctaccaccgtgactttttttaaacgggtgagcctaacaaacgctttgacacgggaaagcaccacccgatgactagaccagagaccagccaaagaccacctccacctcatccctcctcacttggccctcgcttcttctcctcacgaataggccaaccgtcacacggtgttctcacttaggcgtgctaacactatgtttcccctatctatctctatctaaggcaaagactcagccatttcacataaaaaaatttcagccataccaagagcatccaatttatagaatatacgggggctctctatagaaaatgtgtagccatacacagagaaaatgtataggagacacacacaaccactcttctagcaagtgatgagaaagtgtaccaaacacaaagtatgacctccaattcatagaatatacagggggctcctctgcaaaaaaaaaaggagcaccaaagaaggggaggacaaaaatgtgaaataggaagaaaggcaagggggtgaggcaaagagtgtttaaagccataaagcgcagccctgtaattgtaacgccgccgttatgcttcctccctccctcctcttctgccttcgctctctcttgctctccaccaccgcggctttctttaatgggggtgacacgagagagagcctaaccaacgccccctaacctgacacgagagagagcagagcagcaccacccggtgaccacaccaaaccaccccaaacaccaccacccccacctccctccctcctcactcttgccgcctctcttcttcttcttcttctctcctcacttcgctcgctccctcggtcgctcggccgccatgtcgtcgcaaggtgacgcgctgcctctggttcttgttttgttcttgttcttgtttttgttttgttttgtttgccgggaggtttgatggggggggggggggggcgcatgcaggagcaggaggaggggtaggggacccggagctgttcgcggagctgtggcgggcctgcgcggggccgctggtggaggtgccgcagcgggacgagcgggtgttctacttcctccagggccacctcgagcaggttcttgccttgcctctcgccgccgccgaattctttggtttctgtccttccattctcgccgggagcgagcgagtgatgatgacgcgcttcttgttgttgttgttgttgtttgtgcagctgcaagagccgacggacccggcgctgctggcggagcaaatcaagatgttccaggtgccgtacaagatcctctgcaaggtcgtcaacgtcgagctcaaggtaatctctctctctctctctccggtgtgggggagcaaagagaggaggaaaaagaaaaggaaaaggcccccgtgaaattctcttacgtttccttgtttgtttgtggctgcaggccgagacggaaaccgacgaggtgttcgcgcagattaccctgcagcctgacccggatgtgagtggtgaccaccaccgtttttttttcttcttttttgttgtgctcttgtcgcctcctctgatggttttggaatgtactttgtgctgctgccctgttctacaatcgtggtgatccttttgggttccccttaattttgattctgctttctttttttttagataatggattaaaaacccggcctctacatccaacgggatgtacacagccatgattctgctttcatgtcctgaattttggcatgttttaacagcggtctttttttactgaaagtaaatttacttgatgtgtactttggatcacattgtgttatatgccgaattggcccggaaaaggcagcaattttgggtttggtgtgtgaaaaaagggggagtgatttggggctccactgtttttcagcaagagaatctgccaacattacctgacccgcccctgccggagcagccgaggcctgtggtgcactccttctgcaagatcctgaccccatccgacaccagcacccatggcgggttctccgtgctccgacggcatgccaacgagtgcctcccgccactggtatgcgtaattctcatggtttttggtgatagtagtatgttcccggctatgtatgtcaaaatcatatatcttgtttgttgctaatcaggatatgtccatggcgacaccaacccaagagctcatcacaaaggaccttcatggatctgagtggaggtttaagcacatctacaggggtatgcaaatttttgtttttattctcttggttatcagctcgatcgttatctaatcatttgaccaccacaccatgatcaagattgtagtagctttatgtgcatgctggcgcttattcgtgcaattctcggttccctaggccaaccccgtaggcatcttctgactactggatggagcacgtttgtgacatcgaagaagctgatttctggcgacgcgtttgtctacttgaggttagatccccacttaccttcagtgcttgttattcttcagacctgtacaagtttatgcagatgttcacaagatttatgtatcaaaagggatcatgcatattttgcttttgtaggagtgagacaggagagcagcgtgtcggagtgaggcgtcttgtgcagaaacagagcacaatgccggcatctgttatatcaagccaaagcatgcatcttggtgtgcttgcaagtgcatctcatgctatcaagactaattcaattttcctagtgtactacaggccaaggttgggccatttctgccatcatttgttatgatacaactgtagttattctctgctaatgggtgctgttgtttgtttgttttaaaggttaagccaaagccaatatattgttagtgtgaataagtaccttgcggctagtaaggttggatttaatgtgggcatgaggttcaagatgagttttgaaggggaagacgtcccggttaaaaagtaatggttttacctctggtttcatgtgtttctatttcactttcttcttgatatgttgtagcatctcatgttcaaatggtcgatgtaattttctgtaggttttctggaactatagttggtgaaggtgatctttctctgcagtggtcaggttctgaatggaagtccttgaaggtaagataaaatcatttattgttgttttagatttcttttcttaaaaagtgctgattgccatctcaactgttcttgatgtaggtccaatgggatgaagtcacaaatgttaatggccctgagagggtttccccttgggaaattgaaacatgtgatggcactgcacctgccatcaatgtacccctgcagtcagcaacgaaaaacaagcggcctagggagccaagtgaaactattgaccttcaatcactgggtatgacattcatttgtgcattgctcaacttgccaataacttgtggaattatttggctcttaatccttttgttttcgtttgcagaaccagctcaagagttttggctatctggaatgccacaacagcatgagaagacaggtattggttccagtgaacctaattgtatctctggacatcaagttgtttggccaggcgagcatccaggatatggtgccgtgagtagttcagtttgtcagaatccgctagtacttgaaagttggttgaaggatttcaactcttcaaacaagggtgtctcccctaccttgtcagagatttctcagaaaatttttcaggttaccagcaatgaagcaagaattgctacatggcctgcacgttctgcttaccaagctgaggagcccacttccaagttgtcttcgaacaccgctgcctgtggttaccgaactgaagaagttgctccaaatgcgtccaaggttgttgaaggaaaaaaggaacctgccatgtttcgtctgtttggtgtggatttgatgaaatgtaccagcatatctactaccactgatgacaagtcaagtgtgggagcaggagaagcttcagccaaaggtactggttctcacgaagactctggtcagctgtcagcattctcaaaagtgacaaaagagcatattgctgcggatgaaagcccccaagagatccaaagccatcagaattacaccgctagaactcgcataaaggtataaatttatctgtctccccctcgagaccttttatggtgcttgggaggtacccagggtacctctcaaactattgagtatcaaccgttgattgctaaagggtagatttgggatagagataatttaatttgcacagattgttttaagtcataagaaccatgactttttcctgatcatttgctgctagccccgaactttcttgtctgccattgatatgctcgtcttatacttcattattctttacgtaattcatcttcacttgtagcgtatcacatctctgttgcctagcctttcaaaggcatgtttgttctctgttctctctggctgaccatggcggtggctcgcattttataattgatttatcgatgaactctcaaagcatcaaagtttaaaatagtagtactccgtattacactacctatcatataaaataataactcagtagtctatcacagattccatgtaatctgtattaggatcttcatactacgaacagtttttgaaaaagaactgtactacgagcagtttgatcgagaagaaccaaaactttcttcaccgatttgccttatctgatagtaaattgatataataccaaggacaaaattacctatctaacctcccacttaatctttaaattaatacctggcccacttcttaagtaccttttcagaggtatcttttgatgtaaaccattagattggggtggatcaacggatgttatggtttcaaagtaccggagaaagtctcctcctgcttcttaaactgtaactgactcaacatttctactaggttcaaatgcatggaaatgctgtgggcagagctgtggatctagctaatctagacggatatgagcaactgatgaatgagctggaagagatgttcaatataaaggacctcaaacaaaaatggaaggtggctttcactgatgatgagggtgacacaatggaagttggagatgatccttggctgtaagcttctgcatatttttaatagagtggcagattattgttcatccgacaaaaacttatgattgtgtatatttgcgattcctgcagggaattttgccagatggtcagaaagattgtgctctatcccattgaagacgagaagaagatcgagcctcacccgaagttactgtcttcagctaatccagagcaggatcagaagactgggttttaggagggaggctagggctgaaaggtggattttttagcctttcaccattgaagcgttggtggctatcgttttgtcgttggagatggtcgtagctgaaaaaatggtggctactggctagttcatcgtattgatgcaacagatttgttgctggtgtcaaaactgtttcttcacaagcattttgaagaacaaattgatgtaacataggtttcaagaaaaaaaaagatttgacaatgtctctttagtagtttgctcaagtttagtcaaaaccttaatggtgcttaaggaataacgtgaagctataaaactggtgtgtaagttctgtaaatattataagggagattataattttgtgatattagctttcaccctttaatttattggtatatattgacatgtagatttcattgttcttgatcagtctgatcgtctgaccttgctatcagatgtactgaaccatgtttctcaatattttcactattgcgatttaacattctaaaattcaaggcgaatgtggctattccacttctgaattctgttctctttggatttgtttgttgactgaacatccttgtcaatagagaaagaaacttcctgcataatggttccagatattcaatttggaaaaaaaaaacgatgcctaacatgcttatgatccaaacggagggaaggcttgaagaaacgagctgggatatagatttggaagtttgttttaactttgattttcagatttttttttatcatagtatatttcttattgattttgaaatcgctataagaacgtagacctagagaattcaagattttggccaacagaacgtcaagacgttcattcgaaacgcatgaaattttcctcaatagccttcgaaacgcatgaaattttccagtatcttcgtagtaggtttgatcagttcctaggaaaaatatctcccttaaaaaaaagaagaagaaaatcctcgcgtgcaaggagatgcacggcatggacggacgcgtgatcgccgtcgacagggttagcaccgggtgattacgtacgcctccgtgcagatctgcgcgcgcgccgtgcgtgcgtgcgtgcggtgcgggggcggcagggaggggtcgccgtccggcgccggccttgtcccctgtcggatcctgccccggcaacgcaaccaccaccaccgcgcacgcacgcacgcacgcgcgatgccaacgtcgtctgcctccctcgatcgtttgtggagcaaaaattaacgggcaggccgagctcgcctgcatgtagctcgatcatctgcggaaagcccaaccaaccaaccaaccatgcgttgtacgtccatcgacgtggttgccgggcctcctatagaaacccggaagaaaaaggtcgactatgagccggggttttgattcgcgcgcgttcctcgattgcaaaattggtttgtgcaagacaagtcaggtgttccccctggcacaccgcacagttcagctgtgacatcttgcacattgtaagatcaattgcttgctttgatgcgtgagtttcaacattcctttagtgattagtagtatcttgcaactatttagaagctccctctctcagttgttcggagagcaattttagttggcgcggtgtctatatggcgcttacgtgacaaggacgagggaggacaaattgacacggttttaaccatcaggaaataaaatgatttattagggaataaaaattagtttataggttaaacttttgtatatactagaaaaaatacctgtgcgttgcaacgggtaattctattttaaatttattgttgttatacggtttaactagggtaaaattcactgtgagaattcgcttataaattttttttagaaaatcataagctgcaattaggagtccatattttatctcaagttagcatacggatttctttaaatagatttcttatacgactcctttttattttcaaaaacaaatgagcttaaaatccaactcaaacacgaatctgtatttttaaagcgaacgaacttaaaaacttactcaaacccgtatggcgtaccagaataccggcaaaaaacatcttcaatttttataatagtagagatgtttgtagctatttaaaagtcaatactaaaagaaaactaagttgaaaatatctttaaatcaacttcaatattaagttctaaaatttaaattttggcttttgcttattagtacaaccaatgaggctcgaagtctatgtccgatttacaggtacgcgaaccaaattcggcctataaggatatgaaacagaccttttcctaaaaaaacacacgtgcttttggcaggcctgatcagtagtactgctccgattcaggcattcaggcccatctgccaatgccaaaaaaccaccgcggccgcgccgcactgccgccgccgttggcggttgccgttgccgctaagagcaagttaaatagtataatcaactactaactttaaatcatctatagccagtgtaatagtgaattcatacaataattgtttactatactattaatacatggtcccatatatcatacacccattacgttttaaagtccgtgctgtagctggctacatgcagcgctgttcttctctctcttccttaatctcttgtgtacctgctctaaccggaagcacaaaccgggggggtgcatgcatatttactcctcctccccattgatggcggggcggccggcacggcggcctgcgtgcggtgtaccagcaagctactactagtcctcccgtagtccggtgcccacgcgagggggaggccacgcgagacgcaacgcaacgcagcaaccacaaccacgggcggtcccggcggatttgacagtgcaaactgctgcaaagtatggtggtctcctcccaatcttgtaggtggtcgggccctgcacctgctgctgctgggctcggttgaagtggcgcagcaactggaacccgtgtttgcctcgaaaggttggtcagcctgttcaatgttcggggggtagtagttggcaggtttcgcagttaacggtaaccatattttttttaacttttttttgggactgaaatggtaaccattccggtttctaatcggcgaaattaaaaaaaaaacattcgaaaatttgttaggttccttactgtgacatctgcccatctgagttcgggtcttcgactcggcgtttgtaggaacgagtgtgagcatttgtatacgagtgtctacgtttgtttgtgttgtataaaaaaacaaattgagatatatctttttagcttttttttaagattttattggttttctttgtttttcgagttgctattgcgatcagtgatgaaaccgctttggaacatgtatttaattgatgaatggtttgactaatatttgtagttattagaggtgtatggatggcgtgactgtatcctcgtaggtgagtcatgccctttttatcctgcgttttttactccgatcatagccttagaggtgtatggatggcgtgactgtatcctcttagatgagtcatgccgtttttaccatgcgttttttactcttctacatttaggggtatttaacaatattttcgtaaggtaaaatttgcttctatcgtgagataaggagactattaattacgaataatttttaataaaaaaacacttctactttacccgtctcgtcgtgtattttgtagttatttttttcaaactgttaataataacatagtactagtaaatataaagcttttagtcataaagtatttttatttgcttagctcattgtagcttcaaccgatcacatctttctcacccacacatgatacataggatcacgtgagccacgaagtagcagtattaaaaacctcatctcaagatcctgtgcatttatccctttagagcaagtttcaatagtatagccatctgctggctccaaatcatctatagtcaatctaatagcccatttatacaatagttacctataaaaatatactacatcattaatacccggtcctacctctcatacactcataacgtattggagtccgtgttgcagccgactataaatctgtagcccgctttcttctctcttctcttttcttctcgatgtgtggttatagctggtttatagcctgctattatacatgctcttagccaaccatatgatctcaccggtccattacacaaccctactattactgtacaatcctacacgatccatgctgtccttccttcacttcacttcacctacatgcacggttgcccctgggccccacccccctaaccattgctctgcttgtgggccccacacatcagcctcacattgcaagggtacactagccgaagccaaggaaggagcaataaacatttaataggggttgttcaaattgatcttgtttcaaactatacaatttttaaataaagtagtcaaagatatgcatccatttagttttttattaaactttgataaatacataagaaatcctgtcaaaacatggtaatattgtcaaattttcaaaattttggcattactcaaaatttgataaggtttattttagttacaatctaaacagcccccttagagcatccctagcagatgttccatccaatcctccatctgagaaatagcggatgggggtgaaaaatcggccaccagcggatgcgctaaaacaggagagaggaatgccaatttttgcgttcttctctcctcacgccaaatcgcaaccgcctctcagggtcgagctcccgcccccatccggaattcatagaggtggcaggcaaagcaggcagaggaagagagatatggaggatgaggcgcggcaactggatcgaaggaagaaggaagaagggaggtagagaggtggcaccaaccggatctgggctagggaggtttattggagaagaagcgccgccgcggctcctccgcccggcgaccgaccgcccacgccgctccccgcccgcgaccccgccgtcggtgccgcggctcctccgcttggtgaccgccgcgccgccggtcctcctccgcccggtgaccgcctacaaccccaccgttcctctgcccgacgaccacccatcaccctcccttgtcctccccgtcgaagcaacggtagaatagaagagaggatgagggaaagatataaatgtaaatgtttggtagttgaaatatacattaaaatatatatggatgatgtaatatggatggtctgttggagtgaagaaaaatacggagtgagaatctttttggatgaccatctaggcccctttgattcaaaggaaattcatagaaaatttagaggatctcattcctataggaattttttctatatagctctttgaattaaaggaatagatcttatggaatcctatgaaattcttatagaatacctaggaccatgcaagttattccatagtaccatgcaagttttggaggaattctaacatgaggtagaaccgcatggaaactttccttctagtctttacctcttctctaattcctgcgtttttcatgtggtccaatcaaacggtcattcttgtgttttccctgtgttttgcaatcctttgttttacacttacatttctatcaaaatctcatgtttttcttattcctacgttttttcaatcatacgatttaaaggggcccctaaatgtgaaaatggaggataaaatttagatgagctccgggatgctcttagctagtactagtactaaaatttagtagtactagtaccagactaccaccaatggtgtcacttgtgtgaatgaatggccctctgccacaggcaaacctttgcctgctggctgctgccgcccctctcatttctcatttgctctttgctccccccaccaacatttttgtagcagaaaaggagccaattttttttcactcctagtagtcctactcctatccccttccttcccccaaccccttcacacttccatcaccatttcttccttcttcccctagctagctgctggctgctgctgcttctctgggccctcgtgctgctcttctcatgtcaccaccgccggccgctagtgcctttctgggagccaaccaggaggccccgaatcagatcttggcgtaggtttgctcgactcgctgttgttgacggtgaggagggcgcttgcctcgtctttctttcttccaaagagcctgctcttttcttgggtttggcctaggaggaggggtttttggtgttcttggtagggaggaggattcttggcatttggcgagagaggggggaaatcttttgtttccttgtctgattctgctcggtcggtgagtggtgcggcggcggcggcggccatggaggcaatcacgatgtcgccgtcctccgtctcctcacaccacctcgacgtcgacgctgcctccaccagcgaggacatgtcgtcgttgcaggaaggcctcctcttctcggacagcctcaaggtatggtgatgaatgcgatgtgtcacaccgtgtgtgtgtgtgtcttggcctcctcaagccgtcaagatgccgcaatctttgcttcttgccttcttcttctcccacctccttttgccatggatctaggtagaaatcgggctgcgatttgttgatttcttggcgaggtttaagaaaagtaaaaacctgatgatgatgatgggtcttgttctgggggtcacactcagttgtgtctcgtgtgccgttttgtccatgtcaatcacaagattttgtccctagtttggtagcaaaacatgataggctctctctacttgtacacctttccaagcttcactgtagttgtaatgtttgaaagttcttactatgccttctacttttactatgtggttataaatttctgatcttgtagtgtactacactattactctctgtaatgtagataatcatctgtttcttgcataattggctgtgcaactctgcactggctgaatctttttaattgatttctccctaattgagcaaatggagcctagaagacagaaacccagttccaagggcttttactagaaagcagcaaaattacttgtaaattcatggtctccttgtccattttgaattttggacggcttaatttcctttagcaagttgatcagtctattggtgtgaaccaatggcgtgcacagttgcattcctttgtcaaaattttcggtgctcaggataaagaagttaggatccttgttcacaacgaaaccccacatgccttcgcatgagttaattagtaatgtttctcccatatgtagctgagctggcatttcttatagtactgtatctcctgtgctgggcttaaattatatttctttgtaggacctgaggaatctgcgttcacagctatactcagcggcggaatattttgaagtattctacagaaacaattctcagaaatctacgtaagatcttttgttttatttggatctctgtttctttgtttaccttgctgcattaaattaagggtaaaacaaatctacactgatctgctgctgtagggtgatgacaagtctgaaagattacacagttgaggcccttgttagcactgtcgaccatctgggctttgtgtcatacaaggtggataaccttgtcaaggaaagatccgatgaggttaatgagacagaatttcgagtatcctcagttgagcaggtacaaaattcatatgtgcactgagtttaaaggtcattttgtatgtggtccgttaactaccttgtaattttcttaacatggagtgaatatcacatacattatttatattctagtacttgagtatggcctcatttattacagaatgcttggtttaatgtctgctaaccttcggaacattgctcaatatgattacagagagtacggatttgccaacagacaatcgaccaggagggaagatctcaacaatctcttctcattagagcaccaaaataccacaggcgttacatattgccaggcaaattcctactcagttttgttatgctttttatatgatgccttcttgtaaaatcacttatcaccgtggttatgttgtataggcacagatatagtggaatcagccattcatccagtttcagaacctccacggtatagcaggcaacatatgagccgtaaaatgcacaagtcacaatctagtaagtttactgcatttctgaatttttagagagaaaactgtcattgattttgaaactgcttttcttcctgcagtctctacgccagttggcaggcaatctacaatgaggtaaacagatagctctcagaaccctgttttatatttgctcctgagtcaaattgtttataagcttatccactgattgttctgtatttttaaagatatactgtgggatttgattttaatacatcttatgtcacaggagcgcgcgttcaccatctccttcagctcgtggcacacatcatcgatcacggtccttgtcaccttctcgaaaagcacgagctaaatccccatctccccaaatcatcagcacacaaacaaaaggcatgttatcttcactagatggtttacacttgtttctgaatgagaaaatgtcatatgttctttgaatgttaagctttcagaaaacataagtctaaactattttaattccttctgctgtgcagaaacaagagcaggttcaccaataccgaattccaatccccttgcacgatctgccacggttgcaagaaggccacctgttcatccaaagcattttgtatgtttactatagtaccaaattatatatttacattaaggagataacattatcctactagatcctaagaaagcctacatcatttgttttcctggagttcaatcatattcagaagaaatttttatttattgcttctgatgtagtatttcttgcagagacaaacttcaatgcagttacactctgactggagcaatcacaaagagcaggagaaaagctcaagcaagggcagggggttcctcaaatcattgctcacaaggcgtcggtggaggaacgatgagtcattgtacagctacttggacgaatattgatttcttaaatgttactgttaaccaactctcacttgttcacttatctgatatttgagattttagcttttttgtccaaatggaggcattttcgccttatctttctatcattttcatgtgtgtatacaatgagggcctatcatcagtgttgctaatggcattgcgcaagtgtatccatcagcaactactaagctgttcagataagctttcccaattccattttcacttttcagtactcgtatgctctccaagtctccatttctcctgataccaaggtacaatcacaagcagaataatgacaatttcactagagatgaatcataaaccatcttatgccctctcagatgctgtgaacttgtctcatatggtggtccattgatgtttttctaccttgtgactgttagcaatcttgtcatacatggagctggttggcagtttctgttgaggggatccctgagggctgtggttgcaatagctaggagctagtgctagaaaatggcagatgacaaacatggccctggtttttttttgtcataatctgtttgtaaataattggattattatgcttatcaactaaaatttgaattgtaatcttaaatttggagttgattttgggattttattcatcatagtttagtttccagt

SEQ ID NO: 9740 - DNA, 14070 bp, Oryza sativa
acatgcagaattgcattctgtgcaggggaaattccatcacccggatgctacagaatagagacaaatgaatttgaatacattagtcatcagtggctatctatcttgagaacacactagacagtaataataagattgctcagagctaagtccattgcaaattacaaatttctaacaactgcctcaggtgtcaaaattaagaacaaaagctgcgaagcagagaaaattagtgcagaacacaggagatgtaattaaatttttgttacatccaactttctagcacactatgcatgcccctctcctgtctcggtgcacataaaaacaagagttctattggagttttaatattgagtttttcaagattaacagcaggctgcccggcaactacattgcactaatgttttgcagtttctatgcaatggtagccaatgcataattaaagacggaatatcaaaaagtatgtgagtaattttttagagcattgaaatattcaaaacactagaaacagtgcagtatgcagaaatatgcatctgttggatatattttgttgagatttatggcaagctgcctcgcaactatgttacactaatatttctccatttctatacagtggtacaaatgcagaactaatgggagaataaaaaattatgtaaatacaatactaatatttttcagagaatctagatattcaaatgctagagatgcagtatgaaaaagatatacgccctatagttctactgaatgccatgtttctcagacagatggatcctgaatatatttctaggactaatgggctactagctactacaaagcaggttacaaatggactaaactgatattgatcaaacgaatattatcaagagggaaagaagctggttaccgcaggtcctgagataaatacgatgcgatcttcagattttggaacagtatcaagaacctttatttcacagcctgtatcattctgaatagacttgatattgtttccacccttccctattatacctccaaccttgtcacttgagcataacaacctaaaagtaaggggttcaggtgggactgagccatggccatgcattagagcttcaggaaaattgggaagatgagcaacatttggcccttgaaaagggagatggagattaggttgcattcctggaggaagaacatctggttgattgaagaatgaacgagatgaaccagaattatgagcaccaagaacatcactctccttaggaggatgagtaaatagcaactgagcaactgtattcagacctttcctgactgagtcgagctctccagtgatctgaagaaatgatatatgaagggagtatgtaatgattttctgatgcaaaatctaacagatatattacaaaaggaccagtagagaacaagataatgaaatccaattctgaaaaattacctggcaaagttcatctcggggtaaagcacataatggaagcttgtcctttgaaactcgaatttcacaacagctgtcagtagacatttgcttaatcacactaccattctttcccaaaagccaacctacttggctgtctagcaccaataatctcaatgaaacatgatttctctcaccagatgcatctcctgttccattttccatttcatttacaaaaatccggtcaaatacaagcaaaatggccttcacggctaatggcattcccttctccagctccagctgcgcctctggctcagaatttgtatcttttgcaacagaggaatcatctgctttcttatcattgtctttccctgactcatccctgtcctccttatcatgatctttttctaaatcatccttttcttccttaccaaggcctttctctgaatcatccatttctttgttactttcatccttttcttccttagtgtggtccttctccattccatggttgccatcaacagaacaagccacacctccgtcgttttccttagtttgcacatgactaacttctctgtccttatcaatggcagttatcacaataaccctctcgtcacaaccagggacaacttcatcaaccctgatttttactccagtctcttgccttatctttgcaatgatgcctccacccttgccaatgacattcccagattttgaagtagggcagagaatgcggaaaataggaacaccaggttgcactatcagttgaggctgctgcaaagaattgtgctttgttttctgccacttgccccgaccattttgctctgaagaattcttttgaaacggcctcttcgaaggcgtcgagcgtgaagccatgtcttcccctgcctgaacacaagaaaagagagcaacaaagattagtgatctgccactatgctacataatgcacagcctgcagcagtggcgaatccaggataaaaatggaggatgggctcaaaagtctaagccaatataactaaaatcagaattcgtacccttacacaagttaaattcaatgcacacacgatcaaatagaaaaaaaaactataatcgaagtctctttggtcaatttatgctctcatcagcttgggtagacaggggcggatccaacttgggacatggggggttcagttaaacccacaaacttttgggggaacaaacaaaccaaactgttacttgtatattaaggttaaggctctggaattaagagaagagcttcttacagatctagaagagaagctagggtttacgcaagcaaattccaaacggaagcacacccggtgggagagagagatgaatcaagctagggtttacgcaagcaaattccaaacgaaagcacacccggtgggagagagatgaatcagaaagaggatgtggatgctcaccagaatcccctcccctcccctgctcgccagatggaggtcggcgcccctcccctgttcagccgcaagatggcgcaagagcggaggagacgagacgggagattttcttttatacgccatggtattttcttttagcaatatgtaaaggtatttgcaaccatctatagcaaattagttttgttaaatttaggattaatatattttggtaatatgtttgatttgtgttatattttcctatagactcgatcaaacttaaataaattttactaaaaaaaagtcaaaacaacttatataatataaaatagatgaagtactttaaatgatgctaatgatgatatctaagttcgccttcaatatcacaagctatcatgtgggaccacaagatcctcacacgtgaatacttttgtttttttatatagcattgtatgcctaatcaattaactgtgttataaacttatagtttgtgcttttactttttatctcttataatatataatatgttgaacgcacagacctttagctagttttttataataattggtgacccatatatcaacagtactgagagaaaaatgtgacaaacaatatgtctcttatccttccttatcatcatgcacgctattattatggtcatcattgaggccgggggtgtcaggcttacagggactcagggaggcaggagtcgacctggtagagagtggagatgctagattcgggctcctccttactatatacggtagttctcccgcaatcaaagggaagaataaaaagaggagagagagttagtgtgtgaagcggtggcagattcattggatttggaggtggagtgacgatagagccaccgaacttggagatggatataatgggatggtccaagttgaaacaaaattgtaaagttagttgttgtcaaagaaaataatggttaaagatgatataatatgaaaacttttaagaatacatagtacaaaatataatttactttttttctctggcataattaaagatgagttgttcgttagccgatagttccatgctatgctaagcccactataattttattgtctctacataatatgattggtcggtttacttagctactactaataatctcatgatatgttggcgtgtgatgatatgggcttctgctaacacgggctgattaattatggttggatagatttggctaaaaaataaaaaacaataacatcaattttgcttaatagtacaacattcaattgtggtctcctttttctcactacatgatatatgattattctctcttatcaatatgtgcataactatattagtatttcccctaattctttcatattgttttttacatatatgttaatttgaactaatatttttttctcacaattaaatagataataaatcgtttttccatatttatcgtacataaaatgagtatagtacattgtataatttggaaattatattacaagtgtatgtaatttaatgtataagatatgaatttatatactacaagttttgactctttcaaaaatgctgcaccacattagataggtagttaagtgaaaaaatattaaaaaaaacatagtcaaagccgtttctttatttcattcaaaacaagacattttggaacctcgagagaatgtaaggaaaaagagaggtggtgagcttgacagcttaaaaaaaaataacacgttgacgtgaggtgagagtgagattgttgcccagctagcgttttcaacgttcggtagttggccgctaaattaatgccaccagatataggtctttttttctttcggtttcattctatgcaaaacttattgtaaatctctaaaatcttagagtaaattttacaaaactatatatatattgaccaaattattgtaaaactatagatgtaagatggtatatcacaaaactacaaacttaacaataaatttatcataaaactacagttttattgtcttgtagttttattgtccatatattttattataaaattatcttaaaatatattttggggttgaaatttttagcattaacgttatctttgagttataatgtccaaactttgtgattgaattgatataaaacctgtagatatccttttgtaataatccaccttatatttgtacttatgtgataaatttagtgttataaatttgtagtttgtgatacatcatattaaatttgtagttttgtgatgatttaactaaagtacctgtagtattatgaaatttactcaaaatcttaatacaaagatacatacaacttatacatattctccaaaatcagttaacccggtgaaaataaccaaatcatcacgttatgctaataattcgatacaatgaaataacctgcgttttttcttcttctcaaacatacccctccttaaaaaaatatattctagcaacgaacctacatgtatgtatccagaatcgtagccagagttagctatcactgtaaccacgcatgaaaggcgcaacaatagactttcaacgagacaaatagctggttagcacggtacatgagacacaccaccacacccatgagatgacgagcccatgacgtgtaaaacgaaacggacaacaacagaaaagaagcagataattcccaattgccgtgcaccaccggagcctcgacggcggcggcggcgcgcgccggcgtggtggggcgggcggtcatgaggtgcacgcccatcacgttggcccccacatctaaatccccgcacgccttttctcgtgtcgcctactcgccccccccccccactttgttttcggagggttaacacatgcattaggtgctaataaatcatcatccagtataagagcaagtttaatagcatagcccaatacttagttccaattcacttataactaatctaatagccagttcatataatatttgcttactatattattaagagcacccgcaatggtaaagtaagttgctctctataaaacatgtacatctcagtaatagactagattaatagtaaaccacctcaatagtatgtctacatgggtatctatagctctctcttctattgcctcgtttttctctacagactatctccatgttagtagatagctttactctctctctttatttaatttattccaagtagaaaaatatgctgacatagatctcttttagagagcctatagataaccattacgggtgccctaatatatggtctcacatatcatatacatattgcgttttagagtccatgctgtagctggctacaaatctgtagcccgcagcttttctctcttatcttttatcttattaaaatatgtttatagcgctgatagtctgctattgtagctgctctaatcacccggggtgggggccagccgcgtcatggcgcacccacgaacctacccgcctgagtcacgcctacatggcccccaccaccccgccccctcgttggccccacacgtcagcctcccgtggcggacacggcacgagtgagggaagggcagagtcattagcattagcgccggggataggggggtgccctgaaaacgtgtcacgtttttccttaaatagagttcacgtttcccaccacctcgtcacgccacgcgcacacgcgcccgatgggccccccagctcacccggcgaccctaccccgcctccgcgtgactgcgaggtggggcccacctaaccgtggtcccctcacgtcagcgtcgcgtgcgatctgggggtggacggggacgtggtgcagcacaaacggggggctcctcctcctcgggcgggggcgcacgggtcacgtggcgtcacgagccccccctgagtcgccttcccgatcccccagcgacacgcgccgcgcacgtgctcgctcacgcggaggaggaggggggccagagccgaggcttccccggctgacggctggagccgatctgagctgagccgagccggtgtgggttcacgtgaaggcggagacgagaggggtcgacttgcgtagcggccaggatcttctgcggtgatcaggcaaagggaaaaaaaagaaagaaaaaggaggtgtatttgttttaagtgaaaccgaaagagcatatagccgtagtttggtgatgtgtatacagatgtaaagttagaagtttagtgtcggctggagcaaagccgtgaaggtaagagagaagcgtatatgagcatatgagattttttgtacgctaccaaccacattatgctactactagaagatatgcttttcatacagggcaaatgtattttttttataaaaaattttctaaccacaaccgtcagccatgtcacatgtgatgttttattataaagctactaattcctagattaatattttggtagttcatctaaaacttgtcgaacaggtgccgatgaattttgaacacatatgttgtggattatttttgtgatattaggtattgtttgatattgacgacgcatatttctgcctcttaccatgagtcggtcggcctaggtaaccgtccctagtggccgggtcttggctttgacactaacacaactaatgttttcgtttcctatacacatatagttttttaagaacaaaatcttgctattaacagttaccttccatgtgcatgaagatttgtgccccttctcaccttcgtcgagttaccaaaatttggttccatgatagtaccacgcccaacttcactagcaaccctcgccaccaccccctagaggcaggggaggttgaggtgacgagcacaaacgacttaaacatgtgtaacaagggcataacaatcttattgtcgctagtctcctatgaaaagtatgagggctagagagaggattggcagtaacgaaggaagccgataggactcgtcggtatatatggtggagtttgaaggcatcgcacgaaataggggaggcaatgaaggaagaagggggaagcggcaagagggagtattatggttagtctgggtcgacaagcgatgctttatacagtgaagtgtcaagatccaaaccactcagcagagatcatgctagtggaggggaaatacttgattcaagtttttatcttaggtgtagcacaagacccccaacgtgtgtaaatcttattcgtcaaggtattgagatttcattacactatagaattattgtaggttccttgattaaatccttagagcaacactaagagactcactagatggctctccaagctaaattttagcaaatatcaaaaaatcaacctccaaaatacttgccaaccagttggccaaatgcctccctttgatgttcaaaattgccagccataatcaatggccattcatgggtcccatgctgatcctctctttctctctcctttatcacctttgcgagaagacgtgactcacacgcacttcctctagctcgccttgtcccagcgccaccgttgttgtagtccatcatcatcgctaactcaagcgccacatcccccgggcacctagtgccaccttacccaccctcccctagcccaagtatgccttgctccaaactactacatcgtcatcttccgtcatcgtccattatcaccaccgacttaaggcgatgcctctcctagcctcctagtgtggccttctttcatagtttcccacccgttgttaagaaggacggagcgaggtcaatagggccgatgacgtcctccaaatcccaagctctacatccccgtctcctcctttgcaaggctgtctatgtagacgatgtcttctcattggtgatagaaggctagaagtagtcattggagagggtagatcgagaaatggcatggaggagaactaggcagaggggaagtatgcgagagagactaacatgtgggtcccactatcatagtggaaactatagatggagagcttgttggagcacacataaaatatggagaattgaagagggatctttttggctagctagccagccaaatgggcaaacaaagagcacaatttgaaaagagagtttagagttgttcctataaatgcatttctctccaagtttacaattgagggggaagaaactctagtttggcttgcttattctacctttacaaccatgattcaattgcatcttaatcagatttaatcttaatagctaaaattacttgcattgctcaatcctattaatgtgttaattcatctttgtccctgcccaaataaatgtcacgaatgccacatccgtcgtggtaaaagaaagcaatatgtcccaaacaaatgtataccaaaatggcttggagcgagtttcccccttcccccaaagccccaaaccgctattgaatggcttaggcatactatatccgccacattgccatatccgggaaagtccaaaaatatcttacgaagtacaaaatctttcttatatccattagtgccaaccgagcaagagggtggggaagggcataagaccccatggttttgaaatttaataaatatcacaaattctacttccattggtgaaagtaagcaagaggtaagctatggcttgtagcgagccggtcctctatgctctatgaagtggtttgggttattaggtatcctacatccatcaacacttataaacatagggaagtttaaatacaacctttttatacacattagtgcctaaggggaggaagaactgaagaaggtagacatggatacgaaaacccctggttttgaaatttcataaactaaatttatttaaaacattgtcatttacccaccagtaaattttacaatttctagctccttcaatattaacataagattgaagaatccatctaattaggatacaaatattaataaaccaaagtcattctagtaaaaaaaactacattataaatcacttatctcctcttgtggcttaacctgattaacaaatagaccaatccctcctcaacctccgtctcctcgaatgatcaaagagcacgtggccactatatgagcaaaccaattgtcctgagctgacaagagtccaaggcttgaattgagctagtttctccacccccacgagccacggatccatcggctcaggttccagtcccaccgggggtagagaaagcaaggcaccctcttcgtcctcctctcacaccttccctcttcacacatcacgcgttgtctcctcctccccttccccttcctcaaaatctcctcaacacgccgccttagcctcagccccagctcctcagccctgcgcatgcttcgatcttggtgaattcagggagctcgtgaggttacaattaaggggaataaacactagtttggcttgctcattcaacactttgcagcagggtccaattgcatctaaattatctgcagtggtcaattctactcattaattcatttatgtccctgcctgaatgaatatcacaaataccatatccatcggtgaaagaaaacatgcggacccaaacaaatataaacaatggcttgaagcgagccggctctcccatacgccacaaagcggctcgatatcctatatctgcaacatcgctacttttaggaatgttcgtaaatatcttatacatgctagtgccaatgggagtatgatggtgtgttggaataggggaaccagccccatgattttgaaattcaacagactaaatttgttgaaactcatgagatataaatgttaccatttctagctcctcaattattaacaagcgaataaagaatccattaataataataataataaccatattataaatcaattatcccctattttaacttaacccgattaacaaatcaacccatatgcttcccactctccatcgactcgacttgaatgctcgtagagcacgcaaccacactgtgtatgaacaaaccaccagcgcgcaaagccgagaagagcccatgggtcggcgatcgagccggctcccccgcccctaacgagccgcggaccggctcggctcggctcggctcgggatccaatcccaccggtgtagaaaaggcaaaggcaccctcgttctcctttcacacctctccccccctcttcttctctctctccacatcacaagtcgccttcctcctccgcccccgaaatcccctcgcgaaccagagaaacctgaggcaccaccatcaccaccaccgcctccgcctccgcctccgcctcctgcgcgcgcggcgaattcgggggaccctcgcgctcgcgtggggtgtgggtggggggagagccgggcgtcgccgtcgccgggggggggggagggtgctcggattcagccagcggcgggtgggggggcccgcctctttcttcttgggggggcgcggaggagaccccgcccgtcctggattccgtggccgcggcgccgattcgggcgcgggagccccagcacggtgagattttcccccgctgccttgctgcactgtgagaattgccgtatctatactgtactagtttgttgttgttgttgttgttgatgatgtggctgctcgctgttgcggaaacagtggaatggatgggggtttgggatggttggggtttgacgagctgggcgggttgaggcgggaggagggtttgcttagggtggaatctgattggccgcgatcggcacgggtgttttggctgtatcctatagcgtgaaaaagataggaaaattactggttgtatcactttttgctgggtcaggtttggatagaattcaatcgtgttttccctccatgtcttttatccgttgaaatggtgccatatgaaatgtcaggattagttataaattctggttgcacactttgtggacgatttctgttatttgagtgggttatttagcgattatgtgtccgcgaatataatctgtactgacgtaagagcagtgaattttttttatcactcatcacagtgtgtttttagctggatgataactgagagttttgttcctgttattctgagttcagcacccgattattcataagtccaaatgatattttgttgcttgtgtatttgtctaaaactgtgcttgtggcgtccagccagtcaattcttgtgagtattacgcatttttagtgctatatttggcctgatatatatactatcttgagtaggtattatggtgatgaagatggaggctgatgaggatggtgccaatggcggaactggtgggacatggactgacgaggaccgagcgctcaccgccagtgtgcttggaacggatgcttttgcttacttgacaaaaggaggtggtgccatatccgagggccttgttgctgcatctttgccagtggacttgcaaaatagactccaggagcttgtcgaatcagatcgtcctggtgctggttggaactatgccatattctggcagctgtcgcgcacaaagtccggtgaccttgtccttggatggggggatggctcttgccgtgagcctcatgatggtgagatgggacctgctgcttctgcaggtagtgacgaggccaaacagaggatgcgcaagcgtgtgctgcagcgattgcactcagcattcggaggtgttgacgaggaggattatgccccaggcattgatcaggtgacagacacagagatgttttttctagcatctatgtactttgcatttccacgccgtgctggtggccctggtcaagtatttgcagcaggcgtgcccctgtggattcccaacactgaacgtaacgtatttcctgccaattactgttaccggggataccttgcaaatgctgcaggatttagaactattgtgctagttccatttgagaccggtgtacttgaactgggttcgatgcaacaggtagcggagagttctgacactctccagaccataagatctgtgtttgctggggcaattggcaataaagctggagttcagagacacgaggggagtggccctacagataagtcaccaggtttggcaaagatttttgggaaggaccttaaccttggccggccttcagcaggcccaggaactggcgtgtcagaggcagatgaaaggtcgtgggaacaaaggactggtggtgggagctcattgctccccaatgtccaaagaggtttgcagaatttcacttggagtcaggctcggggcctgaattctcatcagcagaagtttggcaacggtatattgattgtgagcaatgaagccacaccgcgcaacaatggaggagttgacagctctactgcaacacagtttcagcttcagaaagcaccaccacttcagaaactaccacagctccagaaatcacatcagctagtaaagccacagcaactagtgagtcagcaacagttgcagcctcaagctcccaggcaaatagatttcagtgctgggaccagttccaaacctggtgttttgactaaaaaaccagctggtattgatggggatggtgcagaggtggatggcttgtgtaaagacgaaggtccgccacctgcattagaagaccggcggcctagaaagaggggaagaaagcctgcaaacgggagggaagagccactaaatcatgttgaggccgagcgccagaggagggagaagctcaaccagcgattctatgcactgagagccgttgtacccaatatatcaaaaatggacaaggcatccctccttggtgacgccataacatacatcactgacctacagaagaagctcaaagagatggaggtagagcgagaaaggcttatcgagtctggaatgatcgatccgagggatcggacgcctcgacctgaggtggacattcaggtggttcaggatgaggttctagtccgagtgatgagccccatggaaagccaccctgtcagggccatcttccaagctttcgaagaggcagaagtccatgcaggggagtcgaagatcacaagcaacaacggcacggccgtgcattctttcatcatcaagtgccctggcgccgaacagcaaacgagggagaaggtgattgccgccatgtctcgcgtgatgaactcagggtagaatcagttggggagtgggcgccaccggtagaggcagctttacttcgttcgctggttgcagacaagcagcaagcagtcggttggacggacacccatccacccacctttcagcgctgttgatagaagaagtttgtaggcagagaaagaaagctcagattctgacttagcgatccaaggggaagacaaagctctcaagttaaaactgccattgttgtatggtaggcttttgtggtcggtgtagtttttctctttttgttgtttattggggagaataccatgttcttagtttattgcttgtggcagaaccataaacagtacatctcgtcaaatgcatgagttgggaaagaagtcacctgcttttctgctaattctgtgtttttgtttgtatctcaagtgagttggtgtttatacttcggcatg

SEQ ID NO: 9741 - DNA, 5746 bp, Oryza sativa
acgagacgaggagagagaatgagaatggggcctctccatctccaatctcccttcctcctctggtcccctgcgcctcctaccccaccactcccaccttctcctccaagcaagacgcgccgcccaccaccgccgtcgcctcccttctgcccccacctctccgtcccttgcgtcgggctgccattgccgccgccatgccctccaccgcccggcgccatccggttcccgctctggcatggcgcggcgacgatcccggcctcctccgtgtgccgttcggtgaggggacatttcgtcgagcacctgccgcacgtggaggggcgcgtgcccggtgacggtgagggcgcgttcgccggcgtcccgccggagatgctccctcccaagaagaggctgctgcggtaccacccgtacgcggcggcgtggacgatccaggagatggcgaaccatgccagggaacagggagggttcgggggcaagcggccggctgttcctactcctcccggcgtggaggaagacgacgggctgcgcgccgagctgcgccgcctccgcatctcgcggccggcgctggtgctgacgaagcggctgaccccgtcggaccgcagccgcgagaaggcccgcctcgtcctccccgaggggctggtcaggacgtcgccgctgctgggcatgctgacggcgggggagcgccacctggtactcacgggggacggcggcggcctccccgtcccggcgttcgaccgcctgggccgcgcctacgccatggcgctcaagcgcgaccgctccccgacctgccgctcctaccgcctcacggggcagtggtcgctgttcgcgtcgcgccacgccatgcacgacggcgacgccgtcgaggtccgcgccttccggccccccgcgtggcaggcgcgcctcgagtcccgcggcgagggcggcctcggcatggcgctgctgctccgccggccccgaggccagcccacgccgccggcggccgtgaacgacgccgcgttctggagctaccgggagcgcggcgcggcggacggcctcctcctcctcgcccgaaccgctcctcgccgcggcgacggcggcgtgcagatcacggtgccataggtggtcaccggacgccatgatcttcatcatatgcaaattacccgataaagagtataaacttaatcgtgttttaaaaccaattacaaaaaatgcgaggccttggttcaggtgatcatcgatcgatcgcttgccgctcgatgcaatgtgatgttttggatgtcacctgggtcatcatctgatgtaaacaagaaggttttttggtgtttagctttgtaagttaagagtgatcatgcatggtagtgtgagtgaagaagggtagattgcacattcaactaggacagataaacataggtagatctatatgaaatcgccttggtttttgggtgtacttgtagtgagagagatgtttccatgtgcatgtatgagatgtttccatgtgcatgtatgagtatgattggtggatgatgcaccctggattcagtgcaaaatgtttatcatttcagattttgatgttaagcttgatttgctccatgtattcagagagtagaaacaaagatacgtacgtcgttacacatgacacttgctatgcaccctacgaagtaggaacacgtcaatctcgatcgatcatatgtacgtacatgttaacatgagattgcggacaaccttttgatgtcttaagagccttgagatggataggcatatatctatttaattcatcatcttggtcaacaggttcagcccagtccagtcctagcaaccataagctaattatgtactacgaaataaaaaagagagagaaagatattaacttctctgcagttaggcaaagcagactaatccatccactcatccaccacttctgctgcataacgggcgcctcctacaggcgcagtagttgttgcaccagagctcttcttcaccttctcggcgaggaacttggccgtgtcggcgcccttcacgttgaactccatcaggagctcctcgaacagcgtcttgaggttgtcgttgaacgtggggcgtctactgacggaatccaccttgtccggccgcggcttcagagcggcggcggcggcgctggcgctggcgctgctggtggatgctcccgcgtcgccgtactccggctccttctcttcggggaccaccgatccgaccttgtggccttccatgtagtacctgcatgctgccaggatggtgtgcccgcgctccctgaagtggctggtaacaaggtctgcgaagtgctgcgagggggcaaagagaggagtgttaaagcggcttggaaacttgatttctgttctactttgtgatgttaaaaattggaagtagggttggtaacataatccagcaccaagctatagtcaaatcaaatcatgtgtgtttattcagcaaacttctccgtttcatcctccacctataatcattattttcaagaaaaaataacctttaaccctccatcaatctctatgttctgcgtgctaaccataatcagtactccctccgtctaaaaaaaatgcaacctaggataggaatataggatgtgacatattctaggacaatgaacctagatcctttcctaggttgccttttcttttgaacagagggagatcctttcctaggttgccttttcttttgaacagagggaatacttctatatggcaattgtggcaaagtactgccatgtcacaagcattgtttactggacagggtttccaggttgcattaaagtgacaaatatcctttcttttcagctttagagtctatgcaaaaattaacaaaaatattacctctggaggccgccgaagtgagtagagcatcgtcctgcatgagtgcagaaatgtgttgtcgttatactccatagcaatccgctctccagatacactattggcgtaggatgcatatcctggctcattgaagtagggcttctcattcaaaatgagagcttgaatggagacgagcacttgtagcatggtcgactgagatggattccacgtctcacaaccactacctgcccaggtaccagaagactaaggcatacttttccattattgtataagtttgggttaatccgtagtccgccagagtggtagtatactgactgcaacatcatcaacaacaaatatttcaacaaaataaaaaggtgaaaatgtcataaaagcagtgctgagacttaggcacatactggaggattagcagggtaagagttactaaattgaatatcaaagaagaagagcccatcgtggtacggtgttcccttaggtccgataatagcagccctaagaaggtccattctatcttcagcaacacggacataaatagatgctacataaaacaaaaataatcaggattcagatttctacaatgagaaaatacactgcaacaaagaaagctatagtttgtccaatttcctctaaagtttttttcctgatatgttcaacatctatgagctatgaatggtgagtgacaggatgctaaatcctaacataagcatcattcactatttccaaactcactgcaggattcccaagaatttttacagacaaaaggcaggtgatcagcataatgtaaacaacatttggaaacaaacccaccacaggattcccaaagatattttacagacgaaaagcaggtgtaacataaacaacatttggaaacaaacttgagaactgatagtgttataagaaaaatcaaatctggtccttcttataaggtgcactttaacaaggctcaaagatgtaagttctaagattgagaaggaaaatagctttagtaccctcactagatagtagtaaaagataatggtctgtgcaggcagacataagttccacagtgagaataaaacaataagaggaaatgaaaggaaatagcatcacatctacatgaagccttatcaaaaggacaggatgaaatactagtttctcaaagggaaattcaggttacatatttaaaccatgaacagttgtgttcaacttacatggcacttacatgacgagcatatatagtcaataaaccaaatagtgtaagcagcataatcaatgcttgtgctggattattgaccagcaaactattagcactaattgcatcaaaatgcatggttagtgtgaaaggggtacttaacgatcaactcacaggtgcagccatgcagagaagaaactaactcactatgccagtaggcaaatagctaacctggtagatctttctccaaaagtttccagtcatgctgaatcctcttcacccagtctctctttgtctaatataatgtaaacatggaggaaaaatgaaataacagatctaaaacaagcataaaacaaaagcaaacaacaaattcaacatattaccacatcccctgatgttgctgcataatgatgatcagagaaatttttaacagtgtcaaactgtttgaacaactgagatttatttgcacttttatttgcgctttcatcttcaactgtcaatttggaactgctttgctcttcgttagttataattttctgaagccaaggtacagtagcctccacgcctggaggcaaatccaaatcatcaaatttatcagcaagacgttggttgaagtagtcaccgccatcaaattcataatcatatccatcgccatcatcataaatgcaatcgtcctcgtccagatagtaatcttcttcctcattttctccattatcaaaatctcgaggctctggttctgacatttgcaaagaattacttgtgctcaatccaacttggtcatcagaagaaccctgttgaataagtatgttattataggttaggctaaccagtacttgatgatgtaaaatgtattgactctccactactttcctagttatgacaagaaaagtcacaaaaaagtaagaccggctgattagaaatccggctgactctgcagcagacagatatctatgagactatgaagtgtgcaaataatttgtattttgggtgttttctccagccacttgttctgaagatgtgtcatccagtaggggtaaaagcttcaattgaggcaaaagatatagttttcacttaaacatggggcaaataatagatggcctactaattaactttggggaaaaagataaatttcttcaataaaatggttgtcagtcctcaaagagggaagataaaaaggtgctggtgaaaattgtggagattggagaactgtagttgcacttcaaattatttacagaagccaagatcagagtaatgacatgttatggctggtactgcaccaatcaaccccaaaaaggctagatgctgcatgaatgaatctgcaagccccttgattccaaaacgattaatagattgactacctattatttgaatgttcttaacccctaaatcagtcgaatttccgattatcagatgaaaatacaacggattagatttgcccctccaaacacatagactcaaacagtaatcccacctttccccaatccactgagccgccatcgcacacaatccccaattccccatgactcgcactcgcgagacgcttggcgagcgcgtctgcctgtaatgcgccataggtgccagcaccggcaagccagcaagccattccccaccgcagggccactgcccccacgccgctttcttcctcctctccggcatcaccttcttcccctctggtagcctcacgcgacacgagaactcaacggaaaccgtgtgcgggcgaagaccactaccaaaaacccaaaccctagtgccgaggatcgaacct

SEQ ID NO: 9742 - DNA, 14398 bp, Oryza sativa
ctgcacccctcattctctctcctcgtctcgtctcctcgtgagatgagatggtggcacttggcacccacgccttcagccttgttgttcttctctttgagggggggggggggggggggggggacaccaccattgcaactataaagattagcacgtataacgatggtagtgttgtctcgccacgtcaggtgagacggtgcgtgtgaaccggttttgtatctttgagacgcgcatgggtttatttgtaggtttcctttttaaaaaagaggtttggaaagatctaaatgttgctaaaccgagcgtgtaaagttggggttattgggatggagaagggtggtagtgtgatatggtatgcgcgagaaaatccagcgaggatgtgaaagctagcactggccacgggtagcacctcggattagagcgaagcttatcgggtcacatttgtctggtgcgcaatagaaaacaactccgacacatcactcaaatatgagggatagatcatatgcatcggtctgatggttattttctcagtggaccccatatttaatacccaaggtgatcatataaaacttactttacggtgctctctaatctaatagtgttgtgttacaagtagaaaatgatccaggttgttgatttctaggctataatgtatttccctacatatatgctttagacattttgatcatgcacataacctctgttgcatactgattggcgatacaacaatgtaagacctcgcgatataggttactctagttaaagttactaatacattgaatataaaaactcatcatatctcgaatatagtgctaggattttcaactctaaaaattaaaactttagattttagaagtccatcccctaatgaaaattataaggttacttgacaaacctatttttctcatgggcagactaactcatgaaccatataggtaatagctttcattcttcctccttccttttctctacgtgacgaaaaaccatcaatttctgaagagcgtatattcttctattatactccctccgttttgagttataagacggtttgacctatttcaagtttgattaagtttatagacaaatataataatatttataatactaaatttgtttcatcaaatcaataattgaatatattttcataataaatttgtcttgggttgaaaatgttactattttttctacaaatttaatcaaacttaaagcagtttgatgttgactaaagtcaaaacgttttatagcatgaaacggagggagtagtaagttatatccctcaaccatttcacttcacacatgataaatatacatgaaaggaaaacatatatcagaggtctcttatcttatcaccgaattacaaaattatccctcaactagcagaccttagatatttgggttttcggttgaaggacggttttgtaattcggtgaaaagatgagggatttcaatgtactttttcctacatgaaaaatagaggaagaagagaaagtcaaggcccaacaaaacctgggcacgagccaagcccaaaaaggtagaggccctaaggcccaacggcccaagcccaaaagctactctcgaatctcgagctagccaagccaagccaagccaaaaaaagccctagccgcctcgtccccacccaatcctcctccctcgccgctcgccgtgctcccgctcccgctccggccggcgaccaccgggaagaggagagctcgagatgagcttgcggccgggcagggcgcaccccctcgccgcgtctcccctccacaccccgctccctgctaggcctaggccccagctgaggctgagcacctccaccagctgcgccgccatgaagtcgtacaggctgtcggagctcagcgacgccgaggtcggcggcctcaaggcgcgcccccgcatcgacttctcctccattttcggcacggtgagatagagacgagatggagagagagagagagagagagagagagcgagctacactagccgtggtcactgcgtgaatttgtgattgattgtctctcaaccattgggcttagtcttttttttcttttttttgggtgcgagtaggtcaatccgattgttgaagacgtgcgcatgcgaggcgatgctgcggtcaaggagtaagtgatgatgatgatggtgtagtgttcgatccttttggaccatgtatagcatgatttttgtattgacttcctgggtttggtttgctcagttatacagtgaagttcgacaaggttgcactcgatgatgtggttgtgcgtgttagcgatcttccggatgtggaggtattcaccttgtattagttatatgatgactgcatgtgagtgcttggtgccaaacttgtgttctactagtatagaattatgttgtgaactctgtgtacttgcattcagagccttcaaatgctaagtgatagttgcgcctaaaggcgttaatttgtacactggcgtaccgggggatgggtaaccatgttttcattacttactggatgggtttcagttgccttacatgtgaatcttgaatcttgtagcttgatccagctgtgaaggaagcctttgatgtggcatatgacaacatttatgccttccacgtttcgcaaaagttgcctgaaaagactgttgagaatatgaaagtaagacccatttgttgatcccatttagctctaattccatccctgcctttaccttcctctcataccttttgacttgtgaactcttccctggatgtgttgaagggtgtaagatgtaaaagaataacaagatgcattggttctgttggcctttatgtcccaggtggcactgcagtattgccttccactgcattgatgcttgctgtggtatggtcatgttttcttaaattgtgttaactcatcattctcttctcattgttttttacaatttaatatagtaaatctctttctgccagcctgcacagattgctggttgcaaaactgttgttcttgccacaccccctagtcgtgatggtagcatatgtaaggtacaattttattggatgcaggattgctgctatttctgagaagttgatatgtttgtgtttctaatgttgaattatttggaatcggttgttgctcttgtcctccgcaggaggttctttactgtgctaaaaaagctggtgtgacacatgtattgaaagctggaggagctcaggtaggacatttgatagttcatagtactatcttgtgttccccaatatggcgttgagttaaattattgttgttttctttcaggccatttcagccatggcatggggaacagtctcatgcccaaaggtacttggaatcttttgttctgtaacttgtaggggctatttttaggtgcaccatgcaggggataggggctgtggtcttctctttactctatatatgattgttatagaactgcaaatatgagtatatgacttaaccagcttgagcagtttttgtgattgtattctgagtggattcgtattcttctaatacaaactagggaaatacatatgcactattgattctgtttggctggcttattgtcactagtgttaacttagcagacttcagaaatgctttagttgcactagtatttttctgtactcatttattcataacaattgtgtcatttccattatttgtggtgatcaacttatatactgtctttgtaggttgaaaaaatatttggacctggaaatcagtatgtcacggctgcaaaaatgattcttcaggttctattctgatcattctgtaaaatcctgaacaatatctgccctggtgacaatatttttcttgtttgatggcagaacagtgaagccatggtttctatagacatgcctgctggcccttcagaagtattagtgatagcggataaatatgcaaacccagttcatgttgctgctgatttgttatctcaggtatcttctattcttaataccctgcttcatactggtgaaatgtgtacttgttattgaacttcctttactctttgaaatgccatatttgagaatctgaggcataggaattacatgatgtcgtgaagctttgttaagtatcatattatattatataacagttgttcgttcaaaattttaggcggaacatggcccagacagtcaggttgttctagttgttgcgggagacggtgttgatttgggtgctattgaggcagaagttagcaagcagtgctctgctcttcctaggggagaatttgcttcgaaagctcttggccacagtttcactgtttttgcgaaagacatggttgaggtaattcttcattcctgcccactctcgaattatttataatttgtaaggcacgtactatacatcactggagtttgaggtcgtagaattttgcagcatgcatgaaggtaaatgaaaattatctgatctattgccgttcccagggattgttgacaagccccctctttcttccttatgtaggcaatttcattctccaatatgtatgcccctgagcatttgatcatcaatgtaaaggatgctgaacagtgggaggatcttgtcgagaatgcaggtataggcatacctgtcagcgtcttaatcttgacctgaacattttcatacttcaatggtaatctcaggcgatcgttttttcatcacagggtcggtcttcttgggacaatggaccccggagagcgtgggcgactatgcaagcggcacaaaccatgtccttccaacctatggttacgcaaggatgtatagcggcgtgtcactgaactcattcctcaagtacatcactgtccagtccttgtcagaggaagggttgagaagtctgggtccgcatgtggcaaagatggctgaagtcgaaggactagaggctcacagaagagctgttaccctcagacttcaggacatcgaagccactgtaaccgtgtagatttgttaccatgattgttctaggggccaacttggatgcagagaacaagaatctgtgaacaccctaatgagaagggatggtccagctgtttctcgaaataaggctcatccattttgatacatctttgaatataaagtttgtttgattgtgttacactttcaagtattcaagaggacgaaatctgtgaagactgtaaggaaaagggatatgatccagctattactcgaaataaggcccatccattttgaatctttggtccgtctattgaatgcaaagtttgttgactatgttactactactactcaagtattcaagaggggtaaacctatgtgcaaatggtatacaatttcagtataaaaatattgacagcagggtttcacttgcattatgtttctcggtagataccgtgatgatttgcacttgataatgccaatctaggtataacatatgtgattttacatcagcacaagacatcaaaaattgcaagattatacaatgtccatgttctaacatccccagtgcttatctatacacataagtgaagcggcatacgcagtctgcagtctataataatctcatcatctttgtaaggttagcgatcttaaatcaccgaaacagctgccattggcaggcatagcggtctagtttttaactccggaatcccactcagcttcacgatagagcagtttcgacggtttgatgaaggaaaccgggaggcgacattggtggcatcgcttcttcctgggcatcaaccatttctaggatctttcttactgtggcttgcaaatgatcaccttgggttatatttggatgaatagactccttgtttttgagatccgtatttgatgacttaaattttgcatgcgcttttgctgaagttaccgcggtggtgaatacgccggattccttgagaccacgaatgatagcctgcaaagatgaatcattcaagagatgagttgctgccttcattgttgagataaaggtactcctaatagaagttcgagattgtgacttgccattggggcatatatgcgtgtcaacacacccttcctcaaaagcttcaaattggtatctttgtcgttccataaaacatgttcccggaacctgaagaggaagtccgacaaatacaatctttagttaagggagagaagtagggagggtgcaggctacaggagagaaggggtgtttaccagttcctcatttcctcctcggtagctgttgatgcaattataaaggcctggcatgtaagagtggatccaaatttattagtgttatcaaactagctgcttacactgttacacaattagctatgctatgcaatgtcacaaacaagttatcccattgcaggctacaacagttgctcttggcaaagctatgatagagagaatgcaaagagcatcaacttctcattcttaagagactgttattggtatcatacaacaagaagtcgaccaacgttacaaatgaaacgaagggaaagaacacaaataaactcaccaatctgtcaaattccaagataaaacatcgcttcacatcttcctttgtgggcttgcagccacacctatccctccttgaagttaagtctgagaactttgtgtaagtgtaatgcagaatagcagcttcctccaacttgatttcactacatgaatatataactgatgactaaaatgaccagaagaaacactaaaatttgtcctctgaacaactttagttttataaaaaatatatgtcaatgttttcagatgtctgtcatcttactttggggttttcatgtaattatgccatctatgagcaccatttggacgcagatgctcctgaacccttgctgctgatttcccattaccgtaagtgagaaaatagtttggattaccacgcgttgcttctttgtataggccaaaatatgtatcctttggaagatgatcataatttttcttaaacatggaaacctgcggataagaaaaactgataagaatttacagagaatatgatggatgatagttgagctatgaaatctgtagacaacagattttggccagaaaattaaacaacagcttgaagcacatggacgcacattattgatcatgcacaacttacaataaacaatcaacaaaatatgtaatgaagctatagaagtcgcaacatagatagggttggtgtggaaacagcaatatggactattgcatattaactagtctccatcaagcaacaaaactttatcctcatgaagcttttcttcttttgacaggataaacaaaggggaattagttttaccttccaaagtttcaccagtttaaggtttcgatttcttagcgcaatgcaaagtgaaaggtaacactgtgactaaagcaggcaattctgaatacatactttaattcttctaaattttaagcatgcacctggcccagtaacaagggctcttgctaatagctgccaaaattggtgagcttctctccgatttgcttcaaattatgaagttctaacaacacaacaaattacaggcgaaatcttgtctactacaaatcccgaaatgctacagcctcacaaagtgttttcaaaattctagtgatcaatttttttctgtggagaaatattttttgcagtggttttcattaaatcatgccttctattgtggtatatgggcaatattttcctttacttttcttacttttatttgaattagtaatagcttacacacctctgtgaaaggatctttgatgtcatctcgctcaatgctgctctcctggggaaaataaataaaaattagatgtgaaacaggctacatcctcaacagaaaatttattctgcaactcacatagttggggaagataaccatgtcaacattatcaggaacatctaaaagcaatcgcctcagagagtactcccgggcaccagctggatgaattagctcatcggtatcaagatgaatgatccagtccatgccagcatcctacgataatcaaacagggagaagctcaaataaagctaatcaccaaaaacagggtttctggagaactaaacaaacaacatcatgcaaaatgccttcgtgagtaagcatattattataatcttgtgtgccaactgccaacaacggttgatgtaaaccacatcattcatatggcattggcacggtagtataacatgttacaattattgggatttcttaactttttgctgctagcagtagcaattgggctaacatttatagcggaccgtgaaaaaggatatgtgaattattgattatgatgattaactggtgtgtgtatttgtttttttttgtcaactttacatgcattagttgtaccatcccattactcaccctacacgtgagtgagaagaaaacaatataatgacaaaaaggttgattagttaattataccagagatattccccttttgttactgtagtattgttacacaaatcacctcatatcttacatgtttgtgctgtattatgctacacagttcaacagcgaggctgaacatgatatggtgataattatggttccccttagaaattgaggggaaatagcatggaggtagctgaaaaatgggtaaaacaaaaaggctatggtgcttttgaatcaaaattgtgataattatcatttcacaagagcatgattgtgaatattgaatcaaaagcgcatgaacatgcaaaacgaacagttcatacccttgccataatgatagccatttccatgttcagcgactgtttgacaaatagttcataattgcacggtttgtaaaagaaacctgccagccaagtctcattccaaatgcgactgaaaatgttttaacagtagaaattcagaccacgaaaaatatcaagaaaaatacaggtaaacttgttagcaacatacacatatttcactagcaaaagggaaacaaacatacaggacccaaacaacatgaatacttcagaaataagaaattgcaaatcttgtaaaatgggttcgatcaacaaaaatgttatagaagcaagaaggtttggttccatctttactactagaactcaaccacatcatttgaagcaaacagtataagacttaatcactgcttttctaatctatatcttgttaaagcagtgtcctagaagaattaaattttagattgtcagtggaccaatctccaacaaaacctcatcttttacaaaaaaaaactctaaacagcttctcagtacatcacaataccttctgtcctgtttctctttcaattctttagttctgtaaatgatttttacaccctaaattagaaacaaaaagaagtcagaactagatcctgcaaaagtcatacaagtacagaacgaaatggtgcagagttgtttacccgaatggattcaagaactgaggtaacagctggtttcgcagcctctccttcaacaaaaaggaaaaagtgtgaaacaccgatgaccttgtggtagtacaaccatggaagaatttggtgtaaccctgcagatgtgcttcccgtgatacagatctgcagaatcatgaagatatattcaggggcataatcagttaacataagctcatcccatgataaacgagactcgcataccacattctcacaaataagacaggattaattttgatgttcagattacaaaaaagcgaacaattgtacaaccatagtagggtgcatgaatcatagttgcaccatccatttcaatgcaaaatacaagatgttcaaataccgaaattttaatggctcacacaaggaacatgcaagactgcgaatcaaccaacacccacaaaccctgtcaaccaaagttcttggaagaatgcaccaccccgacattgctctgtgtcaaacacgtttcctatctctgggctacagaattcggttgaaaaagacaatctctaagtgaccactaacctctaaaatctaaatcacatcaaataggactcaatttgatgcagtagcgaaggagcaagtcaggaacacaacaatctacaatctacgacaaataaatcagcattgaagcatcaaaatactctagaagataggaccttgcccgcagaacaggcctacacagaaagcaagagtacttaaaccctagaataaccatttgatgccatcgccgtattgcccaaactgcaaaatattgctacattccacgaagatgactatctcatcctcgcaggacagaaatgcgatctcaccaaaacatttcaggctacttttggatctcttaatatcgcggctttcaaattggattcacgtctaaagcaaagcgcaattcagcggcacgaggttcacatcgaggccgctctggagacgagatctccacgcgcagatcagatcggggagcggaaacctcaccttgggggttagtcccgcgtcggagtcgaagccccacccgcggtagagcgagatgccgccgtgcgaggaggacgccgcgctccggccgaggatctcggcgcagtctgcggccgcggaggaggactgcgacgaggtgacggcgaagtaggacccgcctcccccgcccccgcccgaggaggaggaggaggatccgagcgggctgttctccatgccggggaacctctgcgtctccgcgggccacgccgcgcccgccgggtcgcgcatcccgccgcgccactgcagcgcgaaggcgaacgcggccagcgccatcggcagcagcgtgaggagcagcagcacccgcgtcgcgaacgccgacgccgacgacgcccccccgccgccgccgcccgaggcggaacccccgccgcggtatcccgccatggcggtggttggttggtggactggacagagacgccttcgccgcttttagttcggttgtactctctcccagcgtcgcacacgcgaagacgacgagaggagtgagaggtgagaacgagatgttgggccgagattaatgggccggatgggggtaagcagatgggataagtttactttgggtcactcatcgtggtgccgagttctttgaaccgcgatactcagatataatgcatttctcaacttgtaataccgaaagtagctaaggtcccagcctcccggggcaatattatgtctggtttttggctgacgttacgagttgattgtggttaacccggttggagtcaacatgacagggacagagacaggagtagggcaggttggccatactcctgatcctaaataaatattcattgaaattccattttaaaacttcaaaaactagaagataaagtcaaaattatatacattcaaccaattgagccctaggtttggaaaaattctggctctgccactagaacatgggatctacgtgttagagtatcctcaacagctcctctatctagtcatccatccggtgtttggcgcatggaggagaaaaacagtgctccagcagagtctccattgcacacgccatttttagaggtcctccaaaccgagcccttcccaagccaaatatggcggttctctctcctcacaccatcctcaactgcttacctcacaatcgaactcgcgccaccatctagactacataacgcgagagagtagcagtaaagaggaagtgcataccggagtagaggcggagaggtggtggatctggaggtggagagaaccggagtagaggcggagaggcggcgaatctggcagcgaagaggtgtcttcccactgctcttgcgaccgcgcctcccctccgaccggccgttcctcggatcgacgccacccggccatccccgccgctccgagtcaacgcccgcgccgccactcctctgaccgcgtcaccccgccgctcctccgactgtgccgctccctctgaccggccgctccttcgactcatgccaccccgccgccctcaccgctcaggtcttcgcccgcgccgctccccccgatcggcccacgtcctctcggctgtagaagagagagtggtgaggaagattttttttaagtggtgaaaagtgagaggaattgagtaaaaatatgtggtggttgaaaaatattaataaaatataggatgttaatatatggagaatgtaatatggatgatctgttgaagtgaaaagtaatatagagtgagaatctttttggatagccatctaattagaaatatggaagttgaaatttagatgagctgccggagatgctctaaatagaaatatgggataagcaaatctgcaagcacagtacatttgtctacaaccactttgctatcatcaccaggcaaaaaaatgaaaaagggaaaacttgtgaatccaatacacgatcatggcgatagtgcagtgccatgttacatgtctccaacaccatgacctaccaacagcctactctgctactcaccccacatgcactactctgctcacctgtattgatttacggcaaatccgaaatcagcaacgcacaacagccagggtcccagggaattctaaaaagaaaaaaaattactgcactgccccatgcagattttacaagcactgcgtatctctaccttatcaacatggttttttttcccgagaaatattcggtttcctagatgccacagagaactatgaattcctatgtctttctatcatttctgtgaagggatagatcaggtatctgaagaacaccaagaccaaaacgttcacttcggatgtgttcagttcacgctaaaattggaagtttgattgaaatgggaacgatgcgacggaaaagttgaaagtttgtatgtgtaagaaaattttgatgggatagaaaagttggaacctaaaccagcccttcgtcagaaaataatcaagatagaaagtttgttcctgctcctgctcctgcagtcctactaatcaaaagtaacaagatgcagccatggaccaattcagatatgtacattttcagatggcacatacacacacacgtacagtggtaaatatataaatatacagatcatatgatatgagaccatataactatatgttggttagttttcagaattattagctgcatttgcacatgttgtgtcgcctcgccctgatgagtggctgtgattggcgccgcgatgttcggaggcccgggatgcacgttgtctttgcatctggcaatgatcctgtccgtccaaaatagcaattgttttcaacttaattaactacgtgtgataattggttctgctgattattgtgccgcataaatgttagtatattagggcactgtcatgcaattgtggcaaatatattcagacatttgagctacttcttcatgcagaaataggagtacatgttttacatgtcacttttggatgaatttttttttaaaggtctagattacttctaatatcaatagataaacattgtaaaagttttatttcattcacaaaacaattcatgtaatcaataacaacataatactagttagttatagttaatcaataacagcataatacttctagtaattatcactaggattcaactttttgttttcggtgtttgtatcgggcagcgccgatatggtgaaatttccgaaatttggaaccaaaattagtcaaatttgaacaaatattaccaaaattcacgaaaaaaattttaaaataaaatttttggccaaaataatatcgtatccgggggggggggggggagtccgaaatgactgaaatatccaaaatttcggtccgaaatgtcaaactctagctatcaccaccatggcataataacgacctaaccaacgggagtatttagcaacctacagctagaagaggcactgctgatgtttccttagtgatcagagcttgtggttcaattttcatattatcataatcatagcactgtcatgtaaattgggtagatggcatacatgcatcacttgctacatcaacagtgacacttgctactatatcatgacacaatttcttgtacacactacaagcaaggacattcagggataacaagttttcttgccagctatatcaatccaatccatacggtgtgggtgtcacttgggctaaaccttaataaagttcaactcacccactaattacatgctactacctggattgtttataaatatcagatatagtaacatttgactaattaatttgagccgttgtgttaattttcaaatgtcttgattttctcggctttacgaatatatcgataagcatgttgggctgattgcgttgtgtatcaaacactctgctttcttctaatataattgacgtgcaattattttgtgcgttcgaaaaaaatgaatatatcgataacatatttccatgacaggggagcatgggttttctaagtttttttttaataaaaaggagatatggacaatcagtgagatttgaaattcataattgtaatgataactagtaaattcaaatattcaatttatcatcatgaggtaattaggcctgggaaccatcaatctctattcttgagccatacttatggtggtcctggtctcctagccctgtgccccccctggacttcctggcttggctaaaccaccagaccaaccaccaacacatcacaatcattcaagacaactctatgtaacttgtccaactaaactccaaaaagaaatgataacatgagatcagttttatcttaaaagaattgtttgcac

SEQ ID NO: 9743 - DNA, 24547 bp, Oryza sativa
gaactgcatatcaagatcttggagtgttgaatatgcatttagaaatctctcaagtggtcttggtccaataacaagtaagggcttgtgaggtaccccttttaacaatttagacctcaaagcaagaactctagctacacctgtgtggtgatcagcatgaatatgggaaatccaaatacacttcaaacttttcacagcatcatcagcaccacttacaccaaacctataaagagaaagtgtcatgacgacaaatatgaaataacatgcatttctcaattacctaaagaagtatgtaagaactaaccttcttttcaattgccctaaggttccttcaccgcaatcaagaagtatacctccttgtgtaaacaggttaatatatatggaacttacgttccgatattttgaaggttgggatgaacccgtacccaaaaaggtaatttccatatcttctcttgttgcattctccacacagcaagggatatcaggagtgtcctttgggtgctttctccagccacttgctctcaatggagtgccatcttgtaacttacctgaattactattttcgtctacaaaattacaaacagaggaattctcagtaatccatggctcttcaaccatgagcatatgcttgccaactgaattactttgccagaacttgctaatctgttcaggaacttctttaatctctgggatctccgacaagagctcatctacaatatctccataagtagtaaggcttggtatagacgatctgtccagccccagttgagcatatggacgcagatgaaactgaaaaggagaacccactaatgtaataaacggcattgcactgaactaaagaaagtttaaccagcaactggtcacatagatgatgcaaaattcttatgatttatttatctctccttcctcctgtcagcttcatttttatgtagtatctttcatgagaagaatttctccttctcagcttctagattgtaattgtgtgccatagcatggcgtggaaaataattgcaaggtgcatatattcaagcccatgctcagagaatataagcaagaccagaactaacgtagggcaaaaagtaactgtctgtgcaaagatcatcaataaataatgaccaagacattcgtcacagcaggttattttacaattgcattgcatagaagggaaaatcctagtcatgctgctttaaaaagattggtatagtgtggtaggttgacacgttaagtttcgagacataaactattagttgaattttcacatccatatttgaaaccattttcatcacaaagtccagacatacaaataccagatagattaacagaaacgctcgtgtgataagtgctaacagggaaatacagtatggttatagagttagccatacctttagaagattagccgctgacacactttcacaggcttgcaatgaagaaacctaaaagtggtaagaaaatttcatgtatataagcagaatgcatttttatattatctggtattatgtatcttactggaagctaccttattcttctctgaatcaacatcatttataggttccacaggccaaaatccagaggatgggaagagatgagggcatacaaaatgaagacgtgatgatatccttgcactacccttcaggataggaatttccatgtttttactgcacataggaggaaaaagtcccatcacatgaccaaatattagaactggatcattacaaacaagatggcagtatttgtagtggtttctgccgcgcagatcctactatatgcagatgcaccacacttgtgttcactcatccatgtgtcagcaatccatgtgcccagttggtagcaacaactgtacatgagaacgctaaaacagcataaaagtgagcacacgtggcaaaaacaccacaaatatcatcacatggattggatttaagccagatttaaaaagttagacaatgttaagtgaatgatttaagcatttaggttgaaaaattaacctatggtgataactgagggttccaaaatcctaaaacagatattatacaataataaaattaataaaatggtgttttaccgaggtggaatattatcaagaagtaccttacaagttacaatgttccgtagcaaaatcaagcaaaacttcactaattatcaattaggaactgacgaagataatacagtgacaaagtaaaacttcacaatatgcaatcacgacgtataaattcattcctggaagttacagataaattccaccaagttaaacatttctacaatatggaacttctcacttcttttgtaaaaaaaagctaacttcagatttactaacaacaatagttttaacctaagttcaaactagaaaagccaataattggggctgcatgaaaagcatacataaaacagtgaacagaactgaatcttacatttcatgccctgccatgatatgctgtgtggcaccaaattttctcatccagttctgataatcgagagcttcagtcacagaagatgggcccaagtggattacacaatttactttcttgggactccctgcttgctcagaagaatcttcataaaagcgtataagagattgcagggaaaatagttcgtgcatatgatattttgtagggcaatccaccaaaagtacagtaggtccaggaatcgacgggccaagaacatcacttggatgaacctagaaattggcaaactaaatgagctgtacacaagaaattttcatccagttatcttgtgcgtgcaatttatatctgaagtaatatcaaaagcttaaattacagaaaaaaaaattaaattatgttatcaaggaaaggacagaagatagtcaagcggcactgcttaatttagtatttaacaactttaaagactaataaaatttaatttagtatttaacatctttaaagactaataaaatattacatcagcaatctattcatgaaaatatatagtgccaccccatccacagatgaatcactgaacagcggactcaacagcctccaaaagaaaaagttaggttcccaacgggcagcactgatctacctggtggcataggctcaagcttgaatcaatgaaaaaaaacattgtaaacaaatacatgaaagaatattatttataatcctacaaatagattacagtttaaatatctcagtattcagtactaaccattttatcgaatgcatcagactgcacagagttcccgagctgaagttcacgatattttggtccaggcttgagaccaagggcagcagccttagcagggtcaaactttcctttaagttctggcagttcacatgcataaatgatagcagtattgccaggcttcaagttggagtcattcaagcaactggcttctttattgtatcttggtttgacaaacattgcggatattcgaactacttcgtcatcaacaatgacagtagcatctttagattgggaagaagatacattttgttccacaccaaagctatgtgtgtgaagcattgctctatttgggataaaggatctcattgcactagctaaaaaatctaggtcagaagggccccatatattcacctatgttgcagataaaagggaacaatacaatcagtatgcagaaaaggtataacaggatgagttggcaattaggtactgaaaagaagggaatgatgaaatcatgtgatctcaccgacatgccctcttctcctatgcctgccagagtcagaaccagtcctgcaaaaatgaaaagaaggaacagaaacaattatgtcatagatataatcacagttcagcaaataatgacagtagttcagtacatagagtgatcaaatttacctggaaggccccctgcagtttctgagcatacacgagtcaaaaatatgtggtcaatctgggaggtggagaatcaacatttaagcaagttgctggtttacaaacacaatcaaacaaggataaaagaaatatgatcaatgcattggcgagaaggacctcatacctttgataactttatcttgtgttcagtacagaaacgttgaagaccctatcagacagcaaggttgttatttagcacattaagttcaccaaaataagacatgacaaactggttaaggatgataaaattagataaataaaatacagagcaatacacacaaaaaagcaggacaaacggaactcaatagacctgagctacaaatttgcccctaaggcaactagagtttaggaacaacttgtgcacttaagaagcacattaattaaaaacataagtatgttttagagagagagagagtgatcaaataaatacaagtgctgcagatacctcgccagcattaaatataaacctctgtttgtcaaagaagagtaaaatggaaggtgaagtatcttgtgtgtccattcctgtaccaagtatctgcacagcaagaagccaagaacgaaggggtaagatcactggcaaaggcatttgtccctgttcccatgagttgatctaagtgagggggttgattaactgaacaactatctctgaggggggtgacacaaaaagtcaaaaacagctggaatgattgcattctaggcctctaggggtgcttatacctagttttctcactcttactaaactagctcgatttgatcgcttgctttgccagccagcaactgcagcatccacaagaccctgacaacatagtatttttggtcttcaacaggtaaaggaaacccagaatatacaccctacaagtgattatcaacatcgttatcatcagagcattgatgttctgaatcatttctaccaatttggtagcgggtggcattaatatgtatatcctccgatgaactttggcatcgtgacaaaatttattattttataattttcttagcacgcaggtaataagcgaacgatggtttaaagtttggttcagatgctataccccctttaaacctaagtaagacatctatcgcaatcaatttgggataacattttagcctatgcccacagttaggtcagcagaaaggcgacacatgcacattcttacaaagcaaagaaaattataaccggcatgctgaaacccaaggcaaaagatatcgcgccatactccaatggggcatgttttgtatcccaagtaagcccaggaattaaatgtgcttgctaagtcatgaagtaaaccaacatgcacaatcgccatcaaaggattgtagcaggtactaaccttgtgctaaaaggcatatatatataatcatattatcattttgttgctcgacatcgttcgcgtcttaggaaacaaaatgtatgtagcataaaaaaagcaggcaatccccgctttaatcgagctgaactgaaagctaggcgcaaagcagagcggcttaataacgagaccatcgggaatgtggcgtggtgtggggggagaaatcggcaaaatccctcacctgtacgtagcagatggtgttgatggggttgagcttgcggctcttgagctccatgctcctgcccttcctcccgtccttcccctccgcgcgcgtcttgttgaacgccacctccgcctcccctccccctccccctccccctcctccgccgcccatcttctccttgctcctcttcccgagcgtgctgttcccgcgtcggaggaggttgttgtggtggccgcggcgacctcctcctcctgcctggccgccgcggtaggcgagggcgcggaggcacccggcgcgagggaaggggaagggggagggggagaaggaggagaagaaaagccggggggaaaggtgaaggagcggggccggggtggcggcggctagggtttggaagagcggaagaagccggcgaagaggggagggcagttgcggcatggcttcctcctcctctcttctcaggggtttaagggcggaggcctcatgccgaagcgagggacggagctcccggatggattacgggggggagcagcagggcaacgggggtgaggggcattttcgtcatttgctccagatctaactcatctccatgtacatgtaggcccggtttggcacggctatgccgctacagattctcccagaatcagaagttccctaaacaaatttagtttttgtccagattctttgaagatgtagttatagaatccagaaaatgaactagaagccagaagctgagaaacccagttttactagattcttagaagtttattatctactagctgcttttcagaattttaagcttcttaaacaggccataaatatcatatccattcataatcgatttgaaatttatatgttaaattataatggttcaaaattttaagttttatccaaaatgagaacaaaatgatatattcaaaatctatcaacgtaattatggatataaatccgtggatttgtggagttaggaatattttagctcaaaaaaatcttgaatccggaactatgcctaatcatccttctggttgcccttgcaaattttccataagtatttttttcatagtaacaagttacaaaaatgcaggcgctcacaacacacacgtatatcatactcttataggcacattcgaaaagctgaaccggcatatcatgatattgatgaaattaccatgggcgccttgctgttgacggatacttcgcctatcactaaaagactaattaggtgtaaatacgaacactcgtgtcaagtttttttttcttaattacacataagacgcacgtaaactctattatataagtatttttacatttatctattataattatgttcatgtttagagagcttctagcaactccactttctcctaaatctctaggtcctccaaacaatttaaaattgtatctagattctaaccgtaagttgctaccgaatttaaaaaatagacttcaagtcaacagctaggaaatttatgtttgtcatattcttgtaggttgtttcttaaaatctcgagctatcataaacagggcctatattaccatctctttggcagccaatgagtcataacaaaataatttgatcaatctacgggaactatttcttcgatgtcttttttcacgataataaagtaaatttcagatattcacacaggtcattccacattactagctttttctttatgttacttcatccttcacaccgtcgttttgttatttttaaatctttgaaatctagattggaacatttgaggttagattatttgaaccttttggttggttagtagggtcttgggcctaacgggcctgttagtgggcttactatgcagtaatatctatgctttgttgctagtgctgcattgctggcctctgctgccgatctatccatgcatgttctgcaataattgatggaaatcggaaattagccctgacaagtgtaacgatagataacgtacgagtatttgagaattttatggttatcccttattgtttgtttaccagtgagtttaggcatgtgcttaaaattattgacaatgtatccctaatgatcgatcgcgggcatatttggttagaaaatgcttgtggatgggcgttcaaaacgagcccagatattggacgccttctactcctttgtctcctccctccttcatgttcccatctctttctctctcacactctcaccgtgcccgcccacagacctaccattacaccggctttcatcctgacatggcccaaccaagagaagttgggctgcccatgctgtcacagtcgcccagtggtgtatctagaattttagaatttttatgtggctagtccaacctatatatttttctaaagtaccctaaatataacaaagtttggagtatataataaattgattagatgtgcattataatatattaacaaggaagtttttttacttttccaaaaaaaatcatatatgtatatatatacattgggttagagcaaaaaaaattttcccaaaagttatattttttactttttttccctagatctgcctgtgttgtcgccaccatatcaaacatatcttcctccgcgcatgccggccctatccacaaggcccttaaggagaagagcaaagccaacatcgatgcatgcagaaccgtcaccgagaagaacaatcccaagtacaagctcaaacaggtgtggcgacgcgtagcaggtcggcgacggcgtcgtagaactagacgtctaagatccacgctcaaggaggttgtagagaaataaggtggatctggtcacattggagtagagaaaaaagtcactataggctcttgttagagtttaacgatttattgcatttttctcataagtattaatttgagtggtgttctctgttccgctatatgtatactagcagatgatgcgcacagttgcattaaaggcgtgtaccacaccctcagttgtcctggagttgctcattgacaatttttttttattcttgatgttgcagctagttttttttttatgctttacctattggtttattgatgttgcaggtcagtatttttaaatattgtattagctggttgcaacatttttttagcgagtgataaaacatctaattgatataattaattcttggccaagtgatgaaaatttgtataacattttgaaacaccatctaaaatagttgtccagttaggttgtgggactacctatatatttgtcgacaactcttcttaaaaaaaattgacagatataagtatagtataatcatgatataattatattgtaatttacatgtaacttaaaaaatccctcattaacatgctattcctttaaaatggtggtcatggaaccaaatcccctcacatatgcgccgccgtagtgattttttccttcctcgcttgtatgaaagttaaagcaaatcgaacgattcaaaattatatgaaagttacacacaagttacagtgtaattacacaacaattgtactacatttgcatatgtcaatttttgagagaaaatttatcaacaaatatatagcaaaattattaggttgttgccttggaaagaagcctagtctaaccgcttggttgctggttgaaaactatatatacatgtcacagctgagatgagccttatgataattattgtagatcttttcatgctgtagtattttaaatatgtcattttataactcgttagagatgaagttatttgagacatgtcgtgctcgatacgtcacaacaaaatgagaggagttatcgatgactccctccgtcctaaaataaacgcagccatgaatttctatgtctgatttttatcgcgcgtcttatttaaaaaatttttatgattagtatttttattattattagattataaaacatgaatagtactttatgtgtgatttatgttttttctttagaaaagaaataaataaaacgaacgattaaagttgtaaacgaaaactcatggctgcgtttattttggaacggagagataattaaagatccacctgcctgtgagcctgtcccaacaacgtagtacgcgtcttgagcaatatgacgaggccgtacgttacgttggtgcaagccgagcgagcgagcggccccccgatcgacgacggggccggccggccggccaccaacacgagaacgttaacgacggctaaccgccgccgctcccaacgtcgcgggccggcgtacatatatgcgtcacctacctagatgtctcagcacgcgtaattaatcgagccatattactcctatgtaattataagagattttaacttttttttctctcacactgtttgatcactcgtcttatttaaaagcctgtgtaaatataaaaaagaaaaattatgcttaaagtaacttggataataaagtaagtaacaaataaaataaataataattctaatttttttaataagatgagtggttaaacagtaagaaaaaagtcaaaatcccttatattatattatgggacggagggagtattaagcatgaatgcagctggttggcacaattaactagctagtcacatatcaatgattgatatatcctgtagctaattgattatatacaatagtgtttgaatcttccaagacgaagataaagataaaaactaagtgtttatacaaaataagatggtaataatatgtgattaattgagttttaattattataaacttgaaaaatggattaatcttatattttagaataactttcatatagaaagttttcgcacgaaacacaccgtttagcagtttaaaaaacatgccacttttatctaaaagtttatccagtttttgtttgagaaaagaacagagccgcttgatatactccatccgtctcattttaagcgtagtcatgagtttccatgttcaactttgatcgtccgttttatttgaaattttttagattgatatttttattgttattacatgataaaacataaattttactttatacgtgacttatgtttttatttttttaaaaaagaaattaaataagccgaacgattaaaattagaaaaaaaaacttaattataacaacacttaaaatggaactaatggagtatatatcatcaatagtagccgtggcagcagcagtggcaccccgctgcagtgatggccacccattttcctcaccaaatcctgcaaacctggagtagtcatgaagccactaataatgcgttgaatgcctgcataattaagtgcatacacatgcatggagtgtatatgagtaaatagtaatataggagtagtagtctgctttgcttgcttgcttgcaaccaccctaccacaccaacaagctttgatttgacagatcgatcgatgtcccgctgtgaatattcctgccgctggatatatattcattactagtatttgatgatcatgggcctgcttaattattactactaacatgcatatataattgttgggggctgctttgaacgcatgaaaactagtcactcgaatggaacatatatagggaagaaaatgtgtagggataatgcatgcagttgtaaaacaaactatatattggaaaaagaaaacatactgatccctctgtttgtataagctactagagatattcaaagtttttctggcataataagtatttatccatctattgtcttatttcaaccaatcaaagctatatttatcatttaatctcttcacttaattgcttaatttctcatctcaattgatcctaaccattttctatcttaaccttaatttttcctaaagctggctaagctattatagggacgattagagcatgcgataatggtaaataagcaattatttcatatttatattttttaacggaaggagtaaaacaaaatatagatatacaacacaagaattctaagaaccttaataacatgaaatcctatgcccatctctttttatggactacttccttcattttttaatacatgatagatattgacttgtgtacgtatgtttgaccactcatctcattttcaaaattattgtgtaaatacatggaaaagtatgtcatgctttaagtacctttaatgataaacaaataaataataaataattattgtatatttttaataatattaatatttaaacgtatgcttaaaagttaatggcgccatcggttaaaaactgaaggggtatcttaaccttatttgttatctaccttgtcctcttatccacttctgcatctctctccctccctctcctctcatggtcaaagctctatttttgacttaaggatggagggaaggggaaactttcctttgtttttcatttgctccaattccttcaatattccaattggctctttagtttttattttccttttgggattgaatgcttctaaattcctatgaaaatgcttcaatataaacatgcccttaattaagttgtgatttctaataaagaaacataattttaggatagaactttatactatatagacatactccagatttagagtgaaaatccaattaattagtgttaaaaatcaaaattagctacgccaaacaagctgccctccctatatttggccactacacacatacatctatctatttgcatctaggcttgtcttgtagccctccaaatataaaattaatggatctggagttatggagaaaggaaaagatagcttctttattattcacatgtgtactagtacttgactcttgaaaaattggaaatctagcctccgtttgatataactccagatcatatatatccacgactctacgctggtattttagttgtttagtacaacttcagatcatatatctacgcttggtatggggtttataagttaaattgtagtatttaagattttatattttatttaaaataaaaacaaaataattcttccaaatattatcagctccaccgaacaagctaggatcggctcaatagcccctagctatatctcaccgtacgtactgcatgcattatctggatcatcatatgcgcaggctcgcgagaaaagctaggacaggcaggcccctcgaaaaaaattgggaataattgtcacctaattaaaaaaatgtagctcaacctgttaggttctttgtggtgggatcaaccacccgagtttaagactttaagttctagatttgacacggatacttatattcatggctaattatttttttagtgataggttttcaaaggtacgtattcatagaaataaggtgtgtgcatgtgtattcacagaggtaactgtgcacgtgttttgagcacttcggattataccgtgtttaaaaaatttgtaactattccatgtatataactatatatatagacagagatacagggattataaacggccggggcctaggtgtttaattcctgacacaatcaatattaatgccgttttatttactgccatgaggatggtctgatacgatgagactgatcaagtgatcgatttgatcggagagccggttcacactcctgttcatcagttttacgagttgcattcatgatttgttatgttttttttttcgaaatatacagctagctgtgctactcatgtatactccgtacgtctcaaaatataagcatgtttagttgtaaatttagacgaccgctagtccgatccagatcactactacaaaacccctcataggcaccgactcatcggcaccctattgatcttttcccacctttgcggaatgaaaaaaaaaatatagaaccgacacctttgaacaattaccggtgccagttctaattaaggaaaaaccgatatcaatatccggtttataaaaaagaaccggcacctatagatgatctaggtgtcggtttttattaaattagcacctattgtataatataggtgccggttcttttaaaaaagtgacaccaacaaaactgagccgaaccacccaacgaaagtgagccgagctgatctggtacttttattttagtccaccgacacacccaacaccttatccactcggtttctctatattagtctccgcctttctcgcgtgcttctctccgccaccccctatccttccatcctcccatgcttgcgcctctctctcgtatgccgccgcctccgcccccaccgcttacgcttgcgccttctctacccctctccccttctcatcctcttgaccccttccacggtcatggtgtgcttggcggccaagttgaggggggcatggttaattttaatttaacctgcacctatgaatcaatatctatgatatattttgtaatagtgtatgcgcgaagttaattgcacatggttctcgatctctcttatatgggctggggtacgtcaatatatagaaaaaaatattagcaaagacgtagcgtgattgtgctgggtagctgggctgacagtgtcccacacggctaagcctcatcaaattatttagcagagatcaaccaacataataatacactttggaaatataggaatttgctcatgttattttttgacatgaacagtggctcatgcgatactattttctagatccgacattaattactcactaaaaccatcacccatgtgtgttttcaattagtacattactgatgatacattttgatatccttgcgaaggggtagtacatatgtacaaggccaacacatttaacacaaggagacacagcaaggacacaaattaacagcgcacatttgctagctagctaccatgcacagaaacggaacgaggacataatccaaaactttagggttgcttctctgctccgccatgacgccaatgcataatataattgtgtcggctacctgcacagtgcgcatgtttaatctgtttcttcctttcttcttcttcttcctattaagactcgcttaggtggtgtttggatccggggactttactttagtctctatatttagacactaatttagagtattaaatatagactacttaaaaaataattacataaataaaagctaatttgtgagacaatttttaagcctaattaatccataattagagaatgtttactgtagtatcacataggctaatcatagattaattaggctcaatagattcgtctcgcgaattagtccaagattatggatatgttttattaatagtctacgtttaatatttataattagtgtccaaacatccgatgtgataggaacttaaaagttttagtctcatctaaacagggtcttactgaagacatgtatacatagtgttctgatcagtgtacagtgtactgtaccatggccccaacttaacggtactgtgcacataatttcgcaagggaacatgcatgacaatggcatgcccagctcaattcgattgtaggccctccacgccacaaaattggtcctaacaggatcgttcaattgccacttttgatattctacctcatagcatattttgtagtaaaaaccggtgatcacccaatacatgtgagtatagctcgttatttgaatgatttcttccgatcgacgtgaattcgcagtggaccatataccaatcaagctgggttcgtgcgtctagcactagcgtgactatgaagtgataagtccgactcgagctagttctcaggctaattcagagcagaaagacgacggtgaacactgagaaggcctgagcatagttaatttttacaacaaaataaatcatagggtaaaacttaaaactaaagtgataattaataattgagatagttaatttacgcaatttttaccttggccgaaagctatgctgacaagtgaacaacacgcttgccgttgccgacatctcttgtacgtacataagctagcgacgatcacggtggttcaataaattaatcaagagacgagacgacagcgtatatagatcgaaaaattaatcacgaaacgacagggtatagatgaaatataaattaaacccacgcttataattaagtcggccaccgaagcagaagctagatagagctaaagaccaatgcaacaacagatcatagatcgcttttacacttgtgtgtgtaccaccattaactgtacgcgcttcgatctgtactacgaatagtagagtctctggtcctcgattcatcgtcctatatatatatatatgaacacacttaattaaacgcatatgatatgcatctgcagctagctagctgctactccctccgtttcaatttctgagacaataattccaatatataatgtgagcacttttataattgtttgatcagtgcttaaaaagggaatccaagaaactcaaaattgaaccaattagacgactttgcatctagctttatcttattcttaaactttactgaataaacctattaatacttatctataaattaatcctatataagtattcctattaattgtggttaggtgtatccacgtacgtcaccctactatatcagcaattagatgagagagtatgtgcgatatatgaatatcatatcgttctattaaatctaagcatcactggatacttatattgtcgaaacaagatttcggcaatactaaaaggaggtggctatcaagctagaaaagtggatggatttagagacaatgaattttatacaggttcaggccttcttaataagaaataatatcctactcctgtccggggattgatccgccgagtgtattattgatcgtatgatctgggagaaaatcgtgccccaagaggcacccggacccctccttatataggggaaggggtccgtagtacagcccatatccctaacggaataggaataggtagttacagataagatacaattgtaaccgactaggatcccgggtatttccttgacatacgtttagaatttaacccgagtccctgtaaagatattattttatctatacatggcaccccatacccagtcggatatacatgccgtatgggtatggggtatccataatctccacatatatcattgcagcatagctttacttttttatataggatactcttgtttgaagtgggatgccataaatcactgaccttcttcttattctctctatttaatccaggaaccaatagacacccatgccgtaaattctaagccacccttaccatttcattcaggaaaaatatgtggtggaaaccacaaatgtagtgtaaacttggaaactattgttggatcaaaaaatggacgtccgaaattcgtccacgtaatcacgagttaaaactcatgagtacatccatgagtaaaatttttactcgagatgacgtagaggaatctcagacattcatttttcgattcaacggtagtttccaagtttccactaaatatgtggtttccactaaatattatcccattcatttatcttcattttcagtttcacatgcatgagcttgatgaagaatcaagaacatatatattcctctctagaagcccatatgttttgccactgatataatcagccaagaataggtgccagtcaagaaatagattgtacgtgctctgttcatgtttcatgcatcattttgtatttttagtgtgattttcttacacatgcatcttcctcataattgcagtataatttttcctattttctacatgtatcgcatctctaatcccttctctatgcagcatgcgagatccaagaaatgctctattcatgcatatatgaagctctactataaaaacgattttttaccaacgttggctttttatttttacaggcgtacaaaaaaaacccttttataaccgtttgcaaaaatagtcaaagaacctctagatttagacccgcctataaaaataatgtattttcgcacaccttcaagttcaggagtggatggccatctgaaaaaatcgttttggtccgtttgtaaaaatgatttttctcatagtgaagcttaatacggctgggatccgccggccagggccccgccgtcgatcgatatcaatcggcgccggaaaaaaaggcgccgacgtacagggccggacctagggggtgtgccgggttggcaccggcatacccaatttttttggaaaaaaatactaggatgtagtatgaaatcaaatgacataaaaatggaatcctctcagaaaatagaatataacaatgatcacggtttagaaatcaaatcaggggaagaggaaaggaatagatgaagagaaacagtgggggggggggcagctagatatatagattaggacatgggattgattgttctgaattttattgatttttcatgaattatgggccatatttgaatagaattttgaaaaagccgaccaaaatctgtcgaaatttttccatcaaaattaggtgttttctttttaaaaaaatatatggtggagtgatcgctagaatgaacacacccggtacaatttttctgggtccgccactatcgacgtatgacacgcgacagcaggagcacgaattttaagttatatatataagcctattaagtggcacgtacggacgtaggtaacagctgccaattatatttatgcgcattgttacatgcgattatgttagtcaaaacgataattttcaggcgatctacaacgggcttaattaattactcttttcattctagtacatccatttcaaaatatattgcatattttattttattttttttagatgaggttttgactaatagttgctttcttaatatgttatttatgtgacacaatagtataatcatacggaagtaattttgaatatgaaactaataacatcagttttgcttcacaaaaaaattattacaaaagtaaatgttggttagagtcttattctcacaaaacaaaatgcactctatattttgaaattgggggagtacaacaagtcattttagacttgtcttaactcaaacttctacgaagtctaatcaaatttatagaagatgtaaatacaccaccaaatcaattagttcattaaattcactaaatctaccattatttttattcggtatatttgttttgcgttgaaactattacttctcctgcggtttttaattaatagatatcgccattaatttgtgtgtgtatttgaccatttgtttcatttaatatactttaagcaatacttagatactacaactatcctataatataagttattttcaactatttaggagtacaagactaaacagttcttgcattgttttttcaattcccgtctaaactgatcatcaaccgagtaccgacatgttgtaatgcagccgtatgaacaaatcgcttcgactgatcagtcgtgcgtacggcctccgatagttatatatattgtgtactgaatggatatacctcgtctgcagcagcaggactacttgaattacctcattgcctgtactctcctgctgtaccccttaggtagatcgagcaaacagtggccagccggctgatataattgcatgcacgtatacgttaaatgatcagtaattgtgcaataaaatatgggagttaatttgctactcaactctgtcccaaattataagggctatattttttttacacggttttcaataacatactttgacaagtattttatttcattctatgattccaacaaatatgaaattagcatcacatgaaagtacttcaaaataattagtatagatataattagtatgattattagtcaaaagctaccgagattgattttccttaaaaatgaggcgccctataatttggaatggagggagtacttctcttcgtcttaaaaaatatttttataagggattagcaatacaaattaacgcagagctaaaatttcttattttaagatatggagataaaatataatacttgtcgttgttttgcaaggcggtgtgacaatcatggttaattaggggtccttcagaacgtgctgatttcaaacaattttattgaatttctatgtgggaattatattcaattcaatcaccgtatgattttgatatgatgaaccgtgtttccaaaggaggcattagttttgtggggtgggaggaggttgggatcaagggttggagggaagaggaggtacggatgcataatgccaccaaagccataggggaaatggtatagtggtgtgtgtttttatttggcaaatgggtttggtgtgggtagtgttgagaggctacgagttaaggatgtcagagatgtaggacacaaatagttgaaaataactcttaacggagcaaatggagaaacaacaatagtaacactaggctagcttgttagtggaaaaagatagggagagtgatagagttatatgtgggtcaaggaaaaaaggcttaatagctagatagcttttgcataagataaaagataaaattacatacatcacctcttattgctacaacttcgctttgactacatggccggtccaccattactcagccaatcaatatatcgattataattaaaaagtgattttgaattctagaactcgatttttggattaatctttgggctctttttaaaaaaaatttcccaactcttttataatctaaactcgatcgctttgtaaactgagtttcgatttacaattttgtgaaatattgcacatcaatattctctacattaccattttttatagaattgtttgtaactatccatatatattgtactcatatttgataagtaaaatggtactctactagagaacatcctcaaaatctatttattatgcaagggtatgaataatgcaagcccctctgatgtgcgattttaaagtgagatagcatgccacataagcatggggctaatttcaacatagtttctccacaatgcaagctattgttgatgggatccatagtaatatactattttaccaccttcttatttgagctttagtccttcaattagttctttttatttttttggtccaaaattatgcatatagtacccccaatagaaaagagaaattgtataaacacacataagccctttccctaccatcgcgggcatcaagtcccactataggcctatcccctcttcccgcctcgacaatgagcaccactgccgccagcgtcttacctcttccaaacctcggcaatgagcgttgtcactgctgacctctgtgtgtgtgtgtatgtgtgttcaccgtgacgagctccctctctagcagactctcccctcacctagagtcgcatctcccctcctactagataggcgttgccgccattatcccctcctcctcaccaagccgcgggtggtgtagatcaagccagcgggggcgacgaagatcagggcaaccggcaccaacgacaaccttgacaatggtaagacatgcggatggtgtaactgtgtaaaggatctcagcgcgacagatagtgcgaggtgtcgagggtgaagcatgccgggacgatcgaggagggccatcgccaatcccccatggtgtcatgcgcctgggcatcttccaaagcagggcactcgtgtctcatagaaggcatgagcaccccgcgcgaagacacggccctctctcctccacgggctacgtggatcctacgaaggtactcgccagcgtggcgcattgtccatggccgaaacaaagcaacaatcccaccagagatgacaccaccaaaattcaccactagccgcttcttacggcagtacacactgcagtaactaaaccatgcagttccttgccgggacgacgtcgacgtttgtagctatagctaagcctaggcctagcttgccgttgcctgcacgcgcgccgtacgtacgtacatccacacactgacagccatcaatctcgcgatcgagatcttgcaagatcctctcatcaaccgtccgatcgacgtcgtcctcgctcgccgccggccagccatggccgccgtggccgtggccatatttacctccggcgagtacacgcatgtgcacgcgatatacatcgagatctttaccctctctttgcccatatcttcccacctcgtaccgtacgcgccatttactccgccccccttaactccggcgagtaatggcgctcccgccgtggtaccccaccaccaccaccgcgcgccgctgcatatcctcgccgtccacgtagacgactagctcgcccatccaccactccttcgtttcatcgacctcgatttatacctcgatttaacgtggcgttggtgggcagtatagctagctactagcatggatgcgatcaattcgtcgtcgtcgtcgtcgtcgtcgccattgttgtcgtcatcgtggtggtaggtggtagagtactgagctggaggtttagtggtgcagggagaggatcagggaggtagagctagtcatggagtttgggaggaggaagagctttagcttctttgaggaggactggaaggcgcggccaacggcggcggcgcggacgccggtgcaccaccactacgcgcggtcgccggcgagggaggcggcgccgcacacgccgccgaggctgagcctctcgtcggtgcatggggtggagctgccggggttggtcggagttgggggaggtggtggtggtggtggtggtgtcggggggatgtgctcgccgtgggtgcagtcgccgctgcacgggagggttcggttcccgccgtcgccggcggcgatctaccactgcctctccgcgctgcaccggctcgacggcgacgtgcacgcgctcgccgtggcgaggggggtgctgttcacggcgtccgacagcggccgcgtccgggcgtgggcggcgcccgggtgcttcaaccgcgggtacctcgacgtcgggcgcggccgcgtcccggcgatcgccgcgtgcggcggcacgctggtcacctcccacagccgcgaccaccacgtccgcgtgtggacggtgtgcgcctccgccgtgtgcgaccacatccgcgccaagaaggccgccacgctcccggcgaagggcggcatcctctccttcaccaagcggcggccgccgcaccaccgcgacaccgtgtcgtgcctggtgctccacgccgtcgcgggcctcctctacacggcgtcgcacgaccacaccgtgaaggcgtggaagctctccgacggcagctgcgccgactcgttcgtcgcccacgacggcgccatcaacgccatgctcatcaacgaggccgacggctgcatcttcaccggctccgccgacggcaccgtcaagatgtggcggcgcgtgtacggcggcaccacgcacgccctcatcatcgccctccgctccgagctgtcgccggtgaacgcgctgacgctctgccacgccgccgccgccacgggcgccacccgccggtgcttcctctacgccggctcctccgacgggtacgtcaacgtgtgggagaaggaggcgagcgcggggcggccggcgcacgccggcttcctcaagggccaccgcctcgccgtcttctgcctcgcctccggctgcggcggccgggtggtggtgagcgggtcggaggacgccaccatgcgggtgtggcggcgcgacggcaagggcgggagcacgtcgcacacctgcctcgccgtgatcgagggccaccgcgggccggtccggtgcctggcggtgggcggcggcgaggccggcgatgtggaggggagcatggtggtgtacagcgccggtctggacaagagcgtcaaggtgtggaggatacgcgtcgtcgggaaggaggaggaggaagacgacgacgaggatgacctggacgacgacgacgtcgacgtcgtcgtcggcgaggaggacgcggcggagacgatgtcgacagctgcagggaaggtcgacacggaggcgagggacgaggcggcggcggcggcggcggtggtcgccgaggaagaggcggaggtggtggtcgggctcggcgcgacgccggtgctgtcgccggtgtgggtggagaagcggcggacgagccgagggtgacaccgtacatctcgacgacgacgacgaggaggcggccatgacggccatgcatggtaaattaattaaccagctcggtcttgatcgtggttaattagcaagtcctgttcctccagctgatgattaattttttttgttcaatttctacagtgttgaattgcttggtaaatagtagtggtagtaacataagtacgtttcaccactatatggcctgtttggatagcttctgcctgccgaagattcttttagaagccactactgttagacagtccagattttcactcgaattctaagaatccgtagttgtagaatccaaaaaataaactagaaatcacaagctatgttttccagcttctccaggttctcaccagctagcttctcaccggttgtttctcagaattttaagctcccaaaacaggacatagggtcgtttggaagagacgagtgagatcgtgtgggggcaagggccaattggtctccctctgtgccgtacggcccacgcgcacatggttggtggaccagagcatataaggacgcacctgtgggctgggctggacggtccaggtctctggagccaggctagatttagaaggtacgcgtacagccttgtcatgttgtcccatcgcacacacttgcacaagaaattactccaaaagggcagaggcaatgtacggcttggcccatggcaaagggcggcccagcaagtcattagacgaatatacggagccgggggacctctcctcgatctgcacaggcgcgggggtgtaattaaatcgacttctccggctaaatgtcaacgcaaagcatgattacgtatttatgttcctcttcttcccatattatggagctacgaaatactccctccgtttcgaaatgtttgacgccgttgactttttagcacatgtttgaccgttcgtcttattcaaaaacttttgtgaaatatgtaaaattatatgcctacataaaaatatatttaacaatgaatcaaatgatatgaaaagaataaataattacttaaattttttgaataagacgaatggggaaacacgtatttaaaaaagtcaacggtgtcaaacattttgaaacggaggaagtatataggtggcctgctatatatacgggctatagctagggtttggtagattaatcatcaacccaagtttcttatcttgtaagtttatatacatcgagtatatattatttgaccacatgtatgtttacatcctgcgcatatgttgtactagtgaataaaccgaaactaagcacgtgctaattaatttaagtagagaggtggagttgtgcgtgtataacttcatctacggctaggctaggagttaaaattttagtgtccatatatttaagcacatgagaatgctttataataatagcggggattttgtttagttcagcctttatcatggagtctccatgcatgtcgtgggtggtgtgtgttgaaaaagaaaaaaactaccccaatatgctaaatg

SEQ ID NO: 9744 - DNA, 40217 bp, Oryza sativa
atttcaaaatcaagcagaatgtgagacaacagaatttgttccagatacatttatatggaactcaaacagacaaggccaatgaacaagagcatctccaagaacggtaaatgcaggtccgacaaatgcatatatacggatcatcagatcatatgcgttcaccttttttttaattcttttttttctttttacatttccccatgtctcctatagcatactgtccatcatgatagtttttcaatatcgagccaaacagggcatactatgtgtttagaatataatacaacatgcaggtatatataatataggtcgtgcaaatgtcttgaacgcatcacaaaatatacttttgaagctttataattgaaaaaaaaagaatcagctagaacaacaaaaggcacatctatacttgatccgttttgagtttctttgaacaaaacaacatgtgtgccatttcctaccaaaggtcaaaccagcacgtcgacatgatcacgatgcccaaaattgtaaattctaactaaacagatacaaacgaacatattaaatactccttccgttttttaatagatgacgtcgttgactttttctcacatgtttgaccattcgtcttattcaaaaaatttacgtaattataatttattttgttatgagttgttttatcactcatggtactttaagtgtgatttatatcttatacatttacataaaatttttgaaaaagacgaatggtcaaacatgtgagaaaaagtcaacggcgtaatctattaaaaaactgaggtaatataaaccaatcaaactgaagaactgaacctaaccgatcgatacccaattccctacctccccaatgcatgggagagaagaaaaaaaaagagaattcatcatccgcagaagaatctcccaccaatcacaacaaattcgagcaaagaatggtcacacaagcaaagaacgaaatttacggacctagcagtgaccgaaccaacggcggccttcaagctccacggcgagacatcgcggtgacagaagagaggccaaggcgcgcaagctccatggacgcaccgcggtcgcggcggccggcaagggatcgatgagccctcatccagccgcggcgggacggcctggatgtgggtgcggaggaggaggaggaggaggaggagagggtggggcgagaataggtggatggagaggaggagaggagaggaggcatcggctaaatttaagaggacgcgcgcgcgcgtggggcggcggcggcggggggaggagaagagtggagaagagaagaggagaggcggtggtggaagcggtcgtgtcgtcggcaggggagatggccaagcggcggcggtgttcccgagaggctccggtctccggcgtacggccggcggcggcgctgggagtgtggttaggtgggcttgcttcgacggcccaaggcccaggttacgttgctatacgtcatggttccatacgattttttgatccagattgtatttcttcgtgatgaggaggagaaaaatatcatcattactccaggtaaagtgatttatttatttattgtgaaaaaaattgatttatatagcaatgacgtagcattatatgaagagaaattctacattttgctattggtaggcgatcgatcatatgaattgtcatcgacaaacatggaatatgttggtcgggaataagttcacttttactcccttagaagtgacacaaatctaatccatcaccaatttgactccctaggcggttttggaggacggttttgctgaagtgacgcctacgtggcggtattgaccgggtcttctttacacgtggtgttgacgttgcgcttaagtggcattagaattaaaaaatatgtgtgggacccattagtcattcacacaaaaagaaacgtgggcccactgacatgtggagcccacatgctagtcctccctgactcctacctttttcctcctccgtctctccccttcgtcttccccttcggcctgtggtgcgtggtggcagaggaagcgacaaaggacagcaacaggcgggagcaggccgacaacggcaagggagttgggtggcaagcgggggaggagatggggggcgcagctcaccgcgaggagcaggacgatgtggtcgcagcgccggcagagtgatgtggtcgcggcggcggggttcccggcgagccgcgcagacgagggggagcagcgagccacgcagacgagggggagaaggcggtggcgcaacggcgtgagggcggaggcggagcacacgaccggcctgcacgccatggtggcggtggaggacgttgtcgaggagatcccccacctcaccctatccatggcagccaccgccaaatgccgccgccgtcttcactccccgccacgcccgcgtctcctccgctcgccgccggctccacttgcccaccgtcgtgcgccacagccgcctttccaccgtctcccaaccgccggatgccaccgccgtcactgccgctccagtggtgaagagaaaggctgggggagagaatgaaagaagggagagagagagggaggaggaagaagggtaggagagaggatgacatgtgggatccacatgtcatcctttgtgtgaatgataaatgaattattatttttaattctaatgccacttaagcgccacgtcaacgccaagtgtaaagaagagccggtcaataccgccacgtaggcgccacatcagcaaaaaaactgccctccaaaaccgccaagggagtcaaattgcaccggtttcaatagttcgggggtcgagatatttagttttatgggttagagtcatggattagatttgggtcactttttaagggagtcaaagtgaacttattccatgttggttgcctacactaacccaagtgagcctagtgggtgcaagcactccaatagcccaacaatccgcctcctcctctctctacattacctttttctcgatcattcgatccccatggctccacgccttcacccaccatgcacgtgaagacatgagagcgagcgagtgagcacgtccttcctccgatgagctcactgcacctctcttcggtgagcccccttctaccctagtgagcttccactaacgaagaagaggagatgcaaacgagctacctctctcaggtgacgaagggctcacttcttttctccaccagcaccccccaccgtgtcgccgccgacctcgcccgacgccaaagggcatcaccatgccaatgaggcccgcctagccgggctccttcccttcccattcgcctcactttgctccacaccaacaccagcccaccacccgctgccggcctctcagatgccttgccacccgtccttgtccaccacccaccgcctgtctattgcctcctaggccatccctctaaacccgatcctccactttcccctcccaagtgccaacctccccctcccaccctacccatgaaatcctaaccctaacccggcatttgtcgttatgctattggaaagcattcgcgagatgcccatgttgagagcgttcgcgcattaggctttccgcactaaccttgtgcaaagagtccatttttccttacaagtgaaatatcagccaatacttcacatatagacatgacctcatgccaataaggacaagtatctcactgccacgctagcagggcctagctttctcaaactttgttaggtcattcacagtgcggtatcatgtcgcgtggattcgttgcgccatgtaggacaagtgttgtggtggaagagagggaagatgggggaccatggttttgtgaggttgctcggatcctagtaaagaaccaagtccatcaactgaaaagcctgcaaaggaggaggaggaggaggaggaggagagagagagagaggaggtctagaccacccataccaagccccgggaggcggcggcgaaggaagctcgatgatggtggcgacggtagctcgatgatggcggcgatcaccacgcgccaccgagctcaccagatccagcatggggctcgccggatctggcctcgggaggtggcgacggcagtggctcgacgacggcaacgacaacgacagtgggacctccgtttacccacttccactacctcgttggatttggctaaagctcgataactgtggcgaggaagctcgacggtggcaacggttgaagatcaggaggggaccggctcattgggaccacctgacaatttctgacgaggttcgcgcatccaaatgaggcttcgcgttcttctttcaggcacgacccacgccaagctagctcagaatctccgagctggtgaggcgagtccaaacgccaagtcaccgcactgtgaatggccttactagcgccggtgttgctagcacactagtgccaattgcaatacaggggtgcgacgtacagggacaaaccacacaggacctgaaggaggaggaataaactaatttctgttagtagttttgtatgggatccacccttttgttctagggagttgattttacccaatctaatggaaagagaaccattttcacaccttaaattttgtttaggattcccataaacagatattgggggtaagatttagccattctcttaggctgcgttcgggaggaggggttagaaaccccttctccctggcacacaaaacaaagcacgcgttgttgcataattaattaaagtaccgtattagctatttttttaaaaaaagattaatttgatttttttaagcaactttcatatagaaacattttgtaaaaaaatacaccgtttagcagtttgaaaagcgtgcgcgcgaaaaacgagagagaggggttgggaacttggagataagaacacaaccttatagcaagtttaatagtatagccaactactaactccaattcatctatagccaatctaatagctcacttatacaatagttacatactacactattagagcacccgcaatggtaaagtaaggtgttatctataaaacatgtacacctcaacaatagactagattaatagtaaaccacttcaatggtatgtctacatgagtatctatagctctctaatccattgcctcgtttttctctatagactatctccatgttagtagatagctttgctctctctctgcatttaatctcttccaagtaggaaaatatgctgacatggatctcttgtagagagcttatagataaccattgtgggtgcccttaacacctggttacacctgtcatacacacagcgtcttggagtccgtgttacagctggctacaaatctgtagcccactactcttctctctccttatttatctccttaaaatatgtttataactgacttatagtctgctattgtacctgctcttagtgatgctctaaggctgtgtttgagggagaggggattgggaagatacgcaaaacgaggtgagccattagcgcatgattaattgagtattaactattttaaacttcaaaaatggattaatataattttttaaagcaacttttctatagaaaatttttgcaaaaaacacaccgtttagtagtttgggaagcgtgcgcacggaaaacgagatgcttttctctctcaatcccccaaatcgcccaggaacgaacgaagcctaagaacaatagtgtttcgttctcaccaaattccaaggttgtactccaaggatcttcaatacacaaagcacttgcatttcttttcatggaaaaaaaatagtactaccgttctattcctacgaacaattcaattctccccgaaaaggcattaccctaaatcaagagaatagaatcacacacgtatcctttttagcatttagtctcatttacaacataggatttgccttctatttttagagaagctatcaaatcatttcctacaaaatccaaagataaaaaaaagatgtgcaagtgcaaacacaaacatactatgcgatttttccacaccccgttcaccagttcactacgcacgcatgaacaaacggtcactgaacaaacggcatcgcggccacggcggcaggcaggtgggccccccacgttgtctgtctgcctcgccctcaacgttctttttgaactttttgaaatttgaacgaatgcacaccccgagatcccaaatcacactctcctagtcctcccccaatcagttcaaaaaaaaaaagaagattcaaatccagacgaagccccttccgctcacctccccggtaatcctctcacccttctgccctctcacccagacgaggtggggcccagcacgctcctccacgcgagggcgtttccccgccgtcgctgagcggatggacggctgggatggatcgacgattcaaacgtgcccgtttccctccactagatgtggcgataaacaaatggggatttgtttttttcttcttctttttttttgaataaagaaagggagcgcaccgttgaaggttgaacagaacactccatccacgcagccttttgctgttgctttgctctctttccatgcagtaagtacattgatgagtgatgacctctttcttggtcctccctaaattgcactgtgacaaaggagtcctccaccaccatctcaccctggggattcagatttcaaaattcaaaaacagaagcaggagtatcaactggccacaagggacaaaagtcaaatcttaatcttagtgctttgacagctgatgatttgagagtcaatgaacaggaatttggaataaccaaagcaaaaaaatgaaacattgtccatgtgaaactgtggccgcaaagttttctataggtgcaggattaggtaaatggtgtttatatggggtattttcattggcaatattgtgccattatggtgtaattaaatttttccatagtagcctttcacacagttaagaaaggtttaatcttacgttttgacccgtctattaattattaattataaatatatataaaacatgtctattaggacatattttaaactttccgaccgttggacgttattttaaacttctcaaccgttagttataaatatatggtattatatcatggtactccctcaaatattaaaaacatgtcgtttttgacacattttgaactttcagactgttgtacacattttaaactcctcgaccgttagttataaatatccggcatgtatggagtaacagagtaacgccttcaatctttaaaacacgtcgttttgcacaaagttccagaccttcctgtccgtttgtaataaatctccggtatgatactcatagcgctccatccactatcgaaaaacaaagttattttggacacactccaagctaaaaacatgaatatctaagcatcaatatcatgttaaatatccgttaccgtccacgaacaaaagaagtaacacattgcaatcaattcagctctacatccacaatatccataaaaaaacggtcggaaacataataacccacccacgaggtgaccgaataactaaaaaccgtttacggataaaataaccgcaacccaacccgatgattattagggcctgtttggtttccagggactttttccaagtccatgtcacatcggatgtttggatactaatttggagtattaaacatacactaattacaaaacacattccatatccttggactaattcacgagacgaatcttttgagtctaattatgtcatgattttgacaatgtgatgctacagtaaactttttataattatagattaattaggcttaaaaaattcgtctcgcggattagctctcatttatgaaattagtttttttattagtctatgtttaatactccaaattagcgtccaaacatccgatatgacatgggctaaaaagttttaaccccatctaaacacccccttagtagcaaggttgaagcacatgccactgcttgaaatttgaacaactgaactgcttaccagtacaaccctagaagaaaatgtgagtagaatggtaggcccaaaactgcaaagaatcgaaagtacaggggtgtattcttaaagtagcactcctcccccttttctttcatcccctaccctcccctctcctcccaatccccctggcctctgtcgggaagagcacccaaaccctcgcttccgccctcgcaaaccctagcgcccggaggaggaggaggtgggttgcggtggtagtttgccgtccgccgatgtcgagcaacctagcagcctcccgccgctcgtcgtcgtcgtcctcggtggcggcggcggcggcggcgaagcgacccgcggtgggggagggaggaggaggaggaggagggaaggcggcagcgggcgccgccgcggcaaagaagcgcgtggcgcttagcaacatcagcaacgtcgccgctggtggtggcgccccagggaaggccggcaatgcggtgcgtgatggatcgcttgtgggggggttggggagtttcttttttcttttctcgaaggctttgttctttgcgcggtttgggttcgagatctttcggtccgtgatgtggttggaatggtttttggcttggccttcttagtttcttttgcttttggtggttcctcctgggttcttgggacggatcgagttcgcttttctgcagttcttggattgggggatttcttgattcggaaattgccgaagcgatctgtatatgattttgcttctttttttttccatctttgtggtgggcatatgccttgatctgttggtttcaagcgaaaaatagtgtttcttgaatccgtcttcttgagttcttccagagtacaagattttcgtttcttcaatttctcgttgtttaacctacaaacggttcttctcttccaatccccaagattttattgccttttggttttctaattgctgttcccattcaaatttggacctctgccaaatttttccttgctgattttgaggattctcctctttcaatccacaagatttttccttgctgattttgaggcttcttttcatggttatttgattgattgatttcttggggagcatccatggtcaacaggcataaagtttattggcaccttcaaaagttcaaaaatcaagctttcttggtatttgtgaagtgttttgtacgtttgcttgctttggaatcttctattggtaatatgatacttgcgtgctgctaatgtttctaaatttttattccttttcatgcttgtggtctgtggaatcccaaatgaacagattgaaataaattataaattgatttctcttgtcccatcctcctgcagaagttgaatttagctgcctcagctgcaccagtgaagaagggatctttggccagtggccgcaatgtgggcacgaatcgggcctcggcggtgaaatcggcttccgccaagccggctccggccatatcccgccatgagagcgccacacagaaggagtctgttcttcctcctaaagtgcctagcattgtgccgactgctgcactggcacctgtcactgtaccctgcagcagcttcgtctcccctatgcattcaggagattcagtttcggttgacgagacgatgtcgacgtgtgactcaatgaaaagcccagaatttgagtacattgataatggggattcctcctcagttctaggttccttgcagcgaagagcaaacgaaaacctgcgtatctcagaggatagagatgtcgaaggtgtgttttggttgctgaaatgcacagttatagctagaaaaatttgtgctatatggtgcattctattggaatggttgattgatcttatcccttgtttgtttcgcagaaactaagtggaagaaggatgctccttccccaatggaaatcgaccaaatttgtgatgttgacaataactacgaggatccgcagttgtgtgctactcttgcttctgatatctacatgcacttgcgcgaggctgaggtaatacattcttgtctacaccttatttctctgaaaacatttcccttgagcaccttattgtagtatgttttcataggaaggctttgttttgcttcctcatgatttgagacttgattgcatccatatgaaacacaagtaaaaaaagtttactttgatgagaccataaattaagaagagaataagtgcacatcactgatataaggcagtattccaatgtaatttatcaggatatttttcacatttcaccacaatccgttcttttctgcttttcgctttgttggtgcaccttatcatctaataccagacatgctttgtgaccatcaattttcagtagttttgttctgcatattgtgtaaacaccttacataaaacattctagaatactttttttttctgaatagtgggttccatttaatggccatcatattgaaattccttatagaaccagtagaagcacagtataatatggagaaattttaatggagttatctgcttaaagcattgactgaaccgatgaattgatacatttcaattgttgtaatcaatgctcttgaagtatttttcaattgctcattgtttttgctgtgacatggactgcactactgcagtcagtttgaccaaatgacaattaatctgacctgagcacagtggtttcaaatctaggttgaatttcatatttacattgtgattttctatttgacttgaagcagaccaggaaacgtccatcaactgattttatggaaacaatccaaaaggatgtaaacccaagcatgagagcgatcctgatagactggcttgtggaagtaagcttttataccaaacatttttttagttgattggagcctaaagaccacactcgttacttaccactgtatttgtgcttttcctttgtgcaggtcgctgaagaatatcgtcttgttcctgatacattatacctgacagttaactacattgatcgttatctttctggcaatgagatcaatcgtcaaagactgcaattacttggagttgcttgtatgcttattgctgcgtaagatctgactagcaatttttttaaatgtgtttctcagtttgcatctgagttttgtgtactgattttggcttgttcctatatcagaaaatacgaggagatatgtgcacctcaagtagaagaattctgctatataactgacaacacatacttcagagatgaggtttgttttgcatatctgttaacattgctgtgtttatgtccatgactaacacatagattatcaggttttggaaatggaagcttctgtcctgaattacctgaagtttgaagtgactgcacctacagcaaaatgctttttgaggttctattccctttcatctcatcgatgtctatagtgctggaatgaatcgaactctaataactctcttattgcctacaacaggagatttgtccgtgttgcacaagtatcggatgaggtgctgctctcttaatcatctcctgcttgctgcaattccataatagttatatggtgcattgcattaacagcttttcatcgtgcaggatccagcattgcatcttgagttcctagccaattatgttgctgagctatcactgctggagtacaatctactttcttaccctccttcactagtagcggcatcggctattttcttggccaaattcatactgcagccaacaaagcacccttgggtaagtggtggcatcatcgtattgaactttccatacatcttttatatcagcattcaaataaaaaaattacaagagctaacatatgcttctcattgtaaatttgaagcagaattccacccttgctcactacacacaatacaagtcgtcagagttaagcgactgtgtaaaggcattgcaccgcctttttagcgttggtcccgggagtaaccttcctgcaatcagggagaagtatacccaacataaggtataaacggcatatcctccccatttcttcagttatctgtactgtttctaatgctgaccttctgtacctttgtttctgcagtacaaatttgtggcgaagaagccctgcccaccctcaataccgaccgaattctttcgcgacgcaacatgctgaactagaaaaataaaccaaggattagttacagttgctgactgaattcttcctccagaggcacctatgccaggttgtgccgtagaccgttcagataaccttgatgcaaggcatgctgcttgcccccccccccccccccccccctggttctttcaggcggtttggctgagtgtagatagatcgatgcttctgctgtgtgtggtaacttttatggtactgatgtgctttcttctatcttcttttccctgtacctagatgatccatggttttcagtactttgtacatcggagtcctgcagcaaagctttaaacatcttgtttgatattagctgccaacctgggcgtctcctaggttgatgtatgatagagtctctgttcgtgttgcttttgtgaaattctcaataagagcaccacattttcaacagtgctcattctgaataagtgctactagtgttcttgatgtttctagtaaaaaaatatcagcttcagctttttttttttcaacctgttctgttcttctgttgacagatatatgcagctgatgtgatcgacttaaacatgatgattcagcgagattcttagataaaagcttctgacatcttttccaagaaagatgttttcatggacaaatgcatttaagattttgaaaatgaaaaatactacctccatcccaaaataagtgcagtcgtggaaaccagtgtccaatgcttgaccgtccgtcttatttgaaaaatttatgaattattttttaaaaatagtcacacataaagtactatttatgttttatcatctaataacaataaaaatagtaatcataaattttttttcaaataagacgaacaatcaaaaattaaagataaatagtgcaaaactgcacttattttgggacggagggagtatttgtcaatgcaacctgttgaagaagtgatgctcaagctatttccatacttgaagctaagcacagctgtttagacatgcatgcctgcgtgttgcaccatcatattgtacttagactaatcacctatactaatataaaaagcattacttgtagtctttgctagctacactaaaaaaagtgtacacaaattaacctcaggcaccctgcaatctaatggttgagattacaagttccagcttgtcttgcaatgcaacaggtgaactcacagattcaactccaccttggcccttgcaaacgtggcggtgtgccggtgtgctagcaactacacgtcccaaaatataaaaacctataatcagatgagacatttttttctagtactaagaattggccaatccagattctcgtctcgctggagtctcatcctcgtctcactggagtctggaatctatagcaacgttgtttacagtagagttaacagaaattatcaccgtctaattaacctgctactgctttacaaaacgggagacaatcagacaacgccgaggtgggttgaaaaggaagaaaatgcaagcacaggcaaatgccgatgataagatactagatgagcaaggctactccctggggaaaaggctttgcttgccatggattgcaacacaagattaaaaaaaattacaatacagaaagaatgactcgaagcatgagtctagcaaggttaaatcatcactgagctaggcctacaacatgtcgagttagaagtcctcttcatcgtccagatctggatcatttgatggccgtattctcttgccgtctctccctccagggcgacctcctttctttggttttcctctgtccaaacacacgaggggtcagaactaggcaattcaactaaaagggttgttcctagaaacactggtatttttaatataaagaagtgttagacaaacactgcccctggcaagaatgtatgtaaagttgagaacgatagcacattttttgccgcaaaagtaatctgagcacttactgcccgtttgcaggagtggttgcgcctttcgaacgacctgatccatattctcttccatctgccaggatgcagctggtattgagcccagagtctcaattgttcctggtttcagcttaatgaaaacaagaaagagaacttaccatctcgtccagccatatgttcatcgacctggaatgaataaaaaataatggtatgtattagcaacctcacaaatatcggtatagcacagggggaataacaatcatcgatcaaagcaaaccaacagattaaaaaaacgggcactggcttttcagtggcattaggatttaggatcattagtcataccgctggagatgtaaccgatgacagggagaacagcctctcatcagcctggaacttcctggagcgcttgagactgaaattaataagacagaaactgtcataactaattctatgtgacctattagcagaacaggcatgataaaacatttgcttgtgcagaataatgaacacggaagattatgccaatggttatcataaatccaaccctcccttggtgatgctagatagtgcatatagagcacccctgcaattggccacaactgatataacactatcatagcatattttgggttatgaatctgttgtataatacctgccactgccactagagtgatcagaggatcttttgttcatctgatcattagtaaataaattataagtgatcagaggattttttgttcaatatctataactataaattattcatctgaatattagctaaattatatgtgatcagaggctggtagaaagttcaagggcaggacagtaggtcattcaatcaacagtcagaagtaagcaaagaatgtggcatgaattctgaaggtttcgaactggtaagtatacagtgggatgtcaaaagaaaatgaatgaagacctccaaatagtaaagggcatagcagtctaagaaaaggtttcttacttggaagtgttctttgacgatgataagaatgattcaaaaccctttagcacacttccgaattgattagactcttgtaggtaggttgtctccatttcataaacctgcaacatatggacataaacatcatttgcaggttgtataagaacaattctgttaaaagcatgaatagatattttgttaaattatgagtgtttaatatcatatacaaaacttccccttaaagtcaagcaaagatggttgacattatagatcatgtgttgttcctggtattaaagagcgactgttttgttctttctaaaaaaaaacacatatctgtgccattaaaatacttgatatgagagcaatacccatttcctccctttttaggattatggtttctactaaaccaaatgctcctcttatttaatgattttggatgacacaccaagattcaccatcacaaacatagattggaagttggagcacatagtgtaactttgaaatactttgaatagaagtagctcatttgatacttgttgcaaataatttctgactaagacacagtagaaactccacatcttatcttgataataagaacagatggaatttacaggttgtagctaactgattttcatttttaccctagagcaacaaagtgttctcaggcacaaagaacaacatacaagaaatagaatggtcatattcgacaagaatatcaaattgatactttcttcccttcctcctaattctatccaaattgttcgtcacaattgatcctctctgtgaaatgacaatcagtggtcactggtccagcatattggttccaaataggttcatatttctatcattcccaaggcattaagaaagattgcacaataaattggggactgtgtgtaagacctaacctggcgctctatggagcggagctcctcctggagcttggcgcgcttgctcatcagggcggagagcatcgctgtggggttcgcggccgccgcccccgagggcgcagagcctgacgctgccttgtgcgatgcccctcctccgcctcccgagtccatggttagggtttctagggttcgagttcgtggtttgcctgtttgggcgttcgttctgttttggctcggacacagttcactgttgtggagacgactagcccctcctctccaataatccgatcggtcctcttagccaaggtaatcaatatcgagatactaggtaggatcctttctcttcttgatttgatccttctcgatcggtttgatcccttctaatggagaaagattcttgtttgctgcaagtcacacctaagctgtcaaatgcacatgtgaaaatgtttagcaatcaatgcatacatacgcatgagtataacacagaaaaggttaatagagtatttagcagaaatttgtgtttcaatttttttttctgttgatggataaatttcactccaaataacattattggaatacatttctgcctataatctaagatgcacatgttttatgagcgatttgatcatgaccacaaacatgagataatgtccataccctagttaggtgcccatgtgttgcaatgggaaaagaacatttggctatgtacaatatgaataccctaatactccttcccgtcaggattatttgatccaaagtactgaggtatcccgcgccaaataatgactcgaggggcaacaaatgaaacatgcataacagttcaggaccttgagctgttgagcatatagaagaaacaaatgatacaacctatgtcacttattatctacaacacgttgacctctgtaataacagaatgacattatcaccatagatggtgaaacttccttgaaaaacacacaaaaacgaaatccagaacaaatgtggatcccctggcagtgatatcacacaaaacacataaaaaggaatgaaacctctctccctggcacagcaatcagcacaatcctttctttttcttgatttgcaaaccctttgcaggcaattttaaacattacgaattctgagtgcataacaaaaataaaaactacattattccactgtatgtaaacaaattagtgaaatgaatgaaataacaggggcggatccaacttgggacatgggggttcagttgaaccccccaaacttttgggggaacaacaaacaaactcaaactgttacttgtattaaggttaaggctctggaattaaaagaagagcttcttccagatctacaagagaagctagggtttacgcaagcaaattccagacagaagcactcccggtgggagggagagattaatcatcagaaagaggatgtggatgctcaccaggatcccttgctcgccggatggagatcggcgcccctcccctcccctgttcagccgcgaagggcgcaagaagcggaggagacgacgagacgggagattttttttttctcttttacgcgaagggaagggggaagagatactcgagtactccacctttagctcagatttactatgttacccattatgtgtagcaggccaaatgggcggcccggcccatcacggcaaggggcccgctgatggcacggcaactgtaatgggccgtacggtgccagatcttgggcagaacggcccaaggaggtgttgggccgtgtcgggccggcacggctactgttgcatggaccggtggcccacccactagcacgataacgttattcgtgagaaactacagtcgcaagttttctatagtaggtaacacaattaggcaaaattgtgttttttttagatattggaatagaatccagcctttggtcaatgagctacaaccaattattacaccaattcatacaaataaaatcgcatggcaaaaaagttataaaaacacggtcctaaaaggtcaggaacacacaccaagtactaaaaaccaacgcaagaaaagatcacaaaattattgaattctatttgtgaatcttcatccaaagttggcaaaaagccgcataaccgttgactcaagattacgacatgtagcttttattaacttgatatcttcttcacacttttgcagttgtgctcaggaccgaagctagtgtgttgccctgaaaagaacctgcatataagatatagatggtgatttgtcaaaaaccatatcatttctattcaaccatagagcccaacatatagcggaagctcctaccaggataagtttactggttttttttttatcaatcccaacaagccaagcaaaattgtgtttataagggtatttttcattggcaatattgtgccattatagccgtgttaaaaattcgcataatttcctttggcacaactaagaaaggtttaaccttacgtcccgacccaagcattcgttgtagatatcctgaaacactaggttcggacctgttttacacttttcgaccgttggacacattttaaatttatcggccattagttataaatatatggtcttatatcatgttactccctcaaatattgaaaatatgttgatttggatacattttaaacttctcgacctttggacacattttgaacttctcgacctttagttataaatatctggtatgtacgagagcaatggttttaatttttaaaacacaccgttttgcacaagttccaaactcccaaacctcctatcaaagtgctccatccggtcttaaaaacaaaggtccggtttcccacacaaaaatgttacaccctttcacatcaaacgtttgaagtattaaatataagctaaaaataactaattgtacagattacgaataatttgtgagacgaatcttttaaacctaattgctccatgatttgacaatgtggtgctacagtaaacatttgctaatgatggattaattaagtttaataaattagtctcgcggtttactgacggatactgcaattagttttattattagtgcccgaacaccccatgcgacaccctatataatacccgatataacacgcaataattttacactcttggatctaaacacccccaaagttattttggatactacattccaagttcaaatataaaactctaatggcaggtacaataatagactataagtcagctacaagcttatgtggtgaagataagagaggagatagaatagaagcgggctacagatttgtaaccagctgcagcacggactcctaaacgctacggtggtgtttgaatctcctgaagataaagataaagatgaagattaagtgtttcacgtaaaacgaggtggtaataacgtgtgactaattgagttttaattattacaaacttgaaaagtggattaatatgttattttagaacaactttcatatagaaagttttcgcacgaaacgcaccgtttagcagtttaaaaagcgtgccactttaatccaaaatttaattcacccctttcatgagtttctaacgggctctacgtgtgtatgacaagtgggaccagtaattaatgatgtagtgtatatctgtagttaactattgtataatttactattagattagctataaatgatttggagctagtagttagctatatactattaaaattcctctaagtagcaaaggccgtgttcgattattagtgttagaaactaaccctccagcacgtaaaacaaaacggttcattaatacataattaattaagtattagttatttcataaaaagtgagttaacatgatttttcaaataactttcatacatatatttttttttaaaaaaaaacacaccgtttaaccatttgacaaaagcacacatgtgaaaaacgagagagataagtaggaaaatacgatgaggaatatttcctccgtatcaaaatataagtatttttagacttcgacacggttctaaagatgcttatttgacaaacgatatttataaaagtaaaatattttaaataaaaagagttacatactgtgatagtttatttaatgataaatctagtaacatcaatttcttttatgattgatcttttttattttttttcttattaataattaaagttacaaatatttgacttgacactatgcttaaaaaatacttagggcccctttgaatcttagggtagaaaaaaacagaggaataggaaaaacacaggattctgacaggaattgaagggtaaaacagaggattgcaaaacacaggaaaaacacaggaatggtcgtttgattggagcgcaggagaaacgcaggaatcagacgagagagatagactcaaaggaatttttccaagagattggagctcttgctaaatttcctcaaaaatccatatgcaatgtgtgccatttcatagaaatttcataggatttggaaaacttcaatcctttgaatcaaagggccaaatataaaaatttcctataggatttgaatcctatgaaattcccacataaatcctttgatccaaaggtgctcttacattttaggaatataaggacggagggaatacaaagttaaaatccgtcatcttctacggcagaagtagtaacgcacgaaattaatttagctctacatccgttctgtttatgaataacggtcgaaaacgtaataacccaaccacgacgacatgaaaaaaagaaagacagacaaaacggtcgaataactaaaacaacttgctactactatttgaaatttgaacaactgtaacggcccaaaaactggaaataatcgaaagagtcgtcgccattttctttctcttctcctcctccgctcctctgagtcctctcctctccggctctcccctcctctgtcgggaagggaaggatccaagccctcgccctcctccgcctctgatccccgccggccgccgccgccctcgcaaccctcgcagcagcagcaggaggaggagggttcgggtggtggttgccgtccgtcgtccgatttcgagcagcctagcctcccgccgctcgtcgtcgtcgtcggcggcgatggcggcgaagcggcccgcggcgggggagggaggagggaaggcggcagcgggcgccgcggcggccaagaagcgcgtcgcgcttgtcaacatcaccaacgttgccgccgcggccaacaatgcggtacgtgaaggatcgcttgctgcttcttcttctttttttgtgctttttttttctctctccaagatttgttctttgctttgcgctgtttgggtggagatcttttggtatgtgaggtggttggaatggtttgggggtggctttttttttttttttttgcttcttggttgctcttggggcataagtgagttgctgttgcttgattcttggttcctcttggggcacaagtgagttgctgttgcttgatgcggaaatggctgaagcgatctgtgtatgatttttttttggtttttttccatcttgtttgtggaggacatacgcctcgatctgttggtttcaagcaaaaataaatagtgtttcttgaattcgtcttcttgagttctttctttcagccaacaacaagattttcatttcttcaatttctccttgtttagcctgcaagcgattctcctcttccaatccccaagatattcttgccttttggtttttcagtgctcttcacattcaaatttggacctctgccacattcttccttgctgattttgaggatactcctattccaatccacaagatttatcttgctgattttctggtttcttttcatggttaattgattgattgatttcttggggagcattcaggtcaacaggctaaattcacttgagggtttattggcaccttcaaaagttcaaaataaaagctttcttggtattcgtgaagtgtcttgtatgtttgcttgctttggaatcttctattggtaatatgatacttgcgtgctgctaatgtttctaaatttttattccttttcatgcttgtggtctggaatcccaaatgaacagattgaaatttaagttctaaattgatttattttcttcaatcctcctgcagaaatttaattcagctacctgggctgcacctgtgaagaagggatctttggccagtggccgcaatgtgtgcacgaatcgggtctcagcggtgaaatcggcttccgccaagccagctccggccatatcccgccatgagagcgccccacagaaggagtcagttattcctcctaaagtgcttagcattgttccgactgctgcacccgcacctgtcactgtaccctgcagcagcttcgtctcccctatgcattcaggagattcagtttcggttgacgagacgatgtcgatgtgtgactcaatgaaaagcccagactttgagtacattgataatggggattcctcctcagttctaggttccttgcagcgaagagcaaacgagaacctgcgtatctcagaggatagagatgttgaaggtgtgttttggttgctgaaatgcgcagttatggtgcattctgttagaatggttgattgatcttatcccttgtttctttcgcagaaactaagtggaataaggatgctccttccccaatggaaatcgaccaaatttgtgatgttgacaataactacgaggatccgcagttgtgtgctactcttgcttctgatatctacatgcacttgcgcgaggccgaggtaatacattcttgtctacaccttatttctctgaaaacatttcccttgagcactgtaaagaattgtttttcattgtagtatgttttcagacttgagacttgattgcatccatatgaaacacaagtaaaaaaagtttactttgatgagaccataaattaagaagagaataagtgcacattcctgttccagtggttataacggatataaggcattatttcaatgtaatttatgaggatatttttcacatttcaccacaatccgttcttttctgcatttcactatgttggtgcaccttatcatcaaataccagacatgctttgcgaccttcaattttccgtagtgttgatctgcatattatgtaaacaccttacataaaacattcttgaatacttttttttccctgaatagtgggttccatttaatgaccttcatattgaaattccttatagaaccagtagaagcacatcatatgttatgagcaccggtgagcgaacaaattaggtatgagtgggacacaggaggtcgaggattcggtagcctcttcgacgccctacccgtggtggccattcaggagaaacgggggatgagatagaaaagtggagatgagaagtatagattgaatcttgcttgcctttaaccataaattcgtggttctaaatagccttacatccaaactaactctgttaataaaaagggataacactcgaactaatcgctagcaatttgcgtggtactgttcctcatccggcacgacatcagtcggtcgcttcctcactttctttgtcgtgtcgcttcctcgaatacgtgatgccgaccatgacatgtctcccctccttcgcaaacagctcgtcctcaagctggaacgtaggataggtgcgacaaaactcatcttcgtcttcccacgttgcatcgacagccggtttgccggcccattggatgagcacatggcatactccggcgcgtcaattgaccatgaacagccgtagctggaagcgggagcactctttcgttcgagagcgccgacaacgcaggcagctggtctagcggtgtgtccttgaacaccttgaggagttcaacgtggaatacatcatgtatcttggcaccggccggcaacttgaggcgacatgccacatcgcccacgcgagtgacgacttggtagggaccgtagtagcatggtgccaacttgttgcgacaaaagcatagtaggaaaaaccggaccggtgggtgacccggtcgacctttgggttcgccggtccaaccgtgaaccggacggtcaaaccgcgatttaatacatatatgtgtaacgtatgtaattgctaaatcacaactgcttggatggctcggtggtctacgccgcttgcttctatcctaaagaccagaggtcgaacccccacaggtgcatatttcctctgatttttgccaaccaaaacgctctttgcaggctaaatgggcctttgatttttgccaaccaaaacgctctttgcaggctaaatgggccttgagagtctgcccggtgatggtttaatggccggttcatagaaaaaccgtccgattcagccggttcaaagcgggtcacatgcatgtcctgacttttttttaaccgaaccagaaagacctctggtaacggtttttcctggttgaaccaccggcccggtctggttttttccactatggacagaagccgggaagggatgctgcttggtgatggagtagacgcacctagacccagtcacagacctagaaggtgacatcacaatgcttctcttcgtagtagagcttccaataatcctgtgcttggaggaggtgttcccggatttcctcaaggaattcgtcccgctcgacgagggcttgattgacagcgcgcacacgtgctgtgccgtgatcatacacacagacctggaatggcgtcgtgcgcagcgagctctggaacaccgtgttgaagcagtattctgcccacggaagccatcacagccagtgacgaggatggtctccggtcaggcacctgaggtacatgctaatgactcggttggctgccttggactggccgtcgcactgtggatgaaaagctgaactcaggttgagcttgatgtcggccaggtgtaatagttcggttcagaacgtgctggtgaacagggtcccgatcggcaatcgctgacaatggagcttgggatgcatggagcatagttattaggaccggactggaccgacggtccgaccgggaaaaaccggaactagggcctcggccggtctggtccccttaaaagatcggatgtgtaattgaaccggagaaaaccgtttgaaccggtcaatttttatgtaaaccgggctttaaaccggagtggtcagaccgggctgtcttttggtgatgggctgacgtgaggcccgctgagcaaactcagccaaaaatcggtggaaaaggacgttggtgtggggagatttgaccttgggtcatgtggttgagcgctgcacgcgctagccaccacaccatctgttcacttttgttggtctaagacatttgcatcctataatacatcgaatcgtggttggatcggcctaaccagtggttgaaccgctagaccagtgaaccgagagcttgaccggttcattctccggtccggttttaataactatggcgtggaggcggaccaccttgttgaagaacacacgcgccactatcgtcaccgtgtaggggtggccgagcagaatgaagtgggcgtacttggagaggcggtcaaccacagtgaagatggttgtcttgccgtgcacgcggggaagtcctttgatgaagtccatggcgatgtcctcccagacttgcgtgggcaccgacagcgactgaagcaggcccgccggatgaaggtgttcggtcttgttgcgttggtaggttgaacatgtgctcatgaattcttggacgacttgcttggcatggggcgtgaagaagtccgtgcacagcctgtgaagtgtgcgctcgacgccttcgtggccggtgtgggcgtggtcgagcagcgcgggcagtgtcggggaagacgtcggcacggacacggtcattgcgaaggataaggccgccacggaaagcccatggctagcccaaccaacccagcgtgccactggaaatgtcagcggcgatcttggctaggtcctcgttcgtggtcacctcacgcctagggatggcaacggggcggggccgagttgggctgaaacggcctcgcccccgacccctgactacatcccccgcccctggccccgactggagatgtgggccaaatcaggccccgtccccgacccctctagggccccgcaacccgactagggccccgcattaggtagtcgagaggccgcaggggagagggagagggcgaccgggacgacgagaccaaaggagtgcgtggtgccgattcgtgggacttgggaggctggaagagagaggaggggaggggagagggagcggacggcgaggggtgcatggtgccggtgcgcagtgcgccgcccctgctgccctgtgctccgctgcctccgcctatgtgatgtgggtgcgcgtacgggagaggagaggtcacccgcgggtgaaatatgtcccccgttccctcccctcccaaattgccatccctactcgctccggaggttgtcaaatgccatgaacgtcagctcggagattgccaaggcgatgagctcggcgtccttcgtgcggtgggtcagggcgtccgccacgacgttcgtgcgacccggtcgatattctatagtaaagtcaaaaccaatgagcttgcttaccaccaccgatgttgcgagattgtggaaaggcgttgatccaagagaaacttcaggctgtagtggtcggggcggacgaggaacgcccgttcccagaggtatgcgcgccaatggcggatggcttggacaaggctgatcaactcctgctcgtaggcggcgagcccggcatggcgtggtgctactgcccggctgaagaaggctagtgggcccgtcccttggtgtagaacgactctaatgttggaccccgacgcatcgtctttgacgacaaacgacatgatgaagtcgggtagttgcagcacgggacccatccacagggcatgcttgagctcggtgaaggcttgtgctgcgtctggcgtccaatggaattaggggtgaaaacggtaacggtaattaccggccgaccgacgttcattttcgactttctaccggccgagccatatggaaatggtaatcgaccgaaacaaaaatggaaatggcaaaaaatatggaaatgaaaacggaaatggttttgctgttataccgatcgtttccgtatttatcgtattctcgtggaaattaccgtttcttataatgtggtaattaccgtattctaaatatatcgatatttatagggcatgtctatacttatgtatacatataacatacttatgtaaagttaaatatatatttttatagtttaatatttccgtatttgttaccgacttccgatctgtaccgatatgtttccgtccgtattgttccgtttccggtttttcgatatttccgatatcgtttccgagaaaaatatggttacagaaatggttgaggctattttccgatcgtttccgactgttttcatccctaagtggaatgcttcgcgcttaaggatagccgtcaatggtgctgcgatcgcaccgtagttgcgaatgaacttacggtagtatccagccaggctgaggaagctgcggacggctcccacggagagggttgcgaccagtatgccattgcgcacaccttctgcacatccatggccaccctgtttgcgaacaccacatggccgaggtagttgatctgctgttcgccgaagtggcacttggagcgcttcaggatgagatgattggcgcgaacgacgctgagcactgcccgaatgtgctgaaggtgttggcccatgtcccgctgtagatcagtatgtcgttgaagaacaccaggacgaaccggcgtaagaatggggcgagtaccatgttcatcagcgcctggaatgtcgccggcgcgttcgtcaagccgaatggcatgaacaagaacttgaaatggccttggtgtgtgcggaatgccgtcttgttgacatcgtccgggtgcatgcgaacctgatggtacccgaaatggagatccagcttggagaagaagtgggcgtcgcaaagttcatcaagcaattcgtcgagaaccaaaatgggaaacatgtccttggcagtcaccgtgttgagggctcggtagtccacgtagaagcgccatggcttgtggaccaacagaaccgacgacgagaatggcgacgtgttggggcagatggagagcttgtcagcgcattatttctccaattcgtcgttttgaagctgtgggtagcgatacggtcgaaccactaccgggggcttgccgggcttgaggtggatgtgatgattgatggatcgggtcggtgggaggccggttggagcgcgaagaggtcgtcaaattccgccagcaaggacggaaggagatcgtcggcgtgcagtgcagcgcaggtggatgtgaatcggttgtcgaggataccatagagtgtgacccggcaaccgcaccagatcgccatgcgcatgttgacgaagtcccacaggattggtcccaatattcgtagccactgagtgcccaagatgatgtcgacgcagctgaggtcgagggcgaagcagtcgacgtcgaacacctcggtggccacctacaggcgaagcccgtgcacgacacccgcgccgcggatgcgatcgttgtcagccaccaccacgcggagaccttggcgtaccggttggagaggtaggccgatgcgctgggccagcttggtggtgatgaaattgtgtgttgaagccggagtcaacaagggccatcacctgctcggccgcgatacgcgccacgaggcacatcgtgctagtgccattgacaccgaaaatcgcgttgagcgagatgtgtggttcatcggtgtcgtctgtgtcgtcccattcgctgaaattagccgtggtgtcgtcgtactcaaggtagatcaggcgagtgcacttgtgacctaatgaacttctcgtcacatttataacagaggccttgtttacagcgctctggtaactctgctggcgagagacaacgaaattggtgtcctggtgtgtcagccgccgtggttggtgatgaggttgcgccagtcatcggagttgacgccggggcaggagcgcgcgacgcgttttgctggcccttccgttcgtaggcacgagccaaggccatggcctcctggaaatcctcgggctgttggagctcgacatcgatgcagatgtcgtcggtgagccccgctgtgaagagctgaacttgttggcggtcggtgaggaggtcggacgtgcggctacccaacgccaaaaggcgctgctggtacgtcgtcaccgtgccaacctgagtgagatgcttgagttcacccagggaattgttgcggatcggcggtccatactgaccgtaacagagctgcttgaacgtatcccaatccggaggacccatgtgctgctcataatggaagtaccattcctgtgcagctcaagtgagatggtatgtggccatccagacacgatccgtgtccggcgtatgttgccttcaaaagaactgctcacaatgattaatccaattgagcggatcatcggtgcgatcaaacttgggaaactccaatttgtgaaaaggaggaacggcgccaccggaattggtgtcgtgcaccgagccggttccagtcgacggcggaggtggtggtggtggcggcaggcaagatgccgctgccgcccaggcgaggcgcggacaaggtggtggaggactgctcgagggccgtgatgtgcgaagtggccacgcgacggaacgactgaggtcggcgaggtcgcttttggaagccaatagcgaaatgctgctcaacacatccgccatggactcctagagcttggccagtgcatcagcactaggggatggctgcttggaggaagaagtttcctcaagaaccatggtctatgataccaagttgttacgagcaccagcaagcgaacgaagtgggtatgaatgggacacaggaggtcgaggcttcggtagcctcttcgacgccctgccagtggtggcaatttaggagaaacaggggatgagatagagaagtggagatgagaagtatagattcaatcttgcttgcctttaactatagattcgtggctctaaatagccttacatccaaactgactttttaacaaactcgaactaattgctagcaatttgcgtggtactgttcctcatccggcacgacatcagctggtcgcttcctcgcttgctttgcctcgtcctttgccgcgtcgcttcctcaaataggtgatcctgaccttgacagtataatatggagaaattgtaatggagtaatccacttaaagcattgactgaaccgacgaattgatacatgacttcaattgtcacaattaatgctcttgaagtattttcagttactcattattttttctgtgacatggactgcactactgcagtcagtttgaccaaatgataattaatctggcctgagcacagtggtttcaaatctaggttgaatttcatatttacattgtgattttctatttgacttgaagcagaccaggaaacgtccatcaactgattttatggaaacaatccaaaaggatgtaaacccaagcatgagagcgatcctgatagactggcttgtggaagtaagcttttataccaaacatttttttagttgattggagcctaaagaccacactcgttacttaccactgtatttgtgcttttcctttgtgcaggtcgctgaagaatatcgtcttgttcctgatacattatacctgacagttaactacattgatcgttatctttctggcaatgagatcaatcgtcaaagactgcaattacttggagttgcttgtatgcttattgctgcgtaagatctgactagcaatttttttaaatgtgtttctcagtttgcatctgagttttgtgtactgattttggcttgttcctatatcagaaaatacgaggagatatgtgcacctcaagtagaagaattctgctatataactgacaacacatacttcagagatgaggtttgttttgcatatctgttaacattgctgtgtttatgtccatgactaacacatagattatcaggttttggaaatggaagcttctgtcctgaattacctgaagtttgaagtgactgcacctacagcaaaatgctttttgaggttctattctctttcatctcatcgatgtctatagtgctggaatgaatcgaactctaataactctcttattgcctacaacaggagatttgtccgtgttgcacaagtatcggatgaggtgctgctctcttaatcatctcctgcttgctgcaattccataatagttatatggtgcattgcattaacagcttttcatcgtgcaggatccagcattgcatcttgagttcctagccaattatgttgctgagctatcactgctggagtacaatctactttcttaccctccttcactagtagcggcatcggctattttcttggccaaattcatactgcagccaacaaagcacccttgggtaagtggtggcatcatcgtattgaactttccatacatcttttatatcagcattcaaataaaaaaattacaagagctaacatatgcttctcattgtaaatttgaagcagaattccacccttgctcactacacacaatacaagtcgtcagagttaagcgactgtgtaaaggcattgcaccgcctttttagcgttggtcccgggagtaaccttcctgcaatcagggagaagtatacccaacataaggtataaacggcatatcctccccatttcttcagttatctgtactgttgctaatgctgatctcctatacctttgttacctttgtttctgcagtacaaatttgtggcgaagaagcactgcccgccctcagttccatccgaattctttcgcgatgcgacgtgctgaattagaaaaaaaaacaggattagttacagttgctgactgaattcttcctccagaggcatgctgattgcccccctgttctttcaggtggtttggccgagtgtagattctaagatcgatgctgcagctgtgtgtggtaacttttatggtactgatgttctttcttctttctcctcctgttcttttacctgtacctagtagatctatggttttcagtacattgtacatcttgtttgtaatggcatgattcttggaaatattagctgccaatctgacctgggcgtctcccaggttgatgtatgagggagtctctgttcgtgttgctcttgtgaaattcccaataagagcaccacattttttaatagtgctcattctgaataagttattgatcatgtccttgctatcaagtgctagcgttcttgatgtttttagtcaaaaggaatatttggacgaattgcttctcatcttctacacatatcggctttactttttcttttttcaacttgttctgttcttctgttgacagatactgcatgcagctgatgtgatcgacttgaacatggtgattcagcgagaagcttagtagatcattgtatctggacatatctttgccaagaaaaaaatatgtttttataggcaaatgcatttaagaatgtgaaaatattatgtcaatgtccctgtcaatgcaaccttcttgaagaagtcatgctcaagctatttccatactggaagctaagcacagctgtttagacgtgcatacctacgtgtagcacaatcatattgtacttagaactaattaatcatagggaaaaaaaatgtaatctacagagatcgtgccaactgtgcctttagcaaagcacggttagcaacgacaggtatatatcgcctctcttccagttgttattatggcagctaactaattggcctggagggttcgagaagattgcgttgcatgttcaccacagcaatattttgaacttgcatgattgatttgaattaatttgagccttgatgggttcataagcatgattggttcatgtatttattagttcctgtatttttcatgatctgtggttaagggtcattgtgtatatatgcgtgtacttcactgcttacctaagagaatatttgcatgtattttgtatattcgttggaaaacaatagctagcctactaaacttttgtgttttagcagaagtagttggacatagatgctcagggggtgtcactgtttataagaattttattagtgtaaaagcaactaacactattctttatgttgtgaaatatttgtaagaaattgtgattgcatgattcctagatcactgtgatcacttcatacgtacaaaggaaatatgattacaaatgtatcttcaatcattgtaagatggtgctcctaaatcgggtggcttgaataattaatatcaagtgttccagaataaatagttgtacaattaggaatacatgtacaatgcattttttttgtgggggcagatgattacatatgattgatattctattgccaagaattttagggtgtgaataagtgttttcttggcaaatgccatttgcatgtcccattgccatggcaaatgcgctggcacaaagaggaaggaccttaatatttctcctcacgaaaaatccctgcaatttctcttttaattatgaggaaattgcaatttctgtcctcaagaaagcaacaaaaaaacttactatttggatggatggttggttatcctgaataataacctgatttgattgtagtgacacaaacagcatttgcaaggaaagttttattcagttggtattaaacaaactaaatcttagctcatcagttgagtgttcagttatcacaagtaacttgacctggaaaatttgattcctggggctccctggttatctttttcaggaagccatttctgacctaattaatttgtgtgcaggaaacagagtagaagtacaccaccattgttgcttgtgtgctgcacacactcaagcatagcttgctgactagaactaaaaaatgcttaaaaaaataattttcgagctaagaattggtgtgttgattgaggtatatgcatcagttagctggtctcgttacctggctcataaacaggtgacagcaaatgagggctgtcatgtgacaagtggatacgaattttaaaattatttaggacaatagagaatggcctacgtttttgttttgttttctttcatttcttttcatggtagttatcagtattattagactaactcggcagtttgtcattcaaaatacaacaaacattggttttaaaaattttgagtcttgtgaattctgtataaaacattttattcgtgcttataaaattcataaaagaaattcttacatccccaaaagatcactctagacacgcatgcttcttctacttcttcttcttcttcttattgacgagtgtggaagttctcaccatttaccataatttgcgagaatcacttaagaaatactttgctataatttgcaacacattgctatagtttgcaagaatcacttaggagtacaagagaacacaacaagacttctcccttaatgtagacatacatggcgtacattcgatgtggcaatgcatacggtcacttgggaaggagaggagctgtcatgctggtagatgtaccattcatgccagcacattggagtacaacaccctatttgtgtattctccctcctctcctctcctctccttaaaactctagcaataaaaatcttggagaagatcacaagagtattctactatagcaaataataatataatgatgcaagttaactaaacaataataccagcatggctgctggattttgtccaacctgagaccattaggtggcactatggcaggttagctggggcattgttccattaaacttctgattaatccaatttctttttgtgattgcgagtactctcttggcttcttggccaggatgaggcgctgtgattggcttgggtgtggttgcttcttcgaggtgctcacgctacttctctctcggaaggtgtgggccccaccgtcgagcaggtgtggggccacacgcaggaatgccagtgtcatggacagtgttaggattatctatctggctgtccctgatcttctgtgggggcaagggtgtgtgttaatgtgtaggtagttatagccgatgacaaaggtgaaattttaaatggcgtgttaacatattgtactcgtgatgtgatcgcacgtattttttctcgatctatataaagaaatctagaacaattcggatagtgatatattagttaatgctatttagcaaaaaaaatcaattgatatttagttgaattaatttgctatatagacaaggtggtagtgttacaatgaagtttgaccaccaactgtcattgagtaaacactattctttaaaaaaggtgaaagttatctaggagagggatattgtcctttttatatcattctaacttcttccaggaaagttaccagtttgatgtgaactcgttatcaacgaatgtcaaaattaaagctaacactatcccagaatagttattctagtgctaaaaaggaaaaaatatattagacaactatgtgatcttctaggaaaacaaggaacaataaataactcattaaattgcataaccatatcacatatagtttattaatatctaaattggacttttcgattttataaaataacagttaagcataatctatgaactcgcttggttgtgctagctatgggcaataccaatagctaagccaagccaaatttcttctagcaataatagggcggctgcactagccggctagccctatatttttgctaatttttccttatgtctttttttttgcaaataaattacttaaattaaaggggtgttcgataatgttagatgtgattaatttacaacctacagctacagtaaaaacaagaggatctatggtggcagctgcagctacggctgtacaattgcaatgtagcatagccgaacatcctctttgtaattttattggcatccattcagttgataaagaccacagagtcatagtaacacagaggatcctagcaaaaatactcttcctctttctctcccctccagcgcagcttgcaagcctccacgacccaccatcatgtcatccgtggcttaatgacaccccttccataatcttctccattttgacacttatgcccctgccacctcactgcaaccatggtgtcatctgcaggggtagacatgtaaatctctcccaagttcagggtggctttctggccagcccattatatatcactctcatggcaaggtggctcctgtactactctgcccattgataggctgctggtgatcacaagctacacaacacatcacacaagcaataggcatctctctcttctttctctttctcctccttgcttcatgtaagcttcttcttctctagcttactttgatcatttccatggtttcatgcatgcatgtttagtttcatgatatatatgaaatatcctatggatttttgttctgtactttttttaagaaggggtttttgttatggattttttattgctgttggacagttggagtactagagattaatttcttgaaggagagaaatgacaagtgtctggaagaccaaggttctcactggactcaacaagctctttgacaaggatggaaagaaggctgctgctgctgagttcttgaaatcattcaacaaggtagctacgaattcatacacagagacacttgaaagttgtaagtatagtttgtgtttatttcacaattttttttattgattgggtgtcatatgtatttgtgtaggaggagattggcaaggagattgatgacaagaagacagagctagagcccaaggttgtggaggttgttgagtcatctcctcctgagattaaggtaataatttttcaggtgtttcataggttgcttgaggacatccttgctcaagaaataataatttgcatgcttatctgtaaaaatattgcaggctttgttgaaggacaaaaaaacagccagcaaaatcaagaagaacggtcctgcagtcactaagttccttgaggaattggctaagattggtaagaattggctaagttctaattggcttgtatttgattgcatggggtattgactagaataatcacaatatgtaacttgtcccctttttttatattttcgttcaaaaatgcatttttaatgaaaataaagaacctttatcacttatttccaaaatgaatcgtaacataaaaaatgagttatttttttaaaaaataatttaggtgtcatttatgaatcacctttttttcccttaaaaaatagtagaatccgtagtttcttttagcaatcatgtttattcattttcttatgtttttattcgatagagacctatactatttgccctctgagcaacaatctagactttattccctcttgctagaaaattgaacttcagaggaatcttctcgtctaccatgtttccttgaacagaatctcacatgcaaactccgtttctttagctgacgcagacaagaggccaaaccagtcgaacaaaaaacaaacgaaactaacacagtttttttttattaaacttcagccacttatttttccaatcatatataaaaaccaatccttttatagtggattaattttatagtcttaagaggtattgggaggcatcaatatttttaatacaagttttggtacctcctaatactggaggtatagaaaggtattaaattttacattaagaaatatcggtaaaatcaattttttatatatctgaaaatatttgaacatgtctgttcctgaatagacatatttgctcgttaggtagtcctaaaaattatataatttttatgcaaacaataaaagatattttaaatttccattaatatttttacaatgaaactaatgcaatcctctttttttttttcagatttccccggagccaagccggtgagcgacgcggtggccaagtccggcacgacgccgctctccccggcgatcgccttcatcctggagaaggtcgcgcctttcgttcccaaggaggagcccaagcccgagccggaggcggaggcggcggcggagaccacctcccgggaagtcgccgtggaggaggagaagaaggaggaggaggcggcccccgccgagcccgccgccgccgccgcggaggcggcggcgccgtcgacggaggtggtggaggagaagaaggaggaggagaagccagcggaggcggcggcgccggcggctgagccggagaagcagtagtgatcactccagaagcaagcaaagctaagctagcttagctaagcttagctgatggtaattaaaatcaagattaaggttaatgtgatcacactactctctctcagtctctgcacaaaaagtaagtaaaaatcaagatacacacacttggcatgcaagaacatttgttattgaattctttcaccctttgatcctttcatctctctcctatatatatatatggtcgcctcatcggttgtaaattaatttatgtggggtttcttgttttttgggggtgattaaacatgtgtaattatattcatatgtttgttggtcatgatcataaggagcttgtgtatattatccatatctttttttttcttttgtttacaaattttcggcttgaggtgtgatgaagatagacatatatatgcaccctctccaattgtaatacaaattaatggctgtggatatatgttcatatggtacagtttgttgttgttgatccattggttaccttggggggagaaaatctttgcttacatgtcgtgatcaacttaatttgattgcgtatacatactacgtaaacaaaaatatggataggtgggaaggacatgtctggcctttgcaattaattgttccatgagtgataccatgtatgatatgcatcttctcgtacatactagtacgtacttcatctgacgtttggagcaatattcaatcaaatttgtagaattttgaccatcaaatctaatgatattatgatgccaaggcaaatctaactcaaacatttggaaaattattgatagtcaaagctttaaaagtgtaactaaatcttatcctaaatgtttaattcggatctatagaatcttatcctaaattcggggtaaaggcattatctagaaaattgccacacatatagattgttgttctgccggccaataaattaatttgaccatggtatatgtataaaatctagtaacaaaagtgtatttctcaaatatcaatattacacatatatatcccatatttatgtatcaaacgtttatacataaataaagtccaccaatattcttttaggaaaacatcaacgcgtcatatagaaaaaaaaatcaaagcttgaacattggacttcaaagctactggacctaagtaatgacatcaccttgatatatatatatatatatatatatatatatatatatatatatatatatatatatatatatatatatatatatatatatatatatccaaacttttcctcacaagataagcacgaggaataatataaattcagtgacaaataagctgggcactactactactgctgcatgtgtaccaaatcatggcacggaagcttaattatttagagataattacttaggaacctgaagcaagcaagcaagcaagcaaactgagccagatatcaatcagtgccaggcgaaaacgacgtgagcttgatcctaatcacgctctgcttcttcaatcgatcgtcactgcacgcatatctttaaaggggaaaaagagagagagagagagagagagagagagagagagagagagagagagagagagagagagagagagagagagagattgagaggggagttctaaaaagaaaagagttcttaaaaaaagattgaaagggagaattaattaattaattcaacaaaaagagaggacagagagtgagggctcaaaaagaaattaagaaaaggaggagtaaagatgttgattgatatttaagttttgccttgatattttcttttgttgtttaggacaggggcaaagtagtcatttcagctctttaattttttttcccttctaataccttgggcgctttgtcgctgttttagttcatcactcaagcttgcatcacaaggtccacacacatggagtacttcaatgacaatataccctgtcgccaggaatgtcaccgtgaaaaataggctcatagtatgattaaatctagctagattattcatctattggcttaattaattgggatttattcactttttacctatgaaataacttcttgttgattcgcttcgtctggttctatttactgagagttaggctgtgtttggaagtattgtttaggtgggctaattctcttttttcaccgttaacatgctttccaaactacttaaaaagtgtatttcgtaaaaagctttctatatagtttttttaatcaaataaattaatttttttcaagtctgtagtagttgataattgatcacgtgtttttcctagtagttacatataccaagttcgtttagctagaacggattagctgcaaccgagcttgaacataaacagataaatacaattgcttacagctgaatgaattgcacaagaatgatgtggctatttttaagtttatgcactcggtagaaaaaatgggaaagattcataggaatctaaaccatagggaaagctggttgtcaaaggcacaatacataataaaccatgggagctagattccttccattggtcgttttcggaaaggataggtttttgataaagacaaacaggggatggaatattctttttagtggtatttacctttctttgactcgctttagtttgtctttatataatttgtatgatcatattatctattatctagggagtaaataccataaaaatatatttcctaagaaagtgtattatagaaaaaaaaactaactcg

SEQ ID NO: 9745 - DNA, 44821 bp, Oryza sativa
gtcatctattaaaaaacggaaggagtatttaatatgttcgtttgtatctgtttagttagaatttacaattttgggcatcgtgatcatgtcgacgtgctggtttgacctttggtaggaaatggcacacatgttgttttgttcaaagaaactcaaaacggatcaagtatagatgtgccttttgttgttctagctgattctttttttttcaattataaagcttcaaaagtatattttgtgatgcgttcaagacatttgcacgacctatattatatatacctgcatgttgtattatattctaaacacatagtatgccctgtttggctcgatattgaaaaactatcatgatggacagtatgctataggagacatggggaaatgtaaaaagaaaaaaaagaattaaaaaaaaggtgaacgcatatgatctgatgatccgtatatatgcatttgtcggacctgcatttaccgttcttggagatgctcttgttcattggccttgtctgtttgagttccatataaatgtatctggaacaaattctgttgtctcacattctgcttgattttgaaatccattgaattctgcttctggctgatacttatgaggtcaggcagtaaatgatcaataaaccattatcatcactgatttgttactatcctaatctgtgcattttgtgcaagtttcagatgaactccatgtcatacaacaagctgtccataacgaatgacagaatggatttcaatacccgtggaaatgcagtccccaatggcaaattagatcggaatcagtcaggtgtttcagccaatcgatcctcagcctccaaaccaacagcacgctccaagaagaaaccggatcaagctgacaaaacaaccccaaatccagcgcagaattcagcatcatcagcaacaagatccgaagcagcgaccgtcacgacgaccacgaaatcgccggcgatcagcgtggacagaagcagcatcgcgagaagcaacagcctggacagcttcagctacggccaggcgaagcggcacaccggcggcgacagccggtgggacgccgtccggtcggccagctccgtggactgccccctcggcctcgtccacttcaggctcctcaagcggctcggctacggcgacatcggcagcgtctacctcgtggagctcagggacaccgacgccttcttcgcgatgaaggtgatggacaaggagtcgctcatcagcaggaacaagctggtcagggcacagaccgagagggagatcctcggcctccttgatcatccgttcctccctacgttgtacacgcacttcgagaccgacaagttctactgcctcgtcatggagtattgctccggcggcaacctccattcgctccggcagaggcagctcaacaagcatttcaacgagcaagctgcaaggttggttttggtcacattttcaagatcactccagcatatatcctctttgcctcaacatactacatacaatgcttgcacattgacatggatatatgtcattgagtaaatttgcactttacaccaggtaaaacgtactactttgttttccctttacaagaggtttagcacatgttttagctttacaccagggattattgaagtattccctccgtttcataatgtaagtcattctagcattaccaacattcatatagatgttaatgaatctagacacacatctatatctaaatttattaacatctatatatatgtgggcaatgctagaatgacttatattatgaaacggaggaagtaagtttcacttaacactaggacacatattatctaaaaacactaggacacatccttaaacctatataaatttgaagaaattttataaaagtctgaatggaattttctgaagcatggtctaaattgaagaagcctcaaaagttccactcatatttcacaaggtttcacaacgatgtacgatgcaacctagtacaaactgcagagtatttcaaaacaccctggtataaagtgaaaatgcatgctaaactcggtgtaaattgcctttaaatcatttgctcaccatgattctgaaaatctctgaatgttttttttcatcaggttctacgcatccgaggtgttgcttgcgctggagtacctgcacatgctaggcattgtgtacagggacctcaagcccgagaacgtccttgtccgggacgacggccacatcatgctctccgacttcgacctgtcgctgcggtgctccgtgtgcccgatgctggtgaagtcgtcgtcggtgcacgcgggcgccaacggcgtcgtgaagggcctcgccgccggtggcggcggcgacggcgagggcgtcggcgtcggctgcatgcagccgtcggcgttcttgccgcggatcctcccaaagaggagccgcaagacgtccaagtcggacctcgggctcctccacggctcgccgctggagttcaacgcggagccgacggacgcgcggtccatgtcgttcgtgggcacgcacgagtacctggcgccggagatcatccgcggcgaggggcacggcagcgccgtcgactggtggacgttcggggtgttcctctacgagctcctccacggcatgacgccattcaaggggagcagcaaccgcgccacgctctgcaacgtcgtcgagcagccgctccggttccccgacggcggcgcgttcccggcgccggcggcggcgagcggcgtcgcgcgggacctcatccggggcctcctggtgaaggaccccggcaagaggatcgcgtcgaggaggggcgccaccgagatcaagcagcatcccttcttcgagggcgtcaactgggcgctcgtgcgcagcgcccacccgccatcggtgcctgaccccgtcgacttcagccagttcggcgtgagggagaagccggcggcggcgccgacgaaggtggccaagccggcggcgagcgattcctcctccggcgacttcgagtatttctagctcccatctgtgagtatttctaggaactgaaaaatacatttagatacagaaaaaaaatatacagtctattgattctttgttactgttgtattgctccttaattacagtacacccatacatgattcttgggatcctggtatacacatgtacaaacaatgtgatagcttgttgctaacaatgattaatgaactgtaaaatattctgttacactactgacagatgcagatgttcatttctttagctgatcaagctttgccttatatgcagctcatttcttggctgatcaaacctgcgtcatgcagatattcatttcttactagcttacctgaacaaaattgcctaatgcagatgttcctctgttgttataggctatagtttagctgatgaaacttgcttcgcgagggacacactattctttgcagaattgcagtctttgaaaaaaaaaatgatctacgcgaaccttcgagtttcagcagttcaaacttgctcctaaagggtttacaaatgcaatggaggctaaaaaaccgcacccctgatcggtaattgtagttaccgaaaaaaaatagtaaaacccagaaaaaaatagcaaaaatttaaattttagtttgattttagcttgatttgttgttcaggaggtctcacaaaccagaccagcatcgatatgtctactgtgaatatttcatttcatatttggaaccctggctaaacctccgcataaaccaaatttgcggtactttacaatttcgagcataaataatgtctggagttgaaagacgtcatcaaaatggacgtcttcaaaaccaaagatagaacacgctctgctctgtctgttaccacgtaaatataggcatatataaactagtgcaacaggttctattaaaaatttaaaatgcagcaggttcaaagcctaggctggcagaattggaccacgtttcgatcatccaattggtgtatcaccagaaacagctactaaacaaaatggctagcactgaactcaacccgaattcttgcataattaatccgaacgatcttgcctccaaacaaaaaacctacacagtatgtgtaacgagtgctatgatctatacaccattttcacttttgagttaggcaggtgaactgcaatggtcaaatgctctgacgattctagctgctggtacactcaacgatctcatctgcggcagccggcgagtctcttgtcagtttcaggaagtgtgtgcggttcgcggccaagtccttcctgagcagttcagagtacttctccagtgacttcttgaaatctgcaaacgatctgttgttgtcgcggggatgcttggtgcccttcgcagaggatgatccaacgactgcgccagatatgtatgcgtcgcacgcatccaggatgacgcgctcacgctcatggaagtggcgtgcaacaagggactcaaaatgctgcagtgaatgaaaggtgtgtgtgagagcgaatcgatctgcaagaggtatatggaactgaattgtgtttataggacttcataggtacatatggtgatgaactgatgatgtttcaaaatcaaatgttcttgcgctgatgcgctcacttattcagctgtttatttgcaataacatactgtcaaaactccaaaacacattatcacaatgcgtgtctttgttagttaaatgtgcccacagataaatttttaagttggcaatttcatgacgcaacacaacacaattctcaagccggaaaatcgctctcctggcaactgaatgcctgctaaagagtttcacggagtgacaagtacggttggtacagcatgactaatgttatagtagttcctaactgtatatcagtatttaaaagcatataggcacagagagcagttcactttatctggatgactgtagaagcactgatataaccctgacagctgaaattcttctattactatcttttccagcacagagacttgtgaaattaccacttttaacttgacgagagatgggggttctgtagttacctttggaggcttccgaagtgaatacatcattgtcctgcaggatagtaggaaggcagtctgattataagccaacgagtacttttctccaggagctgtattagccgaatttttgttgcctggctcattaaagtatggtttatcattcaacacaagaccctggatggaaaccagcacctgcagtatggttgattttgacttgccccacttctcgcatccagtaccccaccaggtgttcagcaggctaaggcaaactttcccactctcatacaagtttggatttagccgaagcccacccgaatggtaatgaactttctgtacatgttggatatgattttaaagagattatattaatgatggtagtaacatgaaaataatggtgcaaagcgtgtgtgaactgtgaagtggttacataccggtggagattgtgggtattcagaaggaaagcgaacatcaaagaagaacagaccatcatgatatggagttccagctggcccaacaatagcagccctcagcagatcaatcctatcctcataagctctaacatagatagattctgcatgattgaaaccatgctgagatgcaagttgctagtactgaagacatcatataatttcaggcacagctcctctaaacgaaagatttaaggcacaaaagtaaattgtatgtaatgatacttgtgatacccttcggtgacatgatttgatatatgtagagattaatttctatttgtcccattccccaaacttaaaaaagattaatttctgaatacatgttatatgctgctatcacaagattacatggaaaagggtgacaaatgcagaccataactaaaagatatgtggcacacaacagaaactaatagatatggcaccaataaagtattttatacatcaaacctagacaatgtcattagctagtttgggactcagcaccagtcatgccaagactacaaaccacacaagcaaattggtatagcccatacagggcatccaactatctttaagtctagaaatatctcaaacgtattctgttggcatgtgatcagatacaattggcataaaacagcaggtctattataagaaaggaccattatatgtattcaccatctaggcactggcggtttgataaaaatgcatacattgatttgccatataaaagcatgtactgaccaggtagatctttctgtagaagcttccattcattttggattgtcttcacccaatctttggaggtctggtcagtggtcacaagtaaagacaggaaattaattcacagttggatctagtgatagaaatagagttcataaagcggcacagcttaccttccctggtgaattctttgcatagtaatgatcagaaaaatcttgcacaacatcaaattggttaaacaaattgtagccatcactttcagatccatattctgtccttgtcattgatgatacaacacttgaacattcaggctcatgtttttgcactaatagcacagtaccattcccacttgaaaagggatccaaaaggctgttgtttgtactgacatttgcagtggggtgtggagcggcaactgaaagtcagtagagtaactaatttcaaaccacgatgttataaaaaaaaagcacatcaatcttaaagacagagatacagaatgggatatggaagctcgcttaactgcaaaaataaagaggtgtacttggcatcagtactaactactggcagaaaaacagagtgatgaacatttagataatgtgtagttctgttaaagtaacaaatatcccccttttggggaacgggaggggaggaccctaaattttcattgattttattctttaaaaaacaggttcagcaacatgaagcatgagaattactaaaacaaataaggaggaacaagttgcatgaaaagatacctttacaaagaggattaatggctttgcctgcatgaaaaatattcttttattagaaaacgccaggcagaagagcaaaacacttgattttatctttctgaaacaaaatgagtagaactccgtgcttcagagggagatgggtatacaggctaatgaaatattaagtttgttttttctttatacagtttaacaaacttcaaaacagtgttgacaaccaagactcatggattcataacaccagactatccactagttcactctccagtggatgtatccaaccacactaatagcactctgaatttgtcaagattaagtttatactttacacatcacattttggtatactttgaagcatctggtatagcaatccagaccaatgtacagcacccacaattatccaacaattttaatccattatgaccacctcatttgatctgcagtatcctttcaccggaaaacacattaatattttcacttttttttaaaaaaaatgcagaattcatggaagaaagagtacacaagacaactaataatatgccatcaaaagaggaaagcatccttggatcaatcaaacaaacagaagcagctgatgtaaacatgatgttaaataggggcagtagtgcagctgtacagcacctttcttcttggaatccttcttcttcacacaaaacagctcgagcaccttgtttagaaccatccttaaaacccgcttcacgcgaaacgcacctgaaaaacatgagacgccatcgtcagaattagatagccagaaaacagaaatataggcgtcgtccaccatctccaaaataaatcatcttctcaccaagcgtaaccgaaaagggaaaaaaaacacaatcttttggagaatcccaactcccccaagcaactagtattttctcccttatatttacttctatttacacaacacttcatgagtgaacttttgggttggaactcttgttcatctgcctcacctgtcggcgtctaactccacactccaattccaatcagtgacatacacgaaggcttgtccaatacgatcgggacaccattacccccaagaacagacaacaacaacaacaacaacaacaacaacaacaacaacaacaacaacaaaaaataaaaaaaaaagaaagaaagagaaaaggagaagagagaaggcattgaaagcaagaagccaagaaacggcaactacagcaacagaacaaatccgaaaaaaaataaaaataaaaaaggaataaacttggaccatcgccatctatgaacaggagtatcaaccatccatccaccacccccaattccacagagaaaaaaacgagagatcgcgcgaaggtggtgataatccccgatcagcagccacaaaaaaaaaagaaaacgaaaaaagaaccctttccccgcaagaacgatggctgctggctgcatcgatcaagaagaagaagaagaagaaaacctcgggtttgtctgaggtggtggtcgcgctctgcagttgagaggggccggaggaggagggttttagttgcagtcggtggagacgagactgcaggaggcaggaggagaagcggagacggacacagggacacttgctgctgctgctgctgctgcgttgcctctaccacttcggcgagagagagaggcgcaatggccgcgaggagggggtggaccgcacccttgcgtgccccgcgaggaaaagaaccaagcaaaagtgtagtactactcctactagtatctctccgccgctgcgtcgcacggacgtcgtctcgtcgtgtacgtgtaccggagtgtggccccagccgtatcggcacgcgacgtctcgttcggcagaaaaggaagtctggcgctttcccccaatcagacgaccgctacggccacgccacggcctcaccggtgtttcccttgcatgaaatcaaaatttatttccgtttttaatttttcatccaagtttatttcttatcattagtttctaaattgctaaaaatatatacataaaaatttatttataaattattaaaataaaactaatttgatattttagatgttgctaaattttaatataaacttgatcagatttaataaaatttgactagaaaaaaattaaagaatttataatatacaatagaggaagtagaccctatctctatggaaatcttagtacggagtactccctccgtttcaaaatatttgacaccattgattttttaatacatgtttgaccattcgtcttattcaaaatatttattcaaaatatttaagtaattatttattcttttcatataatttgattcattgttaaatatactttcatgtacacatatagtttaacatatttcacaaatttttttaataagacgaacagtcaaacatgtgctaagaaattaacggtgtcaaatattttaaaacggagggagtatattagtagccatacggtatattacgggaaaaagataggccctacgtgtccacgtatagggataattctatgggcgatctcgcgacgttctgggcgtgatgcgtagtagtagtaaccaaaacaagccttttgctgctaatgtaatccatccctataaaaaaagattatagagtacggagtacttttttttacatggcgagatgcgacaaagatttaccttctctttttttgggtttgtttttctactgatggaaaccgacagaaatttcagctgggattctggcaaaaggcccagatatgatccggtgaacacaaacggttctggctgggctacctgtccttctggcgcagttgaatttaggcctgtttgaatgagcctcaatccaggcccataagcatgagggtaagtgctatgatagatatgactattgtctccaaatttatctattttattcactcataaagcaagaggcaacccatacaatgtatcacctctagtttacaaataccaatatatctaatactctcacatcctttttgaaatttgtgtggaggttgcctcttaatttaggggtggctcatcatctctctcttcacttttctcctccacctcatcacttaatccaatgtggcacttgtaggagcaacatataaagcattatagtacttgccctgatgtgctggtgtttgagtcacgtggaggaatatgtttcattcggacttggagtactgtgttccaaagcctctgtgattttaattggaaaatccataagtaaattttcgtctctaatggtatctaatcttttagggtatgtttggataatgggaaatgaggagtgggattgggagtgaaaaatgaatgaatggttataattaaatggaagagggagaataaatggttaggatttaaagatgtcttttggtgggtgaaaaatcatttccctaacacattaggcaaacaaggcattaggcttaagttgttagccttttggattatataatttataaacaaaagtcttaataagttcaatggtggagtcgtatctctatctcactaatagtaatagtgggaatctagttcaaatcctacaaaataaaaagatcgagaaaacatgattttttttttcataactccctgtactccctgtctccatcacatccatttcaaaacggtgcttcccaagtttgcagtacagctaacgggtccttttagatcagtaatactttttgaaaagttcctcaaacagaaggcattttataaagaatattttcatgcgtgctaatattaagatatactaacccaaagacatttttttcctgatcacttgaataaatacagtggtattagatattttaagggtcttttgatttgtaggagaaccataggaattttggaggattttatcttatagaaaaagattcatatggagacatttgaaataaatgattaaatcatatcctatcctttgatattcctatggaattaaccatcctataaagatttcggagaaaatttagtaagagtttcaacctattggaaaactttctttgagtctatggctgtgtttagttcacgccaaaattggaagtttagttgaaattggaatgatgtgacggaaaagttggaagtttatgtgagtaggaaagtttgatgtgatggaaaaagttgaaagtttaaagaaaaaattgggatctaaacacggtgtatatctctcatcctattcatgtgctttttcctgcagtccaatcaaatggtaattgcagtgtttttcctattcctctattcttttcattcatacgattcaaaggagccctaagactctgtttaagaagagaggaattgagaaaattgagaagatacacaaaacgagataagctattagtgcgtaactaattaagtattaattttttaaacttgaaaatggattaatataatgatttttaaataaattttttataaaaagtttattcaaataacgtaatgtattacaaactaaagaactcggagcctaagtacaccacgggttctttgtcagaaaccgtcggagattcgtgagatggggcgaagaacagcccacacagcgcattgcgagaggcatagccccgtgcttccagccagcaaccagggaggagggccgccagacgggggaggaggtgagggccgaagaaaggaggaaaaagcctcgctgttcgatgtccactcgccgccgaggccactccaccatgtcgccggccatcgacctcagggtcgatttccccttgtagcatccggccaccggccagatccgcgccatcggagaggagctcgaggtcgtctaccaccagatccataccagcgagctccgcatcaccctaggcttgattggtatagttggctacggctgcaactgtgctgcatctacagtatcaataacatatttttgaattggagctgttgcagtgctgtggctgtgcagcagcagcaaagctgaatcgaaacaaaaaaaattaagaactgaaacaaaaaattttagtggctaaaatattacatatagccacttgcactatcaagaattcagattttggatcatccataaccctagcctacgtgacacccccagacttgtcaaatatgtgtgacgcacgtgaataccttgtcttctttctgcgtgtactccctccgtcctaaaaacacccaacctaccacttagatgtgacataatttagtactccctccatcccttttaagtgtaaccatgaattttcgtgtctaattttgatcgtccgtcttatttgaaaactttttataattagtatttttattgttatgagatgataaaacgtaaatagtactttatgtgtgacttatatttctaaaattttttaaataagacggacgatcaaagttgaacacggaaaatcatggctacgcttaaaataggacggagggaatacaacgaatctggatagagcctgcccagattcgttgtactagattatgtccaggttgagtttttttggacggaggaagtacgtctacccatattcgttgtactagattatgtcccatctaaataattggttgagtttttttttggacggaggaagtacaggggatataaaaacagatttagcgaaaataaaagtaggccccgtttagatcccacctcaaaattttacaccctgtcacatcgaatacttgaacacctgcatgaattattaaatatagggtgtgtttagttttttgggtgtaatgtttttgaagtgtacgaacgcacatttaaagtattaaacgtagactaactagatgataccccgcgcattgctacgggattgcaaaggattcattgagaaaaatataaagataaatcatatttgtacctttaagaactatatcagttagatatcatatatagcatacatcagtatatattgcattcgtgtgatgcataatactgaaaatatggacaaagttaaatgcgacccataaaccatccaatttaactggagaacataatttaaatcatatcgaaaaagagtgaaattgtacagatatagagaattaggaaataaaaatattagttgcgtgagcatcacttgattgaaccttctataagaggacatctattttgagacatgggagcaacaaataaaacattagcagagacaaaagacaaaaaaaataaatcaatagactaacagaaaccacatgcttgttttgttgctatgcaaaacgaatgcaacgtgcaacagttctgctcgtcacggtactattaaaatctaaactatgacgtgctttttagtggtgcacagtatagcatgaaaggcatactgaattaaaaaaaaagtgaatagaattttaggcttacaacacaatttgcgcagtatagcatgaaaggcatactgaattaaataaaaagtaaatacaatctttaggcttacaacacaatcaattaggaatatttgcaagaaactatatgatcaataacaaatattctgtgattgaccgcacctaagttagctgctagaattgttcaagtgtttattcaccagcaagaagcaagttgccatatcaatattttaattattgattcctctttcccttgcatattctagtaaatagtaataggaaaataaaatataacattagataaaatataactctgcatcggagtataacaaattagacagtagcaactacacgaattattgtggtgtgaatacaaaggaaataccaatataaattgccaaatgttggtagtatgtgcagtgcgcaagacaattaactaaaggatttttttataagaattgtattgagtaataaatctgacactcgggtaaaactgaactattaattctttgttaaaaaaaagaaatatactgaaccaaccatccatctgtttcattgtaacgacatttttgttggtgatatatacatatacataaaactgcaaactcaatcaggccaccattgaccgttggtgaccttctataatcaaaggtcatggccacatgagacaaagtgactcaaagatgatagtgtgaaggtataagtaaaatttaactatttcaatacgattaagaaaccaacataaaaatgaacaaatttgaggtgataattaccagctcttacgaattatgaaaaaacaccagtccaccttgaattcgctcttaacatgaaaaagccaccatttgatgacaacaacagggttgaaggatatagaaagatccatccttataatatgatcatcattcagccattccgtttaacatatgacagggacatctgaaaatatttccaaccaacgccattccataaccgtcaattacaggaattaaaaaacggattagcagtaaaatactcaccagggagccacagcctatgggagtgaggagctccctggtgtactgctggccaggtaagggaaccgacgcacggggagggagtgagggagggagggagggagttgagcgggtggaggggaagcagcgcaggggaaggggaaccatgcggcgccgcatctacgtggggaaggggagcgaacagcttggggaaggcaaaaggttgggttgttgggctgtcaaatgggcttttcgtgtgtaatacttgggtgttctcaccaggataacatatgcattgatatcataccattgagatttcatccaacggctgctatctttttggatgacgtggatcaaccacagtgcagagaattggtaataactgcagttagtggggatcacttgtataggtatataggataacaaaacaaattacagattccgcctgtaaactgcgagacgaatttactaagcctaatcaatctgtcattagcaaatgtttactgtagcatcacattgttaaatcatggcgtaattaggtttaaaagattcgtcttgcaatttacatgcaaactgtgcaattggttttgtttcccacatttaatgccttatgcatgttatcagggttatgggtaccacatacctaataatagttgactaagcacgataggacccaccatataccaagtctcatacggaatcatacctcgtatatagaaggagttctggataaggaaagcaaatagagttgtatatggaaacgaaaaggactactcggatcgtatccatgcttatctccctagttctatttggacaagagggcatctatgagtataaatacaagaccccctaggaggagaggggttaagccacaagaccaagatcaacatagatgaatacaagccaacacatgccaagacaaaccgccgaatatcgacatcaaagataagtctagacaaacccaatattgtgtctgcgaaagccaacaagagggatctagcgctatctctgatctcgccgagtgcggatttgaggaggaaggctaccctgtcgtcgactacgagttggttatccatgccgccaagtcgacgacagctagataggttatcctaattattgtattggtgtgattatgatgaataagagcaataccggcttcggccaacaggatgtaaggctattacctgtcagataaggggcccgaacctgtataaaaacccttgtctccgtctcttttacttcaatctcgcatataccctggtaccaacgatccatatactatgcaaaataccgttgtcgcggtctcaaacgtcgacatatgtgtccaaacatttgatgtgacgtttttggccaaaattttttggatctaaacaagacctaggcttaaaaatataactaattatatagattacgtgtaaattgcgagataaatcttttaagcttaattgctccatgatttgataatatggtgctacagtagacatttgctaatgacggattaattatgcttaataaattcatctcatatgctaattagcacacgtttactgtatcatcacataggctaattatagattaatcaggctcaataaattcgtctcgcaaattagtgtagggttatagaataagctttataattagtctatatttaatacttctaattagtgtctaagaccctgtttagttctaatttttttcccaaaaacatcacattgaatttttagactcatacacggagtattaaatatagatcaatttaaaaactaattgtgcagttagggaagaaatcatgagacaaatttttttagcctaattagtccatgattagccgtaagtgtcacagtaatctacatatgctaatgacggattaattagtctcaaaagattcgtctcgcggtttccaggcaagttatgaaattagttttttcattcgtatccaaaaactccttccgacttccggtcgtctgatgtgatacccaaaaatttccttttcgcgaactaaacaggccctaaacatcaaatgtgacatgtaagatcaaatttaatcgttgatccaaacaggcacttggggacggagggtgtagtaaaaatctcctgcgatattgctgacacctagtcaaatcagtcaccacttgcgcggagctgaagagccggctcgttcctctccttcccgttcacatttcaaaacctcaaagcccccacaaacttcggaatcgaggtgagcgggagttcggagagatcaacccgagggccgccggccgatggcgatagatcagcccatcaaagcaagttctttcctctccctctctatctgtatctctcgtttctcgattaaacccagtttttttgggggtcatttgcttcgcttattcactgttcatccggttgattagagaccgagggttctttgatttgttccactctctcttgaatcatcgattaatggcggcggatttgggggctaaaagtttttgtcttttgtgttagatttcatcttcttagctgcttttcttgttttgattcttcgatccgagtgggagactgaagagagtgttctgtgtgtgtgagagagagacgtgttcttgaaaatttccccatgctttttttttcggatgacggagtgatctgatatttcagctatgttatatggttatctgtgatcttcttggagattttgcttcctctttgatcaatttggttgtactgctcgttcttggatacgatttttgttttctgtttaatgactgaaatattggtgtttacttccatgggtaatctgaatctaattcgcttgtcctttggttggttgttcttgagcagaagagagggagaccaccaggttccaagaacacgaagaacaagatggagcagaagatggaactagtccatcaaaggctcgccttacttgacagcagcagtggcagcgacagggatgacgatattgggccgagggtgagattcttgcattatcatttcccattgatgcgatacatacattgttgttgttgcaaggcattcaaatcaggacaggttctaactggaaaaaatgggagaggcatatactacaatacctgggtgtatgcccaatctggattcttaatttgataatattatctacttctacttaaatgctaccctgaataattcatgtatcgcagcacatctgtatgttgatatgtcacttcacaatctggattctatccgctcgttcttgcatgtttatgaagtgacatatcacatattaatctactccctttgtcccaaaatataagcatttttagctatgaatatggacaactgtgtgtctagattcatagccaaaagctgttacattttgggacggaggtagtatcttatcaaatttttttcataactatttggatgacatacaagaaagagggattaaaaagagtttcccgtaggttcacaaattttgtaactctgaacaggtaagtcatgacaaattatcagatgctgtatttgcttaaatggtcactttatgtgttaactgtgaattttatccaggtctataaagtactatagatgttaatatatttctctataaacttgatcgaatgagagaagttttgacttaggacaaaactaaaagaccttgaattatggaaaggagggggtatttctagcttatgtttcttttttctgttaatgctcattaacatctggtagcccctataataatcaagggttaattggatctatgccattataagaatcatgtatttaccatgatatcaagaatatatgttctttttgtacttgcagaattataatcttgcttttgttgttgctccacaggctataataattgattgtgatgaagatgatacggatgacgtgatggaggttgttcctttgaaagtaagggcagtgctgctttagttagcgggtggaattttgtcactcgagaagacatccccttgttttgtgcatgttgttcaaaaagtcataaaaaattgaaaacataagatagatcaatatgtaaaatatctcttcacaaacatgcaagttcaaattcgacctatacaagtagaaaaacaaaaacaataaatttgattacaaatagtgtgttttgttctatcgtgtcacatattgatctataatgtcaaatcttcttaaacttttttatgatgttttgggcgacatgcacaaaacaaggggatgtctcctcaagggacaaatagacttttccctttatatgattatctgtttacaatggtgtaagtttatatgatataaactacatgtgctctatttagagcatccctgtcaatgatgctacatcattgatagcactctatgtagcaacaatattttcaattgcacaaactcacaatatctgtcctccttgttatctcataacttcatttattaattctcatctcaaaaacaacttattgattaagtgttctgatttttcttggatttcttactgtgcaagatgctgatgccaaaggaggtggaaaatgagcaaagaacggttcctggcattcctcaaacatgcaatacccagaacactagcaatggacgcactaacaccactgaagtaagatatgttcaccaactctatctgtattgtatgaatgcagtatgaatgtaattgtaagaggactttcagttttcatctataaagctcataatacccctaaagatttttatatcataagccatagcatttaggatttcgattggctggctgaaatctccggttttccaattcgaaaaaaaaagatcacataatgtaatcctggaacacatctccaatctttattcagtggactttaccatttcctttccaattcctgtataatgtatacgaaaccgttgcacttttgagctccattactcataactgaatgagttgtgacttaacaggtgccagttaagggccaaaataaatgtgcaaggtattccagctctccttgttcttcttatgaaaaaaactacttatgtagctcacaagcttgttcaatcacacgcagttatcttccaaaaaaatctagtgttcaggcgttctgtggatctgctatgaagagagctcaagagattcaaacgaagttaccagcagagcatcctagctttgttaaacatatgttacattcacatgttgtcagcggattttggctggtaagggttgtagattactaacttttcttatgcttgtcaatttatgaagccttagataattgtttcttatgaacaggctgtggagaagcaccttctgcagaaacatacaaattgcatttactattagaagattttatttgtcaaacaaatgctctcactaaaattagaaagtaaaagtttaaagcgtgttatggatcttatttaaaacttcctactaccctattaacatgttctaaacttctaatctttttcattaaattttgttttaggaagagaagtctcacacatacaagttatatccaacttatgtacatttcttgcatgttagctcttactgcttgagttattgtgtttatgaaaatggctgacactagttctgcacaagccacctagaaacttctttttggttttctctgcatctgattattgttctcctctgcagggtctaccagctggcttctgcaacaagtatctcccaaagcatgacactgacattgtgctcgaagatgagaatgggaacaaccataacacaaattacctgggtggtaagcagggactcagtgctggatggagaggttttgcgattaaccatgatatcaaggttggcgatgttgtggtctttgagcttgtgagcacaacaaaattcaaggcaagtgtttctgaaatgcttgataactttcttccaaatctactactactacttgattgttcctttataatcttcattcatacccatttcttgagttcccttgtgggttcagtcttccctaatccaacaatacaattacctcttgtttcttcatgccttacattcaggtgcatataattagagataaaaacatcagcccaactgacagagcacccggtctcaagagtttttacgcctgcaagaaacggaagatatctagtgagtcaaagtttatgttgttagttttgcaccttgaaatgtgttagacatgggaatatacactaactattgaatctcccgaatcatgtgctgtgttctacatgacagaagaagctactgataatgccaccaagcctaaggaggatccagagactactagagtcagtagcaaagtggctcatgatgatacccagaatctagttcatgaagcaatagacggcatcaggttttcagactcagagatgagctttgacgacgtgatgagctacagtaacttcaacatcgtcgtggacggcttggtcattgactgcaagttccccgatcaccagcgcaggacgtactatgagctgtgctgcgcccagaagtcgttcctccacaggcatctgctgaggcagctgagcctcacgctcgtcgtgggggtgatcatggagacgatcaacatcgctgagggcatcagggcctgcggggcgggtacctcctcgcaagaggacttcctgatctggaagaagacgctgcagtcattcgacctgctgggaatgaatgttgcgttcttgctcaagcgcgttgacgatattctcggcctccccgagcaaccgagggatccatcggagtgtagcaagtacaatgagctgaagcttgagcggtctcgtgctggggagaaggtgaaggctctggagtccatgatgttgacagtgaaggatgtgctgaagaagatcgatgccgagatggaggagatggagtcgagcgtgaggaaccatgacattgcgctgcggaagatcgccactgcgccatggtgatcctgcttgacatctggggtacttgtctgaaacattttgggttcgtcattcagggtttcagatgatgatgatgatgatgatgcactgggaaaccttcgtggtgagtgactgagtggtgaatcctgctaaactcaaggactgaccacatttttgtgtacatttcttcagttactaccacgcagctcagtgcctatctagaactgttcagcagcaaacctgtctaggaatcaggatgctgtttttacacggtaaatcgtataacagaagttgtaaattttggggggcgaatgcgctgtaagcagtgcaggaaatgcgaggaagaaatgcagaacactacttaattatttcagactccgtcattcagtgcaccctgttcttggtgcctgtttggttggtcggtaaaggaggcgtgatctgaataccggatgccaccttcagtaattttcagattgttctaatttacatataacaaatttgtcatttcttttagcaagcttgcatttccatatgtttccaattcagatgttccctacgtttcacaatgtaagtcattctagcatttcccacgttaatattatatatctatgtagattcattaacatcaatatatatgtgggaaatgatagaatggcttacattgtgaaacggagaaagtggtatattttatggtggaatgcatgagttccttgctttgccttgtattttattttactggtcaaatacccgtgtattgcaatgatttatatataaggaaaaaaaacgagtctttttgttgagaaaaaaatggttgcttctatttggttgaaatgggattctttatcttaaaaagacaaaaagaaaagggacatagtatagttcttaaagtgagacataaaccctttttcacgtggcaatgaaattctcattactaacaaattgtgcagtgtaattaacttaaatgtacaaatgaaacttaaattttcatggttttttaacttgaatagaggtgagaaagaagcaaagcaatatagcattaaagggttgcaacccgattagaagcacccaatttcctctttccggagaggaagagcaatgactgcaacacacaaagcaagaggactcacatttgtactgctctcatggccccactcgtcagtggtgttggcggcatcatcgccacaagtctttcgaaaggagtatggaaaatgataaaagtacattaagttttcttatgccattcataatacatctgatccccatgcggttgaggagtggaggaagcggggttatgacttccacaggatgatgctctctctctccccacgttacttacccaggattaggctgaagaacgagtgatcaaagttaaatacggggacttcaagtaggtgcgacagaagcgaacgtaacacgaaatatttattgggaaacgctgaggccgaatgccaactcaatgcactgtaaacgcccttagctcatgtccattagtgtttttattcattcataggcaaatcggaatgtatctgttcaaatttttgtttttacagatatgattcttttgggcaacaaatggcatctgaacgtatgtccgccctcaaactaatggtaatgtgaccatattttccacaggttagatactgaccatttcgtacttctctcacatttgacatttttggcttcatgcatgggtttcttcaaaaaaaaaaaaatattcgagaaccgccactatgagaaccccacgaaaccatcattaatttttttcctcctagatccgccaatgaagttcatgcatcatactacttgatccatacatcataataaaattggaaagtatttatcttaaacattccttaaaactaaaatgcattataacgttaataaaactaaaactatatcttgaatcatttcttaaggtatagtttatcagtcaactaaatgtacatattgcggtcaaagagtacacaccttcttcaacatcatgacacgcatcttaaaaaaacatttcttaagatacgttttatcggatgataatatagaaccaattttccctaccaaaatacagttacctcagctttctaattcaaatttgaacttgcgagttttggaggttgcagatcgaccctaccgacaaggaaggtaccaccattgaaatttgttgttcctgatgcaaacatgtatatatacacataatcccacataaatgcacaaactatcttattctgacatgtgtttctgaactaacaacttcagtggctagtctctgaatgaaactccagtcagtggctagtctctggatgaaactccagtctttgcatctagcgggccacggtagccaaacagacgcctgataagaccattgccaaaagctgtaattgcaagagataataagcgttaattaccattagctgtaaagcctaatcaactgcagataatgcagtcagccaaaattagccgactcatcgtcagatgtgcacacacctattttcgagaaacttttaggaagctcaagctttgacccaagccttcctggaggtgtagttagcgtctccttggtctgtgaatcgaaggtagggttgtctatgatcacattgaggaagacccatagatagcgcttcacatcatctacattgaagttacactcctcatagtgctcattcagaaggttcatcagatgggtggtaatcagctccgtgacgtaatcaacatgggttccaccttttagtgtctcaaatccatttacaaagctgacctgcaaaaccataaaaaacaggagtaaaatgcagcaacaaccatggcatttaactaagaagctaccctgatataaacataaccaaaacatttacctgctgaaagtgtccatcatcactcaggctcaaacagacctcacaccaatcatttaacttctcgtaaactctgaaatcgatcaagaaggcaaaggtgaattcagctaattaaaaagacaaaaccattatggatagatttcgatcactcaacaaactaatatgctcgttcgaaacaacacagcacaataaccttgggaaccctgctcctgatctgtcactgacaggggaatcgatatacaggcgcacataatcgttgaagctgtttatacgcagcctcacgccatcccactcaacttgcacggagtctcctagaattcctgccatatcaaccactctcttccacatgagcgtcacgtgatcctcttcgaggtaggtcatgttgaacccagcaagatctggcttgaaggtgattatggtccagttctccccttgattgcagtctgtaatatggggcactgatttcttccccatattctcagagaaaacctggaaattaaagtattcaaggagtaagtaacatcatgatctatattgttttgatagtaaactgacctatccaatgctccatgaaagtagtaactacatctaaaactcagaaaatttgttgataatacagaatttgcatgcctataaacgatgagttttttttagcaagaggccaggcctcccatttccattagtagaaatggagatagacttacacagagttttttgactcattgactactacctggcaactacattcctccaaaagccaaccaagcagctggatcagatctggacatcaaataaatgacagcgagtatatatcaacaacaaagccgataacccctgccaagtaacaaggtcatggaataggcaaagaaaacatatcatgatcccaggaaatactggtcatggtataggcaaatataacatatcatgatcctaggagatactggtcatagtgtgcaggatctaacagttagaagagtcaaaaacagtatcaggtgtaccaaactatgccacatgctctttccggctttccaatttatgacgccgttgactttttaataagatatactactttatggactctgttattaacatcgtcttgtcactgcatgggtccttttaattttttcacggtggaatcaaaatttataagttctttgatgttaaaatttgagtataaacaaccatgcatattattagttgctgtactgtgcgagccaccgaattttcgccatctctacttatgcgtgaccaccttattctccttgtatgttccgtctatcctcctacttgtgatacatatgttttagcaaatgtaattttattttacatatttgaataggtgttaagagaatataattgacaggaaacaataggcggttttccaaaatttaatttattggaatttgatttgtccaatcgttgattagtttttttgagttgcaaattaataatactccctccgtttcacaatgtaggtcattctagcatttctcacattcatattgatgttaatgaatctagacatatatatctatatagattcattaacattaatatgaatgtggaaaatgctagaatgacttacattgtgaaacggaggaagtagttttttttcttttgtgtctcttttagatttaattgaacatgttgcttaaccccacgatcattcggcccactgaactcaaccgatcccatcccatgatcatgcttgctaagcgatagctgaggcggagcgttgtttctttttcttttcctttttttttaatcctctttcttctactactatctctctctttttaccttcaggaaggctcttcatttgaacggatggctacgatttgtcatttctgttttgtcgttttctgtatcggatggtcaccgttttgttcattacatggctcatccaagttgctgttttgttcattacatggttcatccaagttgctttgagagatttactttttcagttaggtagatttgatgatttattttactacaaaatattacgtaattatcgtttattttatggtgacttgatctatcatgaaatgatctttaagcatgacttctttttatatatatttgtacaaaaattttgaatgagacaaatgattaaacgttcataaaaaaaatcaacgacatcaatatattaaaaaacgaaggtagtatcaaatttggcacagtggagttgatttgtgagggtgtgacgctgccgagagagagtagagagtgtgtgctcagaattggctcactcacctgcttgtacttcttcatgcggcacccatcggcggtctcgatgatgaactccgtggagaacaggttggcgagcttgacaccgtagccaccgccgccgtcgttcgtcgccttgttctgatcatcctcttcgtcgtcgtcatggaggtggccgaagaacatctccggcgcgtagacgccgcgctcctcgtcgacgagctcgacggggacgacgccgcggccgttatagaagacggagacgctgcgctcgacgacgtcgacctcgacggagagggtgtccatggaggggtcgcgccgcttgttgctcgcggcgtggacgaggacctcgtcgaagatcctgtggaggcccgggcggtaggtcacctcgcgtggcaccatgtagtagccgtcgttgatccagaacgtctgcgtactgcgcttctccggcgagccgatgtagccgtctggccgccggaggatgcgctcccgcagcgtcgtgtcgccgccgccgccgccgtgcgcggcggcgatgcgggcggacctccgccgcggcggcgcctggcgattcatggcggcgtggccggcggcgctagggttttgggtggtgtgtgtcagtgttgtgtgttcacactcgtggaattaattgagagatccgggggagagaagatgcggttgcctcgttttattcggagtaaatttcatgaatttggagccttcgtatatatcgttttggataagatgagtggtcaaatagtgcaagcaaaatgtcaaaatcccttatattaagagacggagggagtaacaaatttacggaatcgctataattatgtcgacacattttctcctccatcacagtcggtgttttgaagcgttcgatttcctttgtcccgtgccaatgcaatcatgtccgtgcatattgctatggcaggctaacgttacggctgtcaacatgattaattaaaacttaacgtcttcattagttcaaggttttacacgcatgcatactatactttatacaaatttacaccccacttacacatgtaatgtaattactatataattttggaacttacacattgccgttcttttttcccccaaaaccttgataaaacctggagcggcctccaatccttcacaaaccaaacaaattgaagcattggagcccgatccggattggaggtggccgcggccatgttacggaccaccggagcggctgccggaatggcggattaccagtggccggccggtgtcggtgaagcggcggcggccggtgcatgattgcacatgcacgcacgcacacaccgatctggcaacgaacaagctaagcactcgccgagtcgccggcacgagcggatgggagtaatgcgataccacatcaccatttactcctattgccctattggcatcacatccataggttcaggcccctttgattcaaaagaaattcatatgaggctgtgtttagatccaaagtttggatccaaactttagtccttttccatcacatcaatctgtcatacacaacttttcagtcacatcatctccaatttcaaccaaaatccaaactttacgctgaactaaacacagcctgaatttcagagaattttattcctataggattttttcctatatagccctttgaatcaaaggaatggatcctatggaatcctatgaaattcctatggattgtcttttcctatgcaagttttgcaggaaatttaacatgaggtagaacctcatggaaagaatactttgagtctttatctctccttaaattcctgtgtttttcctgcggcccaatcaaacaatcattcatatgtttttcctgtgttttgatttcctctgttttacacttgcattcctgtcagaatcctatgtttttcctatttctccgttttttcattcctgtaattcaatggggcccttatccttttctatttgcttcggttgcacattttttttaattacacattaaagcgcacacatactcattcttatgaacatgcgtacataaaaccctatcgtgtctgatcacaattttgagttttccattgcgaattgtatgagttcccttcgtagtttaaaatcggtgtgtaaatgactaaatgcacaccaaatccagtcgacacacccaaaacttggcaatatgaaaatcaccgaaattacaaaaaaaaaaggtgaattccgaagcaaagagtggccagtgtgaaactaactcagcgaacactctcctcacagctataaattctatgcttcacttgtctcgcttttgctccacttacaccaacagagatttgcgagtagattttgcatggcccatgccacgctcggctcgcctgagccggcggcaaagcctcggctccggtgcgccgacggccgccaccgccgccgccttatcgtcgtcctgtgcatcgtcggcgtggcgctcgccgtcggcgtcgccgtggcggtggcgatcgccgtcttggggaggtcgaggatgacgtcgtcgtccggcggtggccgggcgccacgggggcgcgcgccgaccgaggcgatcgcgcgcacgtgcggggtgacgctgtacccggagctgtgcgtcggcgagctcatggcgttccccggcgccgccggcgccggcgacgccgagctcgtgccgatgtcgctgaacgcgacgcaccgccgcgtggtggacgcgctgtacaacgcgacggcgctcggcggcgccgccgcgctgctcgccggggcgcggtcgggcgccgcgtacggcgactgcgtggagatgctcgacgccgcggaggagctcctcgcgcggtcggtcggcgccatcgcggcgccgccgccgccgccggactcggtcgacgccgacacggcgggacgggacgacgacgacatcatgacgtggctcagcgcggcgctcaccagccacgacacgtgcatggacagcctccaagaagtcggcgccggcggcgacgccggcgacgacgacggcggccgcatcaagccgcagatgctcggctacctcggcaacctcggggaacacctcagcaacagcctcgccatcttcgccgcgaggggaaggcccggcggcgagctctctgatgtccccgtccacaaccaactccacagacggctactgaccatcgacgacgacgacgacgacgacgggagcttcccaaggtgggtgagacacaacgaccggcggctcctccaggcggccgccgccgagatcgaggccgacatggtcgtcgccaaggacggcacggggactcaccggaagatccgcgacgcgatcaaggcggcgccggagcacagccgtcgccgcgtcgtgatatacgtcaaggccggcgtgtacaccgagaacgtcaagatcggcagcaagaagaccaacctcatgctcgtcggcgacggcgccggcaagaccgtcgtcgtcggctaccgcagcgtccacgacaactacaccaccttccacaccgccacgctaggtacgtaacgtactacgtagcactgttaccaatggcggcggagcacgttgctgatcgtgtcgtgtcggtcttcgtcgtcgccgcagcggtggccggggcggggttcatcatgcgggacatgacggtggagaaccgcgccggcgcggcgaggcaccaggcggtggcgctgctgctgagcggcgaccacgcggtggtgtaccggagcgccgtgctggggtaccaggacacgctgtacgcgcacgcgcagcggcagttctaccgcgactgcgacgtcgccggcacggtggacttcgtgttcgggaacgccgccgtggtgctgcagaactgcacgctgtgggcgcggcggccgctgccggggcaggagaacacggtcacggcgcaggggcggcgcgacccgaaccagagcaccggcatctccgtgcacggctgccgcctcctcccttcgccggagctcgagctcgcgccggcggcgcggcgcggccgcgcggcgacgtacctcgggcggccatggaagccgtactcgagggcggtgtacatgatgtcgtacatagcgggccacgtccacgccgccggctggctcgcctgggacgcgtcggggcgcgcgccggacacgctctactacggcgagtaccgcaactccggccccggcgcggcggtcggcgggcgcgtgccatggccgggccaccgcgtcatcaagctgccggaggaggccatggagttcaccgtcgggaggttcatcggcggctactcctggctgccgcccaccggcgtcgccttcgtagccggcctgaccgtgtgaggcgactctcactgactcatggtagcttaagccaataagttgcatttgctaattgggagataggtggtagtaaaagtaggtgtaatttttcaagtatgatgtaatcatctacacatgctaactgattcaggaaaattatgattaatgattagtttgtaggcttgaatttggattgagaaatgagaattctgaattgggcacaaaaacaccatgaatgtgaatgaataaacctgtgaaatattatacaataacgatattttttgcaatgttggtgtaatgagaaaataaattgtttgtccaactacttggtccctgcaagcaatgagagtgcagatgaaaatagtgtactagctagtaccctggaaataaaatatgccaaccaaaaagctccttttggttgtcacttaggctgctcacaatatcacagtgagaatatatgcttttctttgcattggatttccaggaaatagtacctgctagatgggtgtggggcttaccactagaagatcgaaagaaccaaaagctagcataaagagagaatatcagagagtggcttataattgatgggctattgccactaaattcctggcacaaattcttagctaaaatatcgtgtatttgtgctccttatcttgtatgtaggggaataattgtgtatttgtgttcgacaatcttcagctattttttcccggcaaagcagtagcattgtatcgttatcaacaatgacaactgataaaatctaaacataaacaattggatccaaaccttcacataaatacataatcatgtgcaatcatctgtacatagtcccatgctttctcatgcgattcaattctgcttgcttgggcatggaaggcgagcattcatgttgatatatccatggtgttttcgtctgtcatttcctacttagctaaaaggccatcgatcagtgcatgccttttgaaagcaagcagagcctttttatcccaagtattcccaactaccccccccccccccccaaaaaaaaaaaaaaattccaaaggtgcagcttcttttgctgacaaagtagaactagaaggtagctatcacacgtaccagatccaagattgaacttgggcggtgaggcaatgtggagcccttggaagagttgatcttgagcacaatgatgtgagcctgaagagtgacagattctcatgatttacaagcataatgcaactgttagaacacaggcacaaatttaaagcaaaattaaggtaactctaatctggtggacaatgtccatgttaaaatttacataaataaaatgtccatgttaaaattggctcaattgaaaagcaaattaaagaagcccaaatagagagctccatattctacttttctgtaacaagtgatatcagagcattttaaagaagtacggacacaattaaggggaatgctacatgacaattaagaagatgtacatcagttaagtccagctttgcgatggaggacgccagttggatgaatccatgtcgcgcggccgacctagttgccgccgaggccagtggcgttcttgacggcgtcggcggcgccctcctgcgcggcgctcgccgcgccgtgcgccttctccaccgcctcctccctcctcgcctgcgcgtggcccgccgcctcgccggccttgtagctgagctggttggcttggtcggccatggcgatagctcaagctgctgctgctgctccttgaattcgaatataaacgccccccgctctctgtacgtcttgccgttgccgtacgtcttcctggcgcgcggccgccatttgtaggtgtacgtgcgtggtcgccggcgtgctgtcgctacatttgccgttgcagcttggcatgcgcgccccggccgccgcacgaggaggacgaggagaagagagaacggccggccaacaagcccgtaatggatgggccgtgaaggtactgtgatgacgggaaaaaagttcatttgaggtccctcatcttgtcgtcgagtttcaaaatcgtccctgaaggttcagaatcctatctttttataaagttatcccccactaactgtttaaacttaacatgcaaagatgccacatcattattcactaacaagatgccacatcatcatccactaattaacaagatgccacatcatcatccactaacaatgatcacatttaaacatcatgcaaacatgctatatttttatagtttttataatttaagagcttttcaaatacaaacctgttaaattatcatctaacataattcacataatgtttcaatgtattatgtttttttttgatacatgctatatctttatgtattatgttttttttatatcctatatacttatacagttcatccttacttagttagtacttaaatgattaatctatggtccaaattatctttctccttttttttctaattaagtcatatcacattaattgtttttagccttgagatgaataatctacggtacaaactatctccctacttttcttcttctataaagtcataccaccttactttttacgtttgaatcaccattctacatactatttaaatttaaattatcataaaccatattgatttacttaatctgatattatctagctatcttacacattatttttttattgttatcatactaaattttcgcagcaatgtgcggggtttcagctagtatcatatataacgtgtccctagccttccccttcaccgattgactagcagccagctaggcatggaactcttccgacaactgcgccatggagaccgtttcgttcctccgcgcttccattcgttccactgaacaaggcgcgcgcattttaatattcaacgctttaaacatttggccaataattattttattataaattaaattttatttgatgcaattaatattattgggttgacattttaatttaatttcctatgattacgatttttcttataaacattataatatatgagaaatttattttatatatgtgagagatttatggttaaagattagttttggagccatttctaaatttgacagcaccttattcggtgggtagggcattttttttctaaagaaaaaactatatatacagatttcttggaatactttatatgttcaatgttaattcactcatttgtgcccttaaataattgtaacaaaaccagaataatctaccatccgtcctccacagtttaaaacgaatgggggctatttttttttcgaggaacaatgggggctaaatttccatgctgtgaatttcatcgtctttgatttcttgaaaattttgtgattattatattttatttgttgtttcgagcagaagacgtacacttctggggtgtggcaattcgaggcatacgggtacgtgccatcgggcacgacggggtgtccatcctgcaggtgttcggcgcgtcgggtcgtaacacgacgctgatacctttgaaagattagggataagttatatatggtattatagttgagagacgattttgaaactcaacgacaagatgacaagatgagggacctcaatttaaccttttcctactgtgacgagtgtgcgtgcagcccataatgcatcagctggatgtacggcccgacccgtgtttatggtttggatcagatcaggccatggttaatttgtataatgcaggaatagataccagcatccgttgtagtctagctggttaggatactcggctctcacccgagagacccgggttcgagtcccggcaacggaattttttgcttttatttcttctttgtttcacatggccagatgtgcgtcgaagtttcttttctttttttttttttaccgtctaccttactactcctactttgtttttattatttcgaagtgaggtggccagcaatccagcatccttgccaaaaagcaagcgaaagaagacgacgattcggcctctttttcccaagggaaaagaaggcgcaatcaacgcggcatgttgcttacacactaagctccccgcgagcgagagctttgcgtcccaaaagaaacacacaaaaaaaaaagccaaagaaataccattactacaaaaagaataccgaacctcatcagccataatccccaactccgttcctgttaatttcctgtttggtggagtccgcgtcctaacttcttttccctttcgctcgtcgctttgctatgctttgctttgcttagtcaagtcacactcgtaataccaaagctgtggttagtctatgctaaaattaaaaatttggttgaaattgaaacgatgtgatggaaaaattgaaagtttatgtgtgtagtaaaggtttgatgtgatgaaaaaattagaagtttgaaaaaaaagtttagaactaaatgcggtgcaagtttatcccacattgctcgacaaagcccagctaatcagtgaagctgtgctgatcagctgatcagcagttcagcgtagaacaaagtctagctaacacgacagtaacagcttcactgacacgaaagaaaacgaacgtgaagctgaagcatctatcaatacaaccatcgaaccaacggccaggattcgtttgcccttagaacacacgtcgtcacatctcctcctagggtaataacggatcgtatgttagttctgcgttgagtctgtccaaaatgacggtatagtatgggtttataaaaattttagcgaatatggatacggattcaaataatatgatatgaatacgaatatggtatccctaaaattcaatagatgcggactatcctatgaaataatatatgcataatcacactatctactctatatattatgagttgacacattcaatagcccaatttatcagttaccctattatcagcatgagctctcacgatctcttctcacgaccgcatactaccgtcacgcaccgacataacgcaggatgcaatgagccgcgagggaaacccttttcagcacttccccttccacctcctaattaatctctgatgtaggctctggtctcgtgatcttcaaggtacgtagcaacgacaccagcccaccacacacatggttaaaaaaaagtgaatattagagaatgatctaatatcaaataaatagaatgaatgaggcttcgaactttggtcggctaacccaccaccatgtggagctagccaaaagaccctaagcacttctcccaccacacaatggggttcacatcgtctgctgttgaggcttacggcaaacattgccattgcattcatccgtgccacacatccttctatcaacggctgtatgcagtgatcccaccatgattaattagggcctactaatcagcataattactaatttctcttttttaaaaaaaatcagaaaacagaatatgcacttggcggcaaagcgtgtgagaacaaaagtagagtagactgttttttttaagatttgataaattctatttttttaacttatatcagtctatacatttgtagggtgattcaaatggttgtgagttgtattctcaaggattttgttagtagcttcatttcgctgctagtttttggataaaaaatactctgtatggacatagtagtagtgcggcaatgctatttttgtcaaatgaatacttaaatagtattttataagatatgtactattgttcgaggatttggatagctctcagtataatagaagcttgctttgctgcagtattttgctctgctctgcttctatgcttgattgctcgcacgctttgccgccgagtgcgtattctatttgctgatttttttttcaaaagagaaataagtaattctgcttattagtagttcataattaatcacaatagtgggatcacttcatgcagctgttgatagaagaatgtgtggcacggatgaatacaacggcaaaatgtttgccgttagcctcaatggcagatgatgtgaaccccacacaatggttgatggtgtgcacgaacaacttgacattgttttatttacacacagcatctgagaattttaattattttccgaacaaattcgatatcgacccccaccattttcaacgtccgaaattatccctttcatatccgctccaacacataggtcgtagatactccctccatcctaaaatgtttgacaccattgacttttttaaaaatgtttgaccattcgtcttattcaaaaaaaatttaattaattattaattttttttcctatcatatgatttattgttaaatatacttttatatatacatatagttttgcacatttcacaaaagttttaaaataaaacgaacggtcaaacatattaaaaaaaatcaatggctttaaaaaagttaatggctttaaatatttagggaaaggagggagtacgatacaaccactaccaaaattaccgatctcactccaaactagaactcctctctctcctctccccgacagccgacagcagcagctgcggaggctgccgcgagaagcctccacttcgccgcgctctccacttttgcagcacatgccgcccccaaccactccatgccatcattcactcctaaagcggcgcgccacctccggcgcaagccaacaaatgcgctcgccacgcgcacgcccgccagcagcaaccacttcccactcaccacgcatgcagccgccgccaagaacccgcgatccggccatcgccatcgccggcgacggcgcggcgcggcgaggtcccccgccgatgcagccgcccgggccgccgccggtaaggcatggtccgccgccggtgcggcagcagcacggctactactacgaggaggagcagaggccgctgcacctgcacgtgaggacggcgaggtcgtcgtcgtcggcgctggcgtcgtgcctcgtggcggcggcgttcctggcgctggcggtgggcggggcgggggcggcgctgttcgtgctgttccggccgcgcccgcccgacatcgcggtggcggcggtgcggctgccggcgttcgcgtccggcccgaacggcacggtggcgttcacgttcgagcagacggccgccgtgcgcaaccccaaccgcgcgccgctcgcgcacttcgacagctcgctccgcgtcgcctacgccggcggcgagctcggctccgtctacatccccgccggcctcatcgacggtggccgcaccaaggacatgtccgccagcttcgccgtcccggcgttcgccgcggccaccccgccgtcgctgcctcaggagcagatggccgccgccgccgccgcctcggcgcagcagcagcagccggcggcggcggcggcggtgatggaggtcgactcgctgctggtggtcaaggggagggtgaccgtgctgcgtgtgctgacgcaccacgtcgaggcggccaaggtgtgccgcgtcggcgtctcgccggtggacggcaaggtgctcggcttccggtgctgaacaccactatggatttggatttggatgaaatccaaattaagccgaaattttgcgggaaagaatgtaatttaatttaaattctgcagaaaccaagcattcccgttaagtttctgagctccaaactggtggtgtaatggtagatgatgatatactatgtaatatgttccattcttaagacacggtgaaataccagagtatcagtagcattttagctcaaaggtatcatcaaggttgttcatgttctacatcaagataatctcaagttgttgcatgtaaaaaatatcatatttagcatagcatttgagctcaagacaaataggcccttcatacttaacgttgttctatctcaagttgttgcactgcatgccaaaatctctgactacagaagctgataatctggcaatgagaatgacctttctccagcagcataaccggacgtattcgattgcagctaaaacgtctgagtcacaagacattccatgcagctttggatggtatgtgccttgtccatccatcagcctgaaacatcaattcttacatggtgagtttgcaaagaacatataccatttcggaggtcgaaaagccgactctacacaacaattagccagaaatcggtgctgcaagaactcaaggacttcttcatccatcaggataggctgggtcgatgacgagggtttatactacaatgggtttagtttggatgatctttgttgggaggaataggcaaaaaacaaaaaaacaaaaaacaaaaagcacggaagaagagctacactactactcgcttgaatgggcagatgcgggataagccatcaaagcatctgttgagccagaatcgattcggggtgcacggagaactcaagttccagcaccgtaacaggaggcctgactgttactctcagtcaccatatcttgttcttgacccaaaagagcatcagtactattccaatcacaatggcaacaagggcatacttgcgaataagggcctgaaaaccattgaaggaaagccttgtcacagacgtgaaaacaggtgaagtggtaaactggtaatgcagatcaggtgtttgttatgcttaacagtccaccagtgatatgacatagataggacatagtaacgcatgagagattcccatatccctcacgtgcattggtgaacataatttgggggtatggcaggaattcatatgtttaacaaataaaggatgtagacatgttctaagcattactgtgtcaaattgatcgcaaaaggaccaacttagttgttgactacttgagcacaaattcccccccttttctcctcaaagagcaatgaaggtaaggaaatttgaagtggagttgctggaactaagcaatacaattttacggtttttgaaaataaattgcaattgcccatcgatcattctaggaaacaacggactgttgatgtataattttgagaaaagtaaagtgtcacaattctagaaagcaaatgagtagactcccttaagacttccatgaataaacagcagtcacgatttatcacatgtccaatattaattcacaatttattgaaatattaatttcatattagttgcttggagattgagattgccagatggcaaatgcagtaaagggaataagggatcacacctgacgattgagatccttcgccttctccgcataaattctagtatcagagatcaacctattggacatttcactcacctctgcaaacagaaaactttcactgagcaacagctgggaaatgtaaacctctaagcatgaaacgaaatgtgagatgagactgcaacaagtcttgccaaaagtgaagcactcatgcaaaactgtcaaagcgtgggattacaggcaacacaaagaaagaaacagctttggtgtgtactggagcaaacaattcaaaaggaagcatgagtctaagaaatattaataagatgtgaaacaacaaaatggcctattgaaggaaaacacaaaatataacaacaatatagtgcggaatgaaaacacaactcaagtaattttagggcaagatagtctgctgaaaccaaattgattttgcgaatttgactgctcacctattcactgataatctttcaaggaaatacgtaaactcaagttaatctcatatgcacagaaatcattgacaagtccatcgtgctaaaaactatgatgaacgatgcagcataacacagataaggtgcaaaggcaaactcatgatctagtttttcaccaacaccgagaacttcttgaaaattgcgagtcataatctggtgcacctcataaagctcatcattcaacttggccaggttcctttgggttctggtatccaaatacaacttcttcgtcttctgtatgaaagtgtctaaacaggaaatataagccattaactagtagaataaagagaatgagtataaagaaaaatatcatgaatgtaagaaccataccaaacttaataaaagcatatggtcttgcagcagtttcaatttggttgccattgaccctctcaaattcatttttgagatcttctaagtactggaaagcaagtttcttcggataagagcagtcacacattgtcaaatagcacacacggccctcgatgatgtaactgtttggttaaatcaaggtgcaacaagtgtaccacaaatgattttcacaaggcaaacaggatgaaaattcaagaaatgatttagtttcttaacatacggcattagtaacacaactttcctggcatcttggtgccattaacatccaagtatatgacgaaaggcagatgatgcatatagggcatagaatatacaagttcttgctgatgcaaaaattgggagagtggtagaccaagtaaaatgtctaatacaatacttattactcaccaattcactcactcccccataagcagcaagaatatgttgtcaatggaatgagcagttaaatttaaaataaagaggaaaactaaacagagtgtatgtatcaaccaacatatctagttggaatcattgtctttgctgctgcaattcaaatttgagcctaaaaccacaaaaagggtaaccatgagttaatcttttgggaattggcacggaacacctataaaaaaaatcatgagggaataatctttttcaacaggaactctaaatctgcagatagcataagaattaaggatactggaaaaggtatggcccagtctcaattgacatccttgatgcttcatgttgccctttcgataagttcttgaacaacagtttagcttgctgcttgtagaagtcagcatccttcagatcccgaccatcatctaatccctccactaacggaaggtcatcagtaacacgtgctatcattgtcagcttcaccattttggatatgcagcgtgaaatgaactagcataggcaatctgaaagtgccacctgcatggtaaagcagataaagggtagaagatacattagacatgtcccatagtcaaacttagctgcaaagttttaatgttcaatgtgaattctacttattgcaatgggccagatctagttttggagaaattccattttaatcactatgtctaaaccggagtgcaaatagtgctaccatgggattcattatccaactactcaaacagtaacagcgtaacacacattaagcttcctagtttcagagggcaaacgcaatccatacgaaagccaacagggatgcatgatagtgatcaaacaagctgcagcagaacaggtggaagtcgtctgaacttttgcattcttcaatcaatcactatctacacatgctaaaggcctacgacaaccaataccagtaaaactttagattataaaatataagcgcatattcgatattcttaagcttgacaggaacacctagaaattataaactaatcataccccctgcataacactagtgagactagtaacaacaatgttacgatcaacctaggaagtgcagaaacctgaccaaattcagccaaagtagatagctaacagtctgtgcctatagccctacagaccaatttccctgtaacactacataattgaccactcttgcaggtaatgaagcaaatatccgcttaatgtgggggcatggggtttcaactgaatccccaattatttttgcaaacaaactgctagcaaaacaagtcccctcaatgtcagtactgcaccaagcagcgaagaaatccggaatcaaaccaagggctttgttcggttaatccctaggaggaccacacctcactacgcgtggaactattcccttccaaacaaatcccatccaatctccttgggggaagattcaatcaccggatggatccccaatctacgcgccacgccggctcgtgaagcggccacaggagaaggggggagggctaagcgaggcgagaacgaatactaccttcaaaatttcgaatcgggccgcgaggtgggggcgccggtgggatgagccggccgcgtcgccgcccccggcgaacccgctcgccggcgatcgggggaggagaggagcacgtccgccgccgttgcctccggcgggagcagagagagagagagagagagagagagagagagagtaaagtgaaggagagaggtagatgaactgatgagggtgtgcacttagcattttggttgggtgaatgccatttttttttcctcaaaaatttatttgaattcgaaattcctgccactgtcgaaactcattttcgcccaaaggggggagtcaaataaagtgagatcgataactataagttttgttatagtaatatacatgttttctttaggaaaaaaattgcatagcgtgatgtttgcagtggtgtgtgcgcataggtacatatatattttatgtattatcagggaaaaaaaggttttaattttgatttgatctttgtgttacttaatgttttgagagttcatactaatacttatatcagctgaacatgtttaaagtccccataatttcatcctcaagaggaaactttaaaggtatcattcaattactttacacaaaattttgagacaaacccttgtttcaaataaaaaaacactgaacatgcaagatgttggtgagatatacacaatccattaatttacaacattcttcacttatattcatttacaatttacatcgagaaatgtaagaaggaccaatgatccttccttattattcatggaggcgatatcttgacacaaaagagacttacattacttacaaattcacttatcacacacactcgaaaccataattcacagtcatcttgaggagcatttcatttgaagagttcattgagatagcgatccatgatacctgagatggcttccatgaatgccttttcacctatcccaggaagaacaacatgctctgcctcttcaacaatctcttcaatctttgatttggttgtaatgttctccctacacaacatgttaccgatctcatatggagttagacctctcacagcacccttcttcaacatcatggtgcttagacgaaaaacacgaacacacttagatgatggttcacaaccattgagcttgagcaacttgatatcctcttcctcgtcaagtgactttatgtagtccagggtttcaacattgaaaggctggcgtgcttggggccagtaaagccaatcaaatgtgcagtcttcaaactataaattgtttagaagtcaaatcaattactaaaactaaaatagttcaaacattgtttacaacatgagaaaacaatcattgctagtaaccaaattaggacaaaaaatttagcaatggatattatattaaaatgtgtacatagtgtgtggtcgtgaaaattactccctctatcctgaaatataagcctcccgcaattttaggaagccaacatttgcaaacattgactaataattgaactagcggtacatatgtttagcgtcaagcatgtggcatcataagatttgaatttgaaagtacattcacgttatgtcaattttatagttattgatattaatactatacaaggaattaaaggtcaaagttttgcactgaagacagtgtaagaaacttatacagcttatatttttgacatggagtgagcaactctttatggcgattagtgactatgggtgatcatagatttcaattttcagtacaaaaaatgcagttcaaagcaaaacaaaatacttacgctttcaggcagacaatacccatgatcaattggtatcagctcaatctgcccattctcatccttacgaatcagtatgttgccgccatggcgatccgtgttagctagcctcatatccaaaacagcaatcttgtgcacctcttgcacagggaaagccctaggaccaaactcctcacaactcccagaattcttcacaaacatttgcaaggacccaattttcggttctttctccgcgcaatcatacttagtctgatcaacataaccattcaaacatcgaacaagaactgtcggaggaacaccagcaaaccctagttcatcgctcacgcgataaccactaataggatggtcaagaatgtatgctgcaacctccctgaatgcaccttcaccgactcttgttcctctctttaatccttccccatcactggacaaagggtagccattaggattgtcctttgccattggctcttcatttattggcttgaaaacagcaacatactcttggcctgatgaatctagcatgaagtagactcccccagtgccctctgaggacatcacaggtgtgtgctccatttctagcccagcaagtgtagcttcgatcatacccgtaatttttggagtaagggtaacacttgggttgacaagaactggttcaatcaggggatatttctccttggcatcatcaaattgtaaattgtttccaatgtcagaagaaatggataattgctcaaaagattcttctatttcatttccattaaaattttctgacttgtttgcaagaaaatcggtatcagaagtgttggtctcacaaatggtggagattaatgtgctttcatcaagcttttcaccattgaccaaagtcatgctctctccaataccattgggactttcaacatttcttgaaatctcttgcttcatatatctagcatttcgacgttggtccacttggaatttaaacttccttccataaacagtcctcacagcggttcgtcgtggatctgatagtcggatcacgagatgaagcacacttccatacctcaccccatagtcacggatatggctatcattgcgagagagctctctgccttcgaaaaccaacctttggtttctcgccacaaatcctttgctgttttggatccg

SEQ ID NO: 9746 - DNA, 28916 bp, Oryza sativa
ttgggacaaaatcgtttgtacgatggcatttcttggaactcacatttgtcaatggcatttctaggacttagacgcttgtcaatggcatttcatggattatctcttttttaaatacactgttgatcagtttggaaagcggtatatgcaataaatgagggagttttttttccttttaacgtgggcgagatatcaatagaaactgtctacgtaacatagcacaagaaacagatataattgagtaatgctcctattaaatttaactctggaccatgtttttagaaagccattttgcacacttttattgatatgaaaacacagaacgttcagtaaaataaggggctcatcaatacaagaactcttcaaatcaaattagatgtatgtttagatagaacatgtgccaaaaaatttggcttcccggcgaagcgctcaacagagacttgcaaaatcacgtcaaaatattgcattcatataaatttgttgacgaaaagccgcattgtttccaccacttggaagtgtggctgcgttctttcaagggagagatagggaagattgtgactcgttttccacgcgcatgcttttcaaattactccctccgtcccagtatgtaacaagttttaagctcgtggacaagtattaaattttaaactggtaggcggcaaaagcacatacggcaatacaaactagtactctattcttttcttctctttcactgataactatgctgaggggtagaattggtagatttctggtaaaagttgtactaggttgtaacatttgggacaaattttgaatgccaaaacttgttacatattgggacggagggagtactaaacagtgtgttttctgcaaaaaatttctataagaaagttgttttaaaatatcatattgatccatttttaaaatttaaaatagttaatacttaattaatcatatgctaatggctcacctcgttttacgtattttctcaatcttctcttttcctctccttccttgagggcgtaggcttatctccccatcaacaacatggggtaagtacctgaaagaaccaattacaaaatttccttgcgcatctcgtatgctctggctcctctgtactcgaaagaatgtcaaaaacaaagcatctacatttaccttgagagtttcttcctgtaggaggtggtttatgccatccttcatgtggttttgtatctgttttttgcttgccattttataatttagtgcaagagtaataatagatatagctgatctagtagccatttgaatcatttcaacattcaccatttgcctcctttcccaccaaatataccgtattcccctatcgaaacaatttcagcaaatttcaaatcattgaggtgtggttacctcctctcatgattgtcttctagtaaaacgattgtcttctagtaaaacaaaacccgattgatcaatattggcaatattctcaattttgtttcaaattcacatatttatccacacttctatatagctctatcacattgaaaataatatgtttaatatcctcacatatacggtccaatcgtttggtttattcatcatcatgaaataaaccaaacaacatatttgcaaagaaaaaataatttgtaaattttatgatcgttaatagaatattataaaataagttagcgagaatgtgtattatgagagacggagtaacaaattaagttaatatgcaaggacgagccgggggagtatgtaatactagtattatcaccatcagtcatcaaccattcttactctttcgttagatatgataaggttggaaggttcattttgcctctaatatagtctgtattaatgaaactaatcactagattaagtctactaagtgattattagactaaacaacatcttctggtggcttggtgcttacgccacacggaagcttattagtagctactccctccgtcccaatatgtaacaagttttggcattcaaaatttgtcccaaatgttacaacctagtacaacttttaccagaaatctatcgattctacccctcagcatagttatcagtgaaaaagaagaaaagaatagagtactagtttgtattgccgtatgtgcttttgccgcctaccagtttaaaatttaatttgcgtgtgagtgggtttttactgtgtttaaccagctttctggcgccaatgtgtttgaaatgcacgtgtgagtttgatggcagcaaacagaccgccaccactgagttttagtacaggaataatcattgagggtagtatggtctttttgcaccttttcttaatacttgtgaacaagcttaaacccccgcctcgtttctggaagattctctcctcccccgctctctcagaaacaactcaaatcacgattcgctcctgcaacgctgcacgcgcgcggcacgaggagtaggatgccggcggcggcggcggcggaggggaaggcggcgcgcgcccgatcgacggcggcgacagcggacgccgcggccgacgacgtcctgtacgtcttcgctctccttcgtcgacgtcgtcgtcttctctgtctatgagaatctagttctcgcggtttgatcggcatatccacaggatgccgcggggcgcggaggcgaacaagggagcagcgggcgggcgcgcacccccgcccccgccgcggcggcggcgaccgcggggcgggacgacagccagtacgattccccctctccttcaccttctcttcctgagaatattgcgttctcgcgagtaatgacatctagcattgcaggactcgtcgcgtcgatggaagcgcggctggagtttgcgcgcgtcagccggcgaccgcagcgcgggaggtgggcacagcagcagcaggaggcgtggctctctggttagttcgtcgtcgtcttctctgcggccggtttttcggttgagagtttgtgaagcaaggtggtttgtgtgtgggggtggggggtggtatccggatcggtgtgtccttttttttttttgaatcgcaaattcaatttaattgtcgggattgggggtggtaatggcaatctatttctgtggctggttcttagcgtttcgatgtgtgctgtgtgatgagttcttgatgcggtaggctattgcgtcacttcggtctctagaagcgaggaagattctgtagtgtttgctttcaaatgctttggcaagttcgattcggctgtagatttcctgcaccaaacttatgttgggcttgcaagttcaggaatcttcagtttgctgattgcatatatctgaaggctgtttgcacaattttcttgctgataatgtttattcacgttggtaatctgtcttttttgcaagcagacacgcaaaaaaattcttattcgggatggggttttgtttcaccaaatgaatggcattcgtcacaactcttcatcttctctttgttttcccagcctggtgcacattctatcgtctcatctggcattgtctataagggtcaactaattagatgatgtcttgcaattcttttgtttgttcttcagcttgcattgggagtttaggtactaggaaacggttttctgcgtttagattgcttgctagtttcgatgtgtgttgggaaaaagagctcggaagcgagctgcatgctagcggtccatcatattcaggtgtagtttggccatcaccaatgtgcagtaaaagtttcacaatcacccaattaagcatgttgatgaagccactttgacaagcagcgaccaaacattgcgtacctgtgcaccgttcctaatttctgctgtctcttgtgtaaggaactaagccagcttagttggtcgatagctagtgtgggtgtacacctagaccaaaagttttatcaagttgaatttgggtgcctattttcttgttaaactagatgaatatcccgccgcgttgctgcgaaaaattacgttgcataatatgtacaaatgtaatttgattatcaaaatgaaaataatttgatacaattttgagtctaaaaataattaagattgcatgttttaagatagaagaaagaagagacaatttggaccatagctctatcatccaaaggctagaaataattaggggaatatagcttaatgagagaagagataaataatgtattaactacacttaataagaataaactatagtatataagattacaaagtcgatcctaatattttctttatcttcttaaaataaacacaatgaactcgcatgtttttgtcttttctgtttgaatgatgtatcacagaatgccctgcaaatttgctgacctttttaacctgatacgtcactgatcggactttgaatcatcttttattattgttggaaggaaaaagtatatatgaggtcctcatcttgtcatcgaattacaaaatcatcctccaaccgcaaaatagatatatatcatccctaacttacaaaaccggatcactctaggtccttaggtggttttgcccctagttttgtctaatgtggcagttgagtcagcgtgggacccacgtgggccccacatgtcagtatttccacatcaacaccctctctttcccttcttctctcccctcttatctcccttcctcctctcagtctctctctcacttctctgggcaagtcggccgcggggagaggcaggagaggaggagggcgtcggtggccggcgacaggcgatgcagcggcgacgcggaagaaagggagacatcggttgcagaggccgtaggcatggaggagggtgtcggcggccggcgacggcaatacggcggtggcaacaacttgggagaagggtcgacgatgtcgtggtccaagatggctctagcatgggcggtggtgtccccgggacggcaagtcggtggggagccatgagcctctcctccgaccttaccttcttgcctcttccggcggtcatggcggtgtcagcggcagggatagggctgacgggaggggccctgagtcgttgtcgtgcagcagcggcaggggtagggccgggcggcgtgcagagttgtcgtcgcagtggcgcttcgggtcccagtcccctctcctccacgaatcccgccgccgccaccatgaatcgcaccgctgatggcatggagatacccaagttccatcaagccatagtcaccgatcagcgctgctccaccctcgacttgctccacgtgatcctccgcccctcccctatccaaccctcctcgcgaatcgtgactcctcctcccaccacagggactcctcggaagttgactgcgatcaggagtgccgccgcgacgaagactctgcacgaggcgcctgctcccgcgctgccgccgctacgtgactgcgtcgcccgtcgccaaccgccagacctcctcctctcccgcctcgcgccctcgccctgccggccgacttgcctataagacgagaagtgagagagagagaaaggaagaagggagagaagaggggaaagagagagggtgctataatatttataatactaaattagtttcatcaaatcaataattgaatacgtcgacttttgaggtctcgactagacgaatacggtatttgcatggtatggggatcgtcagtaccagggtatatgcgagattgagtcaaaagcgacagagacaaggattttatacatgttcggaccccttcacaggaaggttacaaccctactcctgttggccgaagccggtgttactctatattcatcagaatcatacaagtacaatatttgggataacccatctagatgtcgttgacttggcggcatagataaccaacacatagtcgacgacaggatagttttcctcctcgaatataaactcgccgagatcagagatggcgctagatccctcttgtcgacctccgcaggcaccagatagggtttatttaggcttatctctgatatcgatgtttggcttgtcttggcttgtgcgttgatatgttgtcccttctctcctcctatggggtcttgtacttatacccatagatatctccttgtccaagtagaactagggagaccaatatagataaaatccaaatattccttgtagtttccatatggaactctactcatcctcccttatccggaactccttctatatatgaggtatgatttcgtataggacttggtatatggttggccccgcctagcttagtcaattactattgggtatatggtatccataaccctgacagaatatattttcataataaatttgtcttgggtctaaaatgttactacttttttctacaaatttggtcaaacttaaagtagtttgactttgactaaagtcaaaacgtattacaacctgaaacggagggagtaataatctaaagctagctcttttgctagcttttgattggtccacgtggcacctcttactttgaagaaaaatcataaatttatagtagagaaaaaaaaaaacctaacaatcatatgtgagaaaaatctagagaaaagtatcacatatggatttcagaggctttcagaggcttccgaaactatctttcctttccaatcacacgaacttgtactcctttgccttgtataaatataccacgcctactcgatattactcctataactttagaatatatagtaatcccaaaattattaagaaacaaacaaatctaaaacaactaatttacattcattttcttctttaaatatactacgcctactcggtactactcatataactatagaatatataagtaaactcgacattattatgcaaaaaaaaatcgaaaacaaacaaagaaagaaggcaaccttgtcttcttatgtcatgaaataagatcattaatacctcagccaaaaaaacgattgtgtttttttgttagacaagatattttttaaaaaaactctgaatatactaaatgattgatctttcaaatattcaaatccacaaacaaatatattggaactaattaattttgacaaatctcaaaatttacttgtttagattttattaaaacttatgtataaaatgacagattaaattttgtacttttacttgacatgacatacaagttctatatttttatattttttatgacaaatatatttttcacttctatacataataaatattgtcaaactaaaatagtggttcgcaattttctttttaaaatattttataaaaactctaaaatttcaaataagaaaagaagtatatacatattttaaatagtgagcacaccaattttatcatttagtattttctagtggtaagtatatataggttgagtagcaagcatgccaacggcatgccgatgttttagtgatatgtaaaatatgtgtcaaacgcataaacgactggctgcatcagcgcgaccaaagaaaaaggctagtgtgtactactactaatatattttttcctgtttagttgtatgatgctgatgagtatatgatttcaaattttgccatacttcactaatcctatttggtacatgccaccattccaaaattataatacttatttttacactattttcaatgatatattttgaccattaatttattgtatgttatgtttccaaatgatataaaattagcattacatgatatgattaatatgatcattagttaaaaatttattgagtttgatttttctaaaaaaaattgggttcattataatttgacagagaaagtatttagcaaagtttaaggtttattaaagtttaaaatttagtaagaaataaatcagtgcccctattaaataatgtaggattgtatgtgagagggtgggtagttagtggtatgatgaagaaaattttgaattaaagttaattgatggtaaaaaaatataaagtgacaagtttttgagaataaattttgaatcctaaaaatggagggagaactagcatatgactataggagtactagcggataatatttgcattgatgtaaaattttgccctttcattttttgttgtcagtactgcagtagatgtcaatatagttgagatatcactaacctattaaaaattcgacagtattaaaacttatttaagatttagtactataaaaattttggcacgacattaatccaaacaagcctaactgtaactatttttctccgtcagtactacgtcctgtctttagtatagtagtatactctgtttttctagaattccacctgtgaaggtatgaccggaaagaactgtgaagatgcagaagatatgactggaaaggactgtgaaaaaggtgcaggcaaaaaaagacagcgaaagaattgatgtaagttatgcatgtgtttctcgtaattgcatttttactgtaatcttattgttttgactgattgtaacatgttgatgcacagtctaccatggatagatgggatgggcagctacgtgccactgcacccagctggtgaaaaaaaaggacactgcatagtctgctacgataaagtcagtatcagcacactacactgcatttgcttaaagttcatactaccggcgctgatgccgcgaagtatggaaaaactataaatgttggcttatgtgatactccactaaaatcactatctgagtgctgggacacctgtgcctgcggtacatggtacaacactctactcaagcgagtttgctttgagtttgtgtcactgaatgtttgtttactgatttgattttacaatttgctttagcttttgaagaacaagacatctctttaggggtctcagcctgatagtgacattgacagctaattgagagatgccttctgttttgattgtgagtgtggttttgcacaaacactttacggtcatcacaagtcccactcgtgggtaggaatcatacaataccttggtgtggttttgcacaaacacatggcatgcatgaaccacatttgacttaacccactctcacaaggtttagtctaactcttaatgatgcatatgcatatgacttaatattggccattaaatattccattcataaattgctatacaaagcaaaagagaaaattcaacatatcagtaggtcttatctagccatatggctcgatcaacgccgcttcgagccagtgtgaccaagtcattagcatgactaagactatagggaaaaacccggctattacatgaagtatcgtgatgccactcagtacatctggtggtggttgtggtagcatatgctaattttattgatggatggataagacgaggtgttgcttgctcaagcgataggagaagcggctgctttgaatgtttcatccattactctaaacttgtcagcaggtgcggatgcgtcaatcgcatcagcagcaagcatgaaggcaatggaaactgcggcaacttgtctcttttctcctgaagccatggctgtgtcgagcatagtagcagcaatcccagccatcttggccgtggcctccttagtttccgcctgttttgctggtggggcagcatcaacaacaccatcgagggcttttctgatgtaggagcatgtctcacttatgcacatctcaacattggaggtgcaatcctccgttggcactaacatggccactttgaagatatctatcattgtcgtaaagttgtatggagacattccaataggaaaggcaccaggaatcttggtgcattccacaggtgaggctagcatggttgacactgtaataacgacaaggattagtgtgattaccttggccatcgtggaatatatatcccaatgatttgatgatggatgattcaatgcaacaagaagtagctaacctaggttgatgagctgcttgctattatgaaagtgggatgtgattgctttaaatagtgtaaggcgatggcctaggaccgcaggagctttgtggtcaaaaattagttggttgcatgcatatgtgccaagtctttgggccaccacgcatttctcccaatcacatgtcattagcgagaagccaggtgtcgggtgcatagtcatggtaactggttgcttttttttgacaatggaatcttttattgaactcggtcaattatatcaaggtgatattactacgctaagtaacactcccagcctctgcatcccaaggatccacacaactaaacacatatgaaccaatttaaaagaaattaagtacaagaagcatcaaggaccatcatcctaagactagatcaccacctatgtccctagttaaaacactcattgaccacccgctccaagtgtagacacgtcgcaataaccaaatcccacgagctcggctttttaagaataacctaggtgtgcatccaatggatagttacaaatatgacatgtatgtgtgataaataacttttctatcaaaaactatatagttcttacgtaaccaaagcaactagcatgtggcagtcgcccctaacaggacatatggttacatatctttttgaaaacccgaaagccaactagtgaccacttgtgaaacactatcgggtggagtaattcttgacgccacaaaaatgatggaccaaactaaatgggctaagaggcattcaaagaaaatgtgtttaattgtatccttattattacataaacaacagttttgatcgccttgctaattatgtttagctagattgtcttgggttaacacaactttacgatgaaggtaccaaaggaaaatcttaaccttcaatggcatatttagtttccaagggcgtctatttatattcgagatgtcactataaactagagatgataatgagactccatatggagctgtccattaggggtcatcttccatggaaactcatcttgctcctaaattaaaccaatattagcgatgtgtggtgataaggtgttccatgtgactaacttcgatccaatttgatcccttctccatgaaaattgggatatccattttgaaagacatcttcgatagttgcatgtttgtgcctgacaatgttgtagaggaacgagtactgttctcgcagggttacatttcccaaccatttgtcttcgcagaacctaaggataatacggataatatgccatatggcatattagcaaaataataatacagtaaattgttggtaaaatttttatatatatgttcttagcgacttaaatgccaatgctaaaaaataaactttgatgaagaaacttcaaattcatcttcaaaattaagctttaaaatttaaattttggcattggctgatgatgaatagagaaaaagatgggggcctaatcagggccggtcctaccattttgggggcctagggcgagagggaagtaaatgccctttttatcttggattttttttgaaaaaaagttgtttaatttaattttctgattgcaaagtgattgatatgcaatacatcaatatatacatactttatttaattttttttaaaaaattataaattatacttcattttatataaaatgagctaattatatatgttgatatttatttctattagaagttgagttggttttcgtgttccgagaaaaaaatgtttccgtattcgtgcccgatcatattcgatttttgttcgtatttgagataatccgtattgtttctgtattcgagctatccgtatttgtttttatatcggtaaagaatatgaacacaaatatgatacgagcattatctatctatatcccctccgttttcatcccacatcgcgcaatcgatccccgtgccgatgctgcctccgacggtgcgtccccaacgagtggcggtgagccgtcacaactcacaagacctcactgagatgggctagcaagcttggtgggctgggcccaggatcccaggggcccacaggcccagcctttttccttctccaagaagggcggcccaaatccaacggctcagctctctcctctttccccatctcttcctcgcatcgaccgaccaagcaaaagcattttcttcttcttcttctctctcctctctctctccttccccacgagaaatttcaaaaaccctacctccactcccgatctccacgaaaccctagccgccttctgctagatcgccgcggcggcgggaatggaggtggcgccggagacgctcgacaccctgtcggggtggttcgcgcagtcgctctccccggacgccgccgcgcgccgcgccgccgagcagagcatcgagtcggccaagtgctcgccggggttcgggctcgcgctcctcggcctcgcctcctccccgcgccacgacccgcagtcgcggctcgccgcctccgtccagttcaagaacctcctccgccgccgctggcccaagccctcccccgacggcggcggcgacgacgacgccgaccacctcccgccctccgactgcgccatcatcaaggcgaacctcctccagctcctcctcaccgcgccgcccctcatccaggcgcagctctccgaggccctcgccgccgccgcggcctccgacttccctgccaggtgggagtcgctcctcccttccatcgtctcctccctcggcaccgccctctccgccggggacatcccggcgaccaactccctcctcgccgccgcggcctccctcttctcccgcttccgcaatgccttcgacagcaacaccatccgcctcgacctcaagtactgcctcgagaacttcgccgctgccctactcgaggtcttcctctccacctcccgccgccttcaggctgccgcacccacggtcaccccgcctgaatcccgcccggtgtttgagtgccttcgcctatgctgcgagatcttctattcgctcaactccatcgacctgcccgagttcttcgaggaccacatgcgtgagtggatgacggagttccgtgcgttcctcaccacctcctacccgccagcgatagaggcagacggcgccccggatgcgctccgcgccgccgtgtgtgacaacttgcagctgtacatggagaagtatgaagaggagttcaggggatatctgaaggagttcgttgaggcggtctggggcctcctcatggcaccatctgtctcaccatcccgcgggcagcttgcggtgaccgcaataagatttttgacaacggttgctgagagcgtgcaccacgcgctgtttgggagccctgatgcaatgaagcagatatgcgatagtgttgtaattcctaacctgcggttacgggatgatgatgaggagctgtttgaggggaactgggtggaatatgttaggcgtgatgccgaggggagtgatgcggatacactgaggcgggctgcatgccggttgctgcgggggcttgcggcaaactaccgggagcaggtggctgcacttgtgtcagcacaggtccagcagatgttggctgcatatgcagctgatcggacgaacaactggaaagagaaggatgctgcaatataccttgttatttctcttatgcagaagcctggtgccacaggaggtgggacaccggtggttgatatggagagcttctttacatctgtgatcgtgcctgagctgcaggcccctgattgggaatctgaaccaatgctgaaggcaactgtgctgaggttcttgaaggaattcaaggatcaaatccccaaagccactgcactggcactgcttccaagtgtaataaggttcctgatacacgagtcaaatgttgtccattcatatgctgcgacctttattgagaaccttctgatcatcaaggatatggtaccagtaccaagtgcaaatgtgattaccagggctccacgctatgttgctgctgatatcaacccatatgcccagccgattgttcagaacctgtccaaggcactaagttttcctgaatcatatgagaacccctatctgatgaagtgcctgatgagagtgcttgggattgctaatattgctgggcaaattgttcatgagattactgctcgccttgtgggtattcttatggaagtgtgcaataaccccaagaaccctgattttaaccattacttgtttgaagccctggcagcagtgattggtcgggctggtgagcaggacccagcactacttcctgtgtttgaggcaagcctcttcccggtgcttcagaggatattggttgaggacatctcagagttctggccatatgctttccagatatttgcacaacttgtcaatttgagccgaccacctctctcgcagaactacatgcagctgtttggtgtcctgctcagtaatgctacctgggaccgtccaccgtgtgtccctgccttggttcggttgctgagagcattccttcggaaaattccaaatgagcttaaccaagagggcaggctaccgaatatcttagtgatattccgcagtctcctttcgcggagcagtactgaagattctgccttctacatgcttaacacacttgtggaaaatgtgagttttgacatcatgaatcctcacataaatgagatatggagtgctttgtttactcgactacagacaaggcaggcagtgaagtttgtgaattctcttgtggtcttcatgtccttggtggtggttaaatatggaccaggtgttcttgtcagttctgtcgatgcaattcagccaaatattttcatgacaatccttcagcgcttttggattcccaatcttaaattcatcaaagggactgttgaagttaagctgacatcagttgcatcaacgaagttgatctgtgaatctgcactgctgttggatggtgcagcagcccaaacttggggcaaattgcttgacagtattgttgcattgctgtccagaacggatcaagatggggcacaacaagatcagaatgatggtgctgatgcagatagtcagaggacatcaggttattctgtctcatttgtacgtcttcaatatgctggaaagagtgaagatgatctgttgaaagaggtaaatgatccaaagcagtttctggtcacctccttggctactctttctgcgcaatctccagggagatttggtcctatcattgagcagaacgtggatcctgcaaacaaaggcgctcttattcaactttgtgcagcttacaataccaacattgtctaggtaaacaacctctcagttccttcccatttattgcatcgagtcaatccaatgcattttcatttgttgtcttgaaaacatggaagtttttcatctataaattctaatattagctgtaagtgaactttccattggacacatgcaacaaaatctcagtttgatgatcctataaactgcaatgttgtcctttgtacaacttttttttcttagtttggtgcttcaactgtataatagagatgcctcttgttctgtgtagaaaaggatattattatgcacattgtggctaggcccattaatagcttctgtcttacctattcattcaatagattatgttatcttagtatcccatgatttatgttgcaccaaagtgtttttttttttgagtcacaaagtagaattggtcacatattggattaaatacccagatagtatcagaattcacaataactgacaactatgtaggtgggagttcctgtgagttaaactatgagtttgttatccctggcataccccttccacacaggacacctgggcccacacttaacaattctttttggttagggtgtaaagaactctttatcaagttttctgtatcatcttggagcataactaaagccataaacgttctattattacttcacattttaaactgcactgacattaggccttgcatccaaatttttatgtttagtttagttgcctcaataatcaaaattttgtatgaaaattgagtgctatgtgttcagacatgggttgggaaatatagtactaaattgccattaggatttaattaaatggcagtctgaaacataatgtgaaatattatttagttattatgcttcatgtcacttgcaggcagaagtacatccataatttgttgataggaactttttttcctgagaaatatggtgatgcaaaaataaaacaacccctccaagcctgacatatgtcttagtgatgaacattggaacttattctagtatgttctagtttttgtccattattattgtggtgtcaatcatgagccttaggaaacaccgtccaaatgtgaatcagaatccaaatattgcaaattcaagatcatgttctaaactctcctagcgagaatcttactcatgattgttctgcaagtacatattccatgacttgggatggatgtaacttactgaaaagcatatggacacagttcaatgcaagcaattatctaggatgtaagcgagttgcaataaccaaagtatagaggctactatttaataaaattgagaacatattttccattcgtgattcctttatatgcagattgcagggaaatgcttgtttggtgggtcttgtattagctagaatcatgataagcagttatcttgatcctgaatgctttgctttgttgtagtgcagacatgccaattacttatttgttccttgaatatctccttttggtagtaccttgtctagaatatttgcaaaactgctatattatttgtttatttcagtttctctaaacctcctctgaatgtttcaggagccaatggctttgctgtaaggcatttgcattgtttccatggggttttgtcaaaggatgtctcaggggagtctatcggtcggtcggtctatcgggtcaagctggtcttcggtttcatccttgcaatatttctggcatgtgtaggttggtcttgggagaggaaggatgtcgaaatcatatagtggtggaaaaacatgaacattgtggtggaggatgtctctttgattggaatttggaattttcttttttggtgtggaagaggtttgtttcccccggaaaacatgaacattgtggaggataccccgagaatattgccagcgtaggcatgtgccatcctggtggaactttgctgtaatttttttgcccttgttggctgaatgccttgctctggcgtaggaaatggtatatggcgtgggagtatattgtcatcggtcatcaccctttgttaggtcgggttacaaaaaatattgcgaacctcgattggagctcgcgatcctgctgccatttgctctgttttttgaatgcattgagccgttgcaagctactactatagcatctgcccatttctaccgtttcgtaatttcgtttgctttgcactaagattatagcttcatcaagctgttttggatgggttactgtcaccccaacattatcgtgggaactgcacggttactatgcaaactgtgatctactctcttcgtcttttaccgcacggtgttgcaaatccttatatattttctctatcttaaaataaataaatataatacagagcgtgatatatgctaataatataaatctaaataaatctagatttgtaatattacggtggatcgttgtaatattacggtggatcgtattttcttatagatttatttattttgaacgaaggttacacagtgttgaatggaatcgtgaggttcgtcatttttacgtttctgttacgtattccctctgtcaaaaaaaaaaaactcaacctcttcttctagaacaatgaatatggataaaggcatcctcacgtttccgttacgtactcctttaaaaaaaacttagagaacaaaacgtttccgttacggactccctttctaaaaaaaaactcagagaacaattaatatggacaaagatatcccgttgagttttttttactaagcaccaaaatcgtagacggaacctttttcatcttttgtcgtggcgatgccacctgtgctgcttgcgtggccgaccggcctctgcccaacccacgccggccacatcaccacctcgtggctcgtggcgctgctccgcctccgcctccgccacacggccccgctcccgacgaatcagcgagaaacggtaaccaaaaccttcgcctccagcctcgcctcgctctcgcacaaatcaatcccgcaaaatccctcgaccctcgatccccccccttctccctctctctctctctctctctcccggtgatcgcgacgccaacccgcgctcgcgccgggtaaggatcctcctcgattccccgctcctcccatctcccgccctacctagctcacgatcggtcgccgccaccgccgccgagtggtcggtctgtgtggctcgcccgagctgcgcgttgtgatgatggcgatgcgcgtggttcgagttctcgatgcactgggggctaacgacgaatttgctcctccgagtttcccttttttttttctttcatttcctacttcccttttgagttctttccatctattccatttcatacgtgtctctcattttttatcatgttttctcccttgtttcttcgcttacacgatgtgcaaacaggcaacattgaagaccaaaaagaaagcaagaatcatatggataccgagagcatccaggatggtgatgacatcctgctgtcaggtggagacgacgacaggaatggagggagtatcgcggagattcagacaacggtggacctcggggtcgcatttggctcggagaagctgctgaatttggagatgctgctgatggagatcgcccatcgcgcaactgagatcgagcccctcgtgctggatgcagagtcgatatcggccgagtcggttcagagggtttctgaattcgacctcttgcattgtatcctagattcagaggtcaaggagttggagaaattagttgattccattgaagtggatatcgggaatggtggaaagatgatggcttctgatgaagatccggtgagtgaggtgaacagcaagctccgagatgcagccgtgtctttgaaccagatgcaggaccttatttctgctattagaagacaatcggcaaactttgtgaatgtcatagacccttctcaggacaactctggtatgctcatgttagtctggtgctactagtgctagctgtttgctgtatgttttttttttcctgacaattgcatttgtacaggaactagtgaagatggtggatacgaaaatggtcatggttcatctcgctcagccatgcctgccgaggaacaaagaaatactctgcagctgttaaatcagtcaatagcaagtgaactggatctcggaaagaagttacatgattcggagtccgttgtggaagagctcaagcttaagctgcatcatgtagaacatgaatcgtatttcttggaggaatctgttgaagcgatctctgaaagaatgtttgcagctgaaaatgcatctgaattgtttcttggagcgtcaaaggaacttatcggtaaagttaatacaatacagttccacctaagtgcatcaattcgtcgggaaggtgaccttaaatcaaagttagagcaaagcttgacagaatcgaatggttctaatagcactctagagaagatgaaacaagacagtgaaaaggaagtgatgccgactcaagcccaaccggactctgagttcttgactttgcaggataaaattcagcaactagaggaatggctgagggaatctaagtctggattgccattgacaattgcatcaacaggagaaaatgaagtcggcgaagatgagatgagcacattcgaaaatattgttaatgatattaaagatgctgttttcagagcagaaagtagaacacagaatgctgaagcaaagtgcaaacaactttctcacgctaatatacaactcgatgaggagctaaaatccctcaaaagtcaggggtcagatagggctggcttactggaggagaagcttaaggagtcagaaactcagttactgcatgcaaaagcatcgattgaggctattgtcgaacggcacagtatatttaagtcttcaatgtctgatatggagcaggtgattgatgatctaaaggaaaaatatttgaaagctgaaaccagagctgagaatgctgaatcaaaatgtacattgctgacagacactaacttagagcttagtgaagagttgtcatttctgagaggtcgagtagacactttagagaattcactgtgcaaagccaaccaactgaagatgtccgcagcaaaagatattggcattaaaactaaaactatcactgacttagttgcaaaacttgcattggaaagagagtgccttcatttacaggtataaattttattattcaagaaaaaaatactgtggtcagtattttaactttgtcctgtgtatttatgttctttgtatgttatgtaactgtacttcgtatgatttttaccaaaagtactttgtatgatttttaccaaaaaaaattgatgcttatgattcacattgttcaaataatatctttggggttctggacttccggttcaaacagaagcgccaaaagataaaaagaatgaaggctattcttggagccaggcaatcagttaatcatagatagacatacgcaggatttttttcacggtcatctagtcaatataccaagctcatattttgagattctgaatgctttgagtagaaacactgaacagactgaaaaaatagttcatatttgtatttcattttcataacatctgcattatgtttctttactccttttagttctgaatgttctgctctttctttggcatgttttagcctttttaaggcatcagacttttcaacagactggcgctaaccaaaattagatattttattaataaattcctttggatatcaatcctatgactgcatcctccttttctcagttaacagtgttgcagaaattactagtataaataagaatatatgtactcctggcttcttaaccagcttcccggtatcttctctgtacagattgttacactgacgaagaagaacaggatgttggctcaaaagtgcaaagaaaatattactgaagttacactactaaacaacaaaattgctgccagtgaaggtgaactcaagactactaaagtaatggaggaaatggtctcagattcttcacctacacaaaccaaggtaagttcttgcggtgtcttgttttaaaacatgtagaagcagcaaattcttcgggtctgatcctctttgttgttctcacattgaccacaattgttgcatcattgaagacaatcatcagtgtagaaaacaactctttacattgaaattgcccacccaccatgctctctcttccatgagtaatcacctgatagcgcaaagctctactagcagaactcagattttataagcattcacagctggggttcttgtctcaggaccaaaacttgcaacggttaagggttaacatatttatttcttttaagcaaactttgttcttttggaacttatgtcaagcacaattactatgttcttattggtaattcaccctacgatgtttattaatgtggtaaaaggtgaagagagttgctgacactcttggagaggaggaagatgagattactgctccaccagaggataattccggtgcctgcagcacacctaacacggtgaggtccattgaaccaaaaatcctgaactggaagtggatttttgcggcattcctagtcttgctggttgctgttctcgtctgcctaccgtaccaatgaggtgaccatgtcctatgatctattaacgcagcttgtaggaccagatagaaagcaggtaattttcctgtaatgattcttctaaatcattgtaggaatagtcaattttggtagtggtcgttgttgcaagtgtcagttcttgcatgaactgtctatgtgtcaaataatctctggggtagaagagattgtagatctgaactgagcaagtatgctccatgccttctctgaactagcagatccaagcaaatcaaattggcaacagagaattcatgcagtatctacttgtatatatatttcgagtacttgactaatatcgagtagcatttgttctagacaaagtgatcttcactattttacagaatcacagatacaattagcctgacagatgatggtttagtaggttcagctcatctgtacaaaatccatttgtgtatttgtgagcagttatgttatacaagtacaattttgtttacttactctttagttaaactgtaagctttcttcgttcgtaagttgggaatcagggctgtgacaactgataattgcagtggaaacatcacattagccacacaatgacatgcaagatcagtctgaatcgagcactcgagcttgcaagatgtgagtacatagtggatcattacaattgacatctgctgtgtcatttcatcactgatggattgacacaccacaaacaccccccagctttatcatcagaattcatcaccatgaacacatatatacaaagatgtacatggcttatgtggtactaacacacaataagccttttttttttttggggtgatggtgcacagtaaaaccttcgttttagtatgcctcaacaccagtagacttgcaatcaacatcgaaccatacctcgttgagacggccaatgatgcgaaaggggttgttatactgcgcaattgagtaggcgctcttgctagggtagtttgtggaattagcccatggtgaccggctcaaactcaacgcaagtttctccgcttcctcgacgacattgttgtcccgtgcataacccgagaagctcctcactgcaatgcagtggcttggccacctatccgggtggaggttcagttcggggagaggcacaggaggggaagcctggaacttcgctggtaagtagagccgcacaaagtaggcagacgagtgtagcggccctgcacctgggacgatgctagttaggatgggagttgtcatcctgatcctggaggagttaaggttcgcgcccatcaggtactggaacaatctggcaggaataacatcaagagttagtgcttgtaggatctggtaaaataaattctaccgacagggaaactgaatttcagaaaggtgtaaatgagagtgaattatgaatgaagatcaatgtagtagtgaatctgatgaactcacaggctaccatgttgttaattgttgtcttaggaatcaaaataatcacaaaagtgctaatatattcaattagctctccagcaaatcaacagataatgccttttatctctgtattacatgaagagctctttactgatgcaactaaaagatttggcagtgcagcccctaacttatggctaacaagtaacaaaacaatcctgcatattttctgttatagaaatctctcacaaagacccaattctttctagaaaaaatcagtactactccatccgtattttaatatatgacgccgttgactttttgacaaacgtttaacctttcgtcttatttaaaaaatttatataattataatttattttattgtgacttgatttatcatcaaatattctttaagcatgatataagtgtttttatatttgcataaaaattttgaataagacgtttggttaaacgttggttaaaaaatcaacggcatcatacattaaaatacggatggagtattatttaacatcacaatactgtctcaattcaagaccacattcttcccgattctcaactgaaatgaacaagcatcttgctaaagtcaaccgacaatagccatcgatttcactcatcaatctcttctacaattcaccgatcttttccattcctgcagagcaaccaacacccaaaacgagcaaatcgaagagctgtgctcaccaaaaaaaatcatcatctcctacctactccaccacccaccgcacatgattacagacaggctccaaatcaagcgcggctgatcccccatcccccggaccaaatcgtagcgacgagggtctcggatctgatcggggtggggcgggctttgcttaccggtggaagccgagcttggtggcgacgtggaaggagatgtcgtcggagggggcggacatccagacggtgtcgcggtagcggcgcacctcgaagtcggactcggcgtgcaccgtcgtgtactgcggcgtctcctccgtgccgcgcgcggccggcgggagcagcgcgagggggaggaggagggcgaggacgaggtgcgcgagccccgccatggtcgccgccgcctcagtcttcgctccgagcggctgcttgcttgcttggggaggcgatcggcggtggatcggagtaaaatatacgtacaacagtcggtatatgattggagaattgtgtttcgacaagtttcagttctggacatcactgttttgttttttagaaagagagtaaattatttttgttaataatgaaaaagagtaaattctagtagtacgagtttaaccaaactatcactgaccttgtttagagaattagccaagatttattttgagagctattttttaacacaaggaaatagccatccaataaaatagccctaagttgtttgaattcaaaggttattttgagagttatttggcttttaatgtacatttccatagagggagatagaggaaaaaagacactttttcagtggccccacttgaaatagctccaattaacacttcttgggtgggatagttttttgggtgggttatttccaaataaccctaaaatagcttaacttttagatctttttgagctatttgaggaaaggctaaaaaatatctcttggatctaaacagggccacagtagatttaaaagtgttgtataaaaaaatatagatttaccaataaagtaagataaaatattacaaaactacatatttagtattgaagttatcacaatcctagtttaaatctctatcattacgttatgttagagctataaacatttgtagttttctaattaaattgataccaaacctgtagttttgtgacactcaatctttatttttgacactccatcttaaatatgtattttttgagaaattttgtgttaaatctatatagttttgtgatagaacatcgtaaatatgtagttttgtgataattttatcaaagtatttgcagttttaagatgtgctctttctctatttttttttgacaagtcacatgtctgtgcaagatactttgtttaatttgatatatgaaacaagtttatttttttttacctttttttggttgatttaagctgatttttattttgaagttttttttacatggaatagcagaggttaaggaaggagtagatgtaattagagaaagtgataataaagatgtgtcgttgatgttaataaagagtactaaaaagtagaacatgcatggtgggaaatttaagctcaattggtcctaaggtttgttctccgttcggtatggtggcttgggggttccaaacttagaaaaatttaccatagcttttcagctaaggtggctatggtttgaatggagcacgtcagaaaagccttggattggaactaaaactccttgcgatgaattggataaggatacgtttgatgcatcgatgaaagtccaaattggtgatgggcaaaaggcgagcttctaagaatctaattgatttggtacctaaagtgtaaaatgtcaagtgccgaacctctataggcattcgaagaggaaaaacagcaccatccaggaagctctgcaacaaagaagatggatcaatgacatccgccacaacctcactatccccctccttgatgaattcttatgggaagttctagcccgtgacaccccacaactaacagaggaggtacaagatttgattgtcttgcgatggacaaccgatggggaatatagtgcaaaatctgcatatcaattccaattcaacggaatggtactatcgccatcaacaaagttgtcctgggaggaatgggcttcagcaaattgcaagattttcagctggctagtgcttcaaaaccgggtgtggacagctaaccagttgcagatcaggagatgaccaaataattatttctgtcagttatgcttccggaatcttgaaactgtcaaccattgttcgaatgcccgatctcgaagcaaatctggtttgacgttctcacacagctacgtcaagggcacaacatcctgaaatgtaataacaatagaaacctattgggttggtagacacaagaaacaagcgacccataagtaacaaaactaaaaggactcgtatctctcttattgctcattacttgggaaatctggaaggaacggaacacaagaatcttcagagaaaaggaggcgacagtacactagatgatcgcatccaagaggagttgggttggtgaggtatggccggcgctaaacatattgggagaatgttgccatgagaagttaggagagctgcttgtttgcatgtaggcatgtacggttttttctcttcttccttgcttagccttttggctgtttgtactttaaccctctcctatcaatataaagcaagtcaaatctaaccgggtgtaaaaaaaaagtaagaggaccaccttcttcagtgcgtgattcctctggattaggttaaacgagtgaatcatcaatagcgagcatgagaagaactgggggcaaagcaattgaaaaggacaaagaaccacgacagcccagattttggatggggattgccattctgatcctggaggagtttagagattatcgcctgacatctcaggcactggaacgaattactgtcaggaggaacagcatcaagggttcgtgcttgtaggatctagtcaagcaaattccatagacttctttttttttaagaactaaattccgtagacatggaactgaattttagtggattggtttaacaaactggatagcaaccaattaactggatatatatagcaatcaaatgtgcacaaatgacgtatgccgtcaataattcttgcaggttgtaaatatcaatatgactaataacatggtagggtgttttgtgaggtctagtacgaaactggctacgaaacaatccaatggatcaattagctctccagcaaatcaacatatagtaccttttatctctgagttacattacatggaagattcttcagttcttcactgatgcagccaaagaattcgtagtactgtatcggtcccctaatttatgagtaaaaaacatgatcctatatgattttgtcttctacaggaatctctcacaaagatcaaattcttcctagataacagaattgaacatcataatgcaacatgcaatatgatgatcgagtcccctatggatgatcaagcattcaagctagtttgagaattgctatctagagatcagatcattgtattttaattttagtggatatagtgataatgggaattttcttggtctaaagcctgttccacaacttctaaaaccagataaaactcgtctgtgtacatgttaattgtagttttaactcaacatagagaggagtgtgtatattatatgtcataagaagatagcaagagagaataagtgaaaaaaaacttgtatgcccgttcgactaatgtgagttgaagaaatgataaatcttaaatgacccgccataatcttctctgacaagtgagcactactttaatggcaataaaattgagcatagtgttttcaacgtaaaaagcacatgttcctcctttaactaggataactttcgaagctcgaaacctacatatcatatatatttaataatatttaataagtactccctccgtccaaaaaaacaacctcatactatgatgtgactcatcctagtacaacgaatttaaacatactatatgacatagattcattcacattaatattatagtataaggttagcttttttttttaggtagggagtatatggtaccaaaacaactcacgatgtaaatgctcttaaaaatgaggttaattagatcatgccactgcaaaggctgaaaccgggtgtgtgcctgtgacgaacctacggatctccgctagtttgagagctagaattggggatttaggagaggatttgcaggtttggagcagagtttggggaagaacagaacgaggtaggagaggtagttgagtttgatttgttctttacttcatcgataatctgtctcttacaaagctcggccttatataccccaactcccacgccaccaagccaaagactaaacctcacacctgcgccaacctcacactcagaatacaacggcccaccaggcccatctccctctcactctctctcacacaagtctgtaacagtgccactaagaattctctaaactagaaccatgctaacatatactacaccccaaccattccttgaatcaacttttcagataggtcatattgcccctgctgatgctcacatcatccctgttcctcgttggcgccagcagactgcctagtaggccatggagacaacctgcttgtcgatcgcacaccgtgaagctccctcgatgtggacctcgacgtgcaccaccacggtggtggaaaacctcgacgaccctacggcggtggtcgtcgttgcctttctcagcaacctagccaaactccgcctccgcatcagtagcatcgatcccctgcttccagggttgcataggatggagccaagcgctaattgatcgatacacccttcaccggtcagccgacgatatgtgcataaggtatcacatgcatgaacgttgtgcctgcaggacttgtgtgtctcgtagtcctagacccccgaatattgtcgctaccctagaggtcgaggccaggaaggttagatccatcagcgggaggcacttcaggatgatcatctcctacgacgacaataaaagggaccctgcgaccatcgtcttcttccggcgatgtgagcggcaggaccgaaagaggacatagcatctagagccctcatgtgtgatgatggcttctccatcttcctcctccctctcctaccaaccacctataatccatcttgaattatgacgactctctccaaggatagagggcacatgtatcaaatcaaatcaatacaatcggggcaatatggtccatacgaaaatactaagtaaaaaaactaactcaagggtggctgaggcatatataatgatatattctaatttagagaagtataagtagcacctatctagtttcaactttttataatattccctccgtttcaggttataagacgttttgactttggttaaagtcaaactgttttaaatttgactaaatttgtagaaaaaagttgtaatatttttaacccaagacaaatttattatgaaaatatatccaattattgatttgattaaactaatttagtattataaatattactatattttctataaacttattaaaatcagtttgactttgacctga

SEQ ID NO: 9747 - DNA, 6736 bp, Oryza sativa
ctgctaccccttacttctgtcatatccttcttttgtttcctcggtctaccactatttctattcattctccttgaaacctcttaaaattggatcttatagctttttgagtttattatctcgttgggtttcgtttttataatttctagaagtcccgtcaaacgctgccattatactcctctaaggcccgtccactctcttttctctttattatcattgggattttacaaatcgaacataattatcgttcgggtttattttttttactttctataagtcccgccaaaccgtcagcgggtttgccattgtactcctttatggctcgcccgctgcctcccttgagattttaaaatgcatcatgattatcattgttttatttttactttttagaagttccgaacctttaaaaattggaccttgtagtttttagagtttattgtcttgttgggtttcattttttatagtttcagaagtcccgtcaaacgatgccactatacacctctacggcccatccgccgtctattctttattttcattgtgattctaaaaatcgaacataactatcgttggaatttattttttattttctagaagtctcatcaaccatcggcggctttgtaactatactcctatataccccacccgctgcttctcctttttattgtcattgagattttaaaaattaaatatgattatcgatggggtttattttttttactttttggaagtcccgtcaaccgccttactcgtttgcttcacggcctgcctgtcgtccctccttttaatcatcattaggattttatttggtgttttattaacagtttttatatgtcgtatcaaccaccaccacgctactcctttataggcctgttacttaatttatctcgtcatgtgttttagatggtcttttctttcaatagtctttatttttatcacaaatttttgttatttataaattgtattcctaactgaaatcttatttttctttttctaattcagaatttatttttttcaaattttaattaatatcgtattgtgttcttttaatttttttattttttattttcaatttcagttgttttaaaattttattcctacttgaactctcttttagtttttctaattttagatattattatatttttttattctgaattttaattaatctcgtattgggttcttatatggattcttcttttaatattgcttatttttaatttcaaattttagctaattttaaattgtattcctacttgaactcttcttttttttcctaatttcgggttttatttttatttttatcctcaattttaattaatctcgtattgggttcttatatggactcttcttttaatattccttatttttaattccgaatttcacctatttaaaaattgtattcctatttggactatccttttcttttttaaattttagattttattttatttttattttgaattttgattaatctcgtattgggttcttatgttgaaacttcttatgtggtgtctcctttcaaagttgttttaataatatcatagattttagtagtcaaagctttgtcattaaaattatgcattagttcctatatctccttatttctcatcttatttttcgtggctaatttattgtctgtagctagttgcacaaatatctcctcgtttaagtctggttagtgtccagcacaagttgctcatttttctcgattggttgaagcatctacttgagtcgaatgttgcattaaactagttagtttgctcataaccgatttgttgtgcaattttgagatggaatctgaagtgatttggggtttgaggggagtacaacgtaggtgatacatatgcttgactttgtcttgtggacttatttaactactgcaaactaattttttttcacttgccatgctcttttttgccaatttactaacgtcactgctatctatagtatgcactgaactgaagctgttgatgcaccatatattaatgtactgcttgtttctagaggtagcacagtgtacttcaatgtttttgtgactcgggaaaatttatgcatgtcagaattgtcttcagaatttctcaattgacacatcctaaaatacttaatgccttatttttcttgttcctctgaatatgtcagtgaaggatatatagtttgtgcaaagcctgttgcttaaaagccccctcctcaatatgtagcatttcaaagacatacaaaagatgataaaatagctagagcttaaatgcttggaagagggataagttatctgcatttgctgtttcatctacttgtattattggtactggaagttgtaactcccataactcgtaacttacagtggtgataaaagattcttgttgaatgtaaattggttataaacttataagttacagggctgaaagtttgcttgtattttgatggatgaatttgtgtgcatgtgaattgctgtgtatatatatataggaaacaactccattgctataatgtgttgagaaagtattgttcagtaatccatattgacatatgaactgcattgttggttttttttttctgccttgaagttaatttttctgacggttctacctttgtttttctgacggttccacgtcaaaattatggggacaaaaacgtgacggcagtggattttttctgtgttcctccatcagaaaaatacccacagaaattgtttttctgtagggaaaccgtcaggaaaatggaatttttccgtggtgatttttctgtcggcaatttctgtcgattcacccacaggaaaataatttctgacgggaaaactatttttctgacggtttcgctcctacagggtaggtcccaaatctggtagtggctctgataccgctatattcgaagggcgtacccagccttagctaaatcttatgctacttggagttctagaacaaacagaaaaggtgctgaaattaatttgaagagagagtggcacagcgcaaaaagcctgaaaggccaaaatgatagccacattcgctgcatggccaacttaattggttagggccacgtaatcagcttgggaaccactgaaacccatttgacagggcaccagtcattacggtctcctggttttcctctcttccctatctccctaggacgacggcggtagacatagagaaggacgacggccaacggtagaggagctaggcaatggcggtgggcctcgatggcatctcggagaggggcgatgtggagggagctcaacttggacctcttatcacgtctggtgagagatgactcagagtaagccctcttcagcaactagagggtaaaaaaaagaggaggaaacaacgagcagccggcggcaaagtacatccgttgcgctccccatcgccgttgccgccactgcgaactttgatttcccaagtccctctgccctgatcctcctttgcgccctctcgagctcgtcgccatctcactcatagccgttagtggcgccaacagtctttcaagcggatcttagcagacgaagcgcatgcagatgacgactgaccatccccattgattccccttatcgttgtcagcatgcaacctcctcacgcgcggctagatgaggttgctcacgagctgcgatgtgactcccaaccccgcgtgacggcataacatccgatgaacacccagacaacgagaaggccaccatggctagttcgttacgctctatcgccgcaacagtccatgtcctcccttttcatccccttcccctacctcctcctttatgatatcctttcctttttttggcgccgttgtccctgagccttccctatagccactgccctggagagatggtgaagaaatggggaagaatgtaagggccctgacataggtttcatgtggtctcacggccattttgactacagtcaactcaccatgtgagtgaaaatcggtcaaaatactgtcctgcgacctcgggtactctggttgtaagttgtgggatatgttatatctggtattaccattcaattacacgatgcaaactcgaagttaaaatgagggaccaaaagtgcacttattccgctgaagtgctgaacattggaccgatctcctttgtgcgtcctaaccgatccaacggctgcccacgcacacgtacgagtaacccagttttatttcggcccaactggtgcccaagtgcccgaccgcgcgtaggtttgctattgccgccgcggatagctctcgtggccgccacggaacgaggtccgcgcgctcgcgattgggctggcagatggatgcctggaagcgttggaagtgggctcatatattaggagaggaacatacaagtcaatagtggtaggcatgcacactgaagactgaactgactgatctgaactgttgcttgcatgattggattggttgtttagataggagtacttggataccttaatcaaatcatactacaacatgcatatggtactagagttctagagtactctctgtatttattttgcgatggagggagtagaaagcaaaggtgttgagattttctttagaagagagagtgccacaacaatgtcttactttttttttcagattattcattggattatcaaaacggattatttggtatatacttttaaaaagaatatgttttctacaaactttttctactatattgcttagatcactcgttttaacttttaaactctttttaatttatttttaaaaatattttggttaccccttaaaacccatcgcaataagctgcaaaataatctgaaaagtacggggtgggtttgaaagtttatactttggaatggcaaccacattgctgcatggccatcttgaggagagataaagactcaaagtattctttccatgaggttctacctcatgttaaatttcctctaatattcacatgggaagaggcatttcataggattccataggatttattcttttgattcaaaaggctatataggaaaaaaaaatcatataggaatgaaattccctaaaatttttatgaatttcctttcaatcaaaaggggtctaagtttgctagccaacaatgagatggctagctactcatagacttactttgtacggcaaacataaccaaaaataccataattagaaccatctcgatctaagctctagcgagctacttcaaacctttcgccactagcgcgcagcatgtcgttcttgttgctttcctttcgtagcccttgggctacggtttactttcccgggttatacggctcatcagagttagcagtggggcataatccacaaactgccttgttgatcgtcgaaatcacaaagaaacacgcaaaattctggcgtggcggccgcggggaaccgtactgcatgccggcaatacggcgaagaagcaccggccccagtaccgtgtggatgcacggcatcatacggtacgaccgaccccgccgggggctgcgctgatgaaagatgcgcttaaaccgggggggagcagtatcagcatcagcagaacgtgacaccccggtcccgcgcgtcatagtcgatccaaaagccccccatgatcctctcgccagagcctggcaccgggccccacatatatcgcccgcccaatcgagcggggccccgaaaagtatcaggcacaggagacgcgatgcgttcgctgatctgaaaaagataaaaaggaccaacgtacgcatgcaaccgcgcggaggagaggaggcgagcgtgcagcggggcagagctaaacacgaacgaaagcccggtggtggcgagttggcgactgagcgcccgtgtacgtcgctggattccccgacttgtcaccgttgcaggcttgatgtcccccgctgcgttcgcccgacggcgggggccgtccgcacattaaccgcttgtgtaagtgagctttatgcgcggtcgtcggaagctagctagcaaacaatgccttgactgttgggggcgctttgggagcagctggcgcgcgcgtggggtcttctccggcgaagcagagcggacaacgtgtggagttcccaggagagatcgagcgagacgccgagacggacacggtcacgcagctttgctgctgatgtgggggcttcgttcactgcgtgcactcggtccgtggaacagtggattagataagaggctccgacgcgagctgatcggacaacggcgtccggctctccgaaaggccggctggagtggagtggagtacaggagggttcagcacagcgccaggccggcttaaacatgaattctgtgagaaaattttgtcatcgatcttcatctcatctctttaaacgtgtattaagagtagttatacctacgggtgtttgctgcacaggcaatgaggtgtatgtgtgtgcatctttctcgaaaaatataaatgtactcgtgctgattttaaatataccatgtaagttgtttagacttgtgttgtgtatatgaattgagaaaacaacttgcttactccttgtttttacatttctgagatttacgagggggatactaacatagtaacatttagagtatatttcattttgaaccacttttaataaccactggtagagaaaccatctttggtcggtcgacctatatccacaatagtcccggttccattaaaaaccgggactaaaaatgatttttagtcccggttaataagaggaagatctttagtcccggttgttgttaccaaccgggactaaaaatcatctttactcccggttgattccatgtcaggctgtgtcagggccctatgatctttagtcccggttagtaacaccaaccgggacta

SEQ ID NO: 9748 - DNA, 1276 bp, Oryza sativa
tattgggagctctagtgctaatcttcacaggtacaagctggtggtttctttacagcaagcacaacatacccatgtcaatggaggcaggctacaggatggtaacaagccaattcaggatgttcacgtaccgagaattaagggaggcaactggaaagttcaaggaagagattggaagaggagcctctggtattgtttacagaggagtacttgaagataagagagtgatagccgtgaagaggctaatgaatatttcacatggtgaggaggaattctgggcagaaatgagtattattggaaggatcaatcacatgaacttagttaggatgtggggtttttgctccgagggtcaacaaaaactactggtgtatgagtatgtggacaatgaatcactggacaagtatttatttggtgatgtaagtgctgagcgattgcttgcatggagccaacggttcaaaatagcgttgggtacagctagaggtttggcctatctccatcacgagtgcctagagtgggttgtccattgtgatgtaaaaccagagaacatacttctgaccagagattttgaagtgaagatagcagactttggactagccaaacttgcaaagagagacagcactagtttcaatttcacccatatgaggggcacaatgggctacatggcaccagaatgggcgttgaatttgccgatcaatgcaaaggttgatgtctacagctatggagtagtgctccttgagattgtgacaggaatcagggtttcaagcggcatagtggtagatgaaaggcaagtggagtttccagagtttgtccaggaggccaaaaagattcaggctacagggaatgtcaccgatttagtggatgacagactgcatggacactttgatccagagcaagtaattacaatggtgaaggtagctctttcatgcctggaagaaagaagcaagaggccaacaatggatgaaattctgaaggctctcatgttatgtgatgacgaagacgactaccatcctgcctattcatattagcctgcagctactgcataaattttgagatgtgtacgtaataggatatcctagatgatgtaattataggcatagctagatatggtgacaagggcttattgtttatgacattggaatgattatattgcataatgtaacaagttttgttctgtagatgaaatgagtgaatgaatagtatgcagggctattccagaattgattggtttgttcgttttctctcaattatctctacaagcctacaaactttaaccgtcatt

SEQ ID NO: 9749 - DNA, 1859 bp, Oryza sativa
catttcgagttagtggttcatgagcacatgagctataggcctacctgaggaatagcactgcatccccagatactagcttcttcttgttgataaacccgctccatccagtggttaaaaggtgcctccgtggttggcctgtaacaattagaggcagacctatgagatattcatggaccataattttctcaagactcctccaaattgcaattagcttaactattagagattatgtcgcaatagctgtagaaataggtagtctatgcataaattaaaataatttattgaaaacactcccagagtaagtgagcagagcctaatgagaaaaaatagcatagtttgctcatttttatctcatccagccagccaagttacagtttggtttgcttgtttcgtctaaactggacagccatctcgcttccaatacctagacatgatagatgtatctaaaaaggagacctggataatcttactaaaagaaaaaacatatatatactaatgcgttattcggtgaacaaagtacagtagttcaacctaaacagcctgtgatgtactataggaagatgtaggactgtacagcccgtaggttactaggttctctcacgcattaagaaaattaatcccatgttcccagggagaagcctaacaaccaagctgtatgacatatatatggtagttagtgatagtacggctgatatcccagtcaccaagataggctaaaccggcgaatcacctcgatagatatgtctgaacctccattccgtgccgtgcagatcctttgccacgagctcctggaatggcctctgcaggctgtagtcctgcaggcgccaagctgaacagagtcaccacacaagcaatcaaacagatcacggtgaggtagcttgtcccaatcgatatcgtcccgtaccagcggcgggaagcagtcctcggcggcgcggcgaggcacggagaagccgccgtgcgtgctggtgtcggaggccgtgagcgtcttgcagaacatgtggggaatccgggccggccgcttcacggcgtcctcgccctcgccgtcgcaggccgcgccgtcctctccctcccgcatccgcctctccacttcctgaaaaaaccacccagaaataatgttcgtttgagctactagcactgaccgaatgtcaaagatattcatcccatttttggatcagcacgcacgcaaacgcacctcgttgtcggcgaccaacgagacctgcgcgtacacctcgtccgtcgcggcgtccgcctgcaaacagcacaacgggaggagcagaccctctctctcaatcaatacctcgaacacattgcgctcgcgcgagagcagcaagcggcgagcgcactcacgtggaggctgacgtcgacgacgcggcagaacacgtgcggcggcaccgcggcgccggggccggagccgggcgcggccccgaggtgctcgaggtggccctgcggcaggtacacgacggcgctgcccttccgcggcagcggcgccacggggccagcgcaggcgtgccacagctccaggcacaccgcgccccccgccctcgcctccgcaggcgccgtgacggtgccggtggcgccgccctcctcctcgtcttcctcctcctccacggtgttgaggtcgatgcccaccatagccgcaaccccccaccggcagctcgccgcgccgccgccgcgcttgcttccaacgcggtcgaaagaggagagacggggagggaagcgaggaggggaggcgatcgaggtccctcgcttgggtttaatggagcggagagcggagtgggtgaggagaggcggaggtggggaggcgacacatggtggtgatggccatgaatggctgggctgggtggtggtggggggggggg

SEQ ID NO: 9750 - DNA, 1272 bp, Oryza sativa
aattatataacctggtttgaaaacaagcccaaagttgttcaagttcatacaaaaacaaaagagaaaagaccactgggatcaccagctttccaacaaaggcatcacacatctgcctcagtgctggggactaactagtatctgggttggaaactaactagtatctggcaagtgaacttgacagcttcctctggtggatggcagtgctggggactggcaaatgatactggaggagcagaatcagggccaacctctgggcttgcaaaggcaacagcatttctcgctgtcatgtccttgctccctcttgcatctctcactgaagcaagaccctcatggtctcttctatcccttgatggcttgataatgggccacagctgccaggcagcaagttgcctacccagttcaggatagccgacaactcagacatctagtaatctcctgccgaacttggcctgcaaaacaagtcagaggtttcaggggatgattagccaccaactagttaactgctcaaagcattaatgatatttctatctgtttataaccaaaaacatcctgaagagttctgttgacatcagtacaaaatttgatgcagggtcatgatggtcaggacgtcatatccaccctccgaaatggttcagcagctgtgcatgctgctgctttgatgaaagaaagaggctacacccatcgccgtagatctcggcaccgtctcactcctggtaccgtaaaatttgctgctttccatgtgctgtcccttgaaggaagtaaaggtctcacgatattggaagttgcagaaagaatccaggtttgtttccacacagatatgctagctcaattttgctttgtgattttcttctttttgttctatagttgaatgaatttactcttttttatgtttagaaatctggattgagagacctcacaacaagcaagacgcctgaggcatctatagctgctgccttgtcaagggatacaaaactttttgagcgaactgctccttcaacatactgtgtcaagtccccttatagaaaagatccagctgattctgaggttgtgctgtcatcagcacgtgaaaaaattagggcttttcagaatgtgatttctgactctgaagctgaaaaggaggctaatgatgccgagagggatgaggattctgaatgtgatgatgctgatgatgatcctgatggtgatgatgtgaatattgatgtaggagatggcaaggatccccttattggtgttaaagaacaggatggagtaccgattacaactatagtagat

SEQ ID NO: 9751 - DNA, 3360 bp, Oryza sativa
aaaaaggtacctatccaatgactcattttccacatactcgtagactaataacctctgacgaccctctgagcagaatccccacattctgaccaaatttatgtgattgatcctcccaattaacgtcacttctgcccaaaattcctcttcaccctgtctaacatctgtaagtttctttactgcaaccaccttcttatccccaagtattcctctgtaaactgtaccactgccaccttttccaagctcttctttaaattttcccgttgcttccaccaattcgcggtatgtaaacctcctgaactggcttgttatcattttgtaacctttctccatggacttgggtatgttatgcattttaaaaagaaagtaccaccctgtcatgataaagaccaactcaactgctcctattatagtagcaaaaacatataagtatgcccacattatgttgtcagaattttttctgtatgcatctatggatactaacataacttttgaagcatttggcttgcaggtaaaacaaaaatgtttggagatcaaggatgttgaagcaacgttcttaggaagtttgatgtagttgtctccaggaaaatatggataaacctggccattgtagagcaggcctttagtgtaacatagaccatctccacctttgtaggtaaaagataagcacacgcagctgtccatacaaatcctcatgcattcttcaagcgagattgacttgtttgaagtcagatcaaagccataatagtcaccatgaggaatcttgacgaacgtaaaatcctcgcgttgctggccacagctgacgctgaatgttggcctgcagcctctactccagttctcgggatcagtcatctcgtatcctggaggacaagtacatctgagacctggtgagtactcacaaattccatttcttccacacaatccatgcacatagcacatctgcaatacaccttcccctgtgatagtccagttgccatctgatgcattcaagctgtacattctgaggttgccatcataatcaattgtgatccttctctgtatccctaaacctgaatccagggctaccattttgaacccgtcgcttgacaagaacctgccctcgtcgtccaggaccgctatcttgctgctgttgaatctagtccggccgttctgcactgcggtgtagtctggacttggccagtatatgcttgtgatttctggtccattgtactggagccggaggacattatcgttgtcgaaatacaggaaatggttaccagattgggagactaacctcttctctcttgtgagacgctgcgatggtagcagggtgtcagtaggccagtcgaagctctgccacacgatcttatcctcggagtcggatgccttcattaccatattgccactgttgagcagagccaccgtggtgtgcttgccccagccagtcttgctctcccagaccgtggtgccattgacatcggtaaaagccaggttgccctcatggctcagggatatcttggagccatggccgttcaccggaaggccagagtctgcggtccagaccaccgtcctgtcggtggcatgggtgaaccagatggagaagtagaaggcgtttgtgtcatctccagatgggtagaagccgcaggagaaggttgtgtctggtgaaacaaggaaggtttctccatgatctacctggagagatgtacctgtgcctgtggtttgccatggggatgcagatgcggcgcagcacaaaagaacggagatgaaggaaatgaagagtgggcacaggaacttacccatctggatttttggttgttggggggtgacgagtgcaaaggatattggcttctttgtgtgtgcgcagactgtgccctgtggcctgtggcacactgattcttgtcaatcttgtgcccatatctcttgagatatcacatacccatatgcgttacctgtagaacgaaatgccacattgccactggatggtgactggtgactggtgagtttggctggcttattttcatctgcagcgagtgttactttactcgcgtgatcttgttcattggattggatcaccgagaatctgacgtgtgcttttttttttttggttcctgtgtaccctctccagctctcctttgcctgggagaggttgagattctcagcacacatcacattcgttctttgttccaccgaaagataacatggaaactgtggctgtgttctttggttagagcaagtataatagtaggttataagccggctaaatgttgaggtggaggagagaagaaaagagaagcgggttgtaaacttacagccggtttggatataaaaaccagaaactctgtgagagagacaagtgaaccctgtattaattgtaaagatctaactattatatgggtaggctgagagaagactacaaagaactttagagcaggtacaatagtaggctataagccagctataaacataatttaaagaaataaaggaagagagagaagagtagcgggctacagatctgtagccagctgcagcacggactccaaaacgtaacgtgtgtatgacatgtgagactaggtattaatagtatagtaagcaactatttgtatgaattggctattacattggctctagatgatttggagcagtagttggctatactattaaacttgctcttatagccaacagatcggctgtattattagccttgctcttacagttactaactcacctcattcgttattcgcgtgcacgttttctaaacggctaaactgtctttttttttaaaaaaaattctatataaaagttgcttaaaaatcatattaatctatttttttaaaaaatatagctaatattcaattaattatgtgttaataagctacttcgttttacatatgtgaggggataccatgaggaaagagttatctcctagtgttgtatatattggaaaactgtaattttgttttgtggaccaaccgactatatttcttctcaatatatttgtcaacaacatagacgaagtttttgtccatccatgtaattatgaacggccagaacggatcaacaggctaaatacagagtacttcatttgttctaaaataagttaattttaggttctactttttatcctaaataagtttactttttaatctatctgtcaaaagatgagttttattccttcaataagcatacccacccatcaatatttgtcgaaagatgagttttatttctttgatacacatactcacccattaatatttccttttcgattgatgaagaacatttttattttttttcacttcattttaatttgtgtttcaatagctaaatgattttgctattcctctgtcgcgtgattttttcttacgcctcactcgcttttgtggtcgt

SEQ ID NO: 9752 - DNA, 5422 bp, Oryza sativa
  unsure (1)..(5422): unsure at all n locations
aggcaaaaaaactgttgggcatctccacggtgtacacattgcattgtcctactatattgcttgatttagactgcaagacggaatattgtcaacttcatgggggcatccatgtttctttcaatgtgtgaaagaggagtaccgatgaaaccgtgattttgtatattatatatatcagtttttcctcccttctgccccaagctaagttcttttacataagcaactagtgtatgaaagttaaaagtatctttaaagaagaactttatttgggagtaaaaagaggacaatttttggatgaatagtaatagagaaaatctattatatgccattaactttgtcacacttctacaatttaccactgactttatcacgttctacaatataccatcaactttcacttaacttctacgatttactattgccgtccggttagtctcagtgagtactgtacaaatttattgaaatgatcaaaatatccctgggaacaaaaactttcaaattttggacaaaaattctgaaatatcaaatttcatgttttagaccaaattttagatggttacaatcttatgtttataatatgatattttgaaatttttatccaaaatttgaaagtttttgtcgtaggggtattttggtcatttggacaaaattgtacagtgttaacggaggctaaccggacagcgatggtaaatcgtagaagttaagcaaaagtcgatggtatattgtagaatgtgacaaattcaatggtaaatcgtagacatgtgacaaagttagtggcatataatggattctctcatagtaatatggcactattcacctaaaatttatctcttttttttcctctcaaatgaagttgagtttgaacttgtgatttcgtgtgaatgtatgtgatgcctactgctaactccaatattttttttgatgaatttagagaacttttaggtatggttttcacttatgattttcactggatattttctcattatctacccaccagatctgtctctgatgtcatgtttaatatttatcaatttatgatggacaaaacaaatagtatggctgcatcgtatcgtaaaaagtttgtgtacgatcttattttgttcatgacctgaagtcgtcgtcatctctctctcaatatttaaaagtcatttctttggtatttgcccaatataagaagcgccccactgatagcaatttggatgacgaaatcaacgatattaatagtagtttggatcttgacatgatagcttgtggtttgatcaaacgactcttcgtttcagtttgcccattctatctttttatcttgcactaagtctcttctaaagcgcacacagtcatcagcacttaccaatttcgctttccgatttgatgtgtcattagctgatctttctctggtggcgagacattttacctggttttgacctgaccagctgatctcattctgcaggggaaaccatgcacttggtcatactagttctactgcccaaataatgcaaaactgcaagaattacccctcttggctactggctttgtttgacacaatggcacttacactctttcaggatttgatagtacataaccacaaatagtagacgcacatatgcatgtagctggcaatggcatcttcttgacctgccgctccaattgtaattccagtacagtctatagggaagttgaagtatcatattctatagactgtcttaatttaagactaattgcacaaattttgtacgacctagtggcctaagacttcacatcttgcctggtttttttttttttgtgcatctttcagcttctagaaccggctggcctgcgagcacaccagtagtgacttcacatctttaatctgctagtgctagttgtctgaaggtaagggttcatgctcaaccgctcaaactangacctgccatgcaagtgtcgtatttttcttctcacattcttgtaacataacatcagtgcttggacagcatcgaccaactggtctttcttctcccttgcccggtcttggatccatggatcgttttcctgcagctttctgatcgatgcaattaagcttgctttgccttcagctatcgtcagtgcttgactgaccatgcgagtataacgtagctgcctcttcctggtcaatatcgttacctgccatggacaaaatgtaaaatactccagaaaatccattatatatctatatgatacccacaaaaccttatttttgtggtgtactcctaatcttattgtatactccctccgtactcataaaggaagtcgtttaggacagcgacacggtttccaaaacacaactttgacttcttgtttctataaaaatatttattgaaaaatgatatatgtatatttttatgaaagtattttttaaaacaaatctattcatataatttttatattttcaaactcaacaacttgagagttattcatgatttatattctcaaggtttgacttaaacattgttctaaacgacttcctttatgagtacggagggaatatgtacaggatttgagctcttcttttcgcgaaaagagagaatttgagctcttttacagtgctccttggcattggcgttgcaagccatgggacctcactgggctgcaatgctgaagcttcttccctatctgaatagattgacctcagttgtagtgggcaatggtatcagagccagctttcggaaagatcgatggcttatacaaatgccactgcaagagaaattcccagctctattcaccccttccaggcaacaacaagcaacagtggcagtacatgcaaagaatattgttccgtctccaatttgcgcaaaatatgcagcttagcagatgaaacaacaagctacctctttcttcactgtccttttgcctctggtctatgggcttcactccacatcgatccaggtattgacgatgtaaaacaactccatgcattacaaccaccatcagtcatcccgacagcgcacttccgccccttctttctgctctgcctttggggactctggaaccaccgcgccatgatgccatcttcagaaaccaggagccttgtcatcgtcgcctcctccaacgatgtatcgaagacgcaactctctgggcacaccggttaaagagccaggatagaatcgttgtttccacctggaagcaagtactctcccaccccctaaattctgatcaaatggtgcaattggatctcaaatttattaggaagttcttcctctagaatcctcctaaatggatgccccggtaacccaattttacataagagaggtctaagacaaggagacccactttctcctatgctatttattctagctatggaaccactgcatctgatcttcaaagcagccgaggaagccttaattctcaagaaaatagatccgagacgacaaagatttcgttgttccttctacgcggacgacgtggctctcttcatccctccagaggcacaggaactaacaactgtaaagaacattctccacacttttgcaaggatcagcggcctccacacaaatccttccaaaacagaggttttcccgatagcttgtgataatctgaatgttgaaagccttctaaattcattcatggggaatttaaaaaccttcccatgcaattatctcggcataccccttcatacgagaaaactgaggaaaatagatctacagcctctagtagataaggtgggtgcaagaataccaggttggaagggaagattctttacttcagcaggaagggaagtgttagtgaaaacaacacttacggcaacaccaatttaccacctcacggtactgccacaaatgaaatgggttttcaagaaaattgatcgtttcagacgtgcctttctttggaagggagaggaccctgaaaatgtgaatgccggtagcagtttaattaattggcaagaggtatgtaaaccaaagaatttgggaggacttggtattttaaacttagaaaaatttgcaagagcattgcgcctccgttggctttggtataattggaaagatgatacaaaaccgagggtgaatatgtcagttccatgtgatgaaactgatagatgcctattcagagctgggacaaaaattgagatcggggatggaagaaaaacctctttctggttagacaattggttggatggccaaacacccaaggatctagctccgacaatttttaggcttgcaaagagaaaaagtaatagtctacatgctgatctgaacaacaatcattggctatctctgttaaatccaatcacttccttggaggaggtaaacgaccttgtccagctggggggaagacttcagaacatatccctacaagatggactggcggatgaaataatttggagatggactgaaaatggggtttactcagaaaagagtgcctatcttgcccagttccagggatcacacacaaacgttttttacgagcctctttggaccacatctgcagaaccaaagcatcgattttttggctggttagtcttacaccaacgaactcttaccgcggaaaatctgctgcgctgacactggccatgctgactggaatttagtagttctatgctaggtggggacctttcgaggtatgctcactacatgctagtctaaaatgagtgtcctcctttacgcacacttggttttgtgataccatgttcagttagtatggtcttgatctattcatagcactcacatctaactatacatttattctttcattgtaatgactggttggatgcactcctttgcaggtatcatagccttaaatcaagaaggaagcacattctgagtgtccttttaacaacatggtggaatatttggctagaacgtaataggaggattttccaaaattcttcaaaaagcgagctgcaggtggccttcctagttaaagagaatatagacctcatcaaccaatccaggctctattgctgctgatagaacctggtcctcaggcgttctttccttgggttgtaaatttaatcgcaggagctgtactgccctgttgttgttttcgtttatgcaccctctgtaagactctcttgatttatttcttctaatatatacggcaaatctcctgccgtttaatgtttcaaaaaaaaaattctgatcaaatgtaatagcaggccgctggcccttcttttgtttctgtttgtgtttgtatgaacatctctgctttaatttcaatggaaattcaggtggggaagctctcccctccggtgattattaaaaaaaaaaagagtattcagatcatcagatgtatatcaaaattttagagaaaaaggtatatacaatatgtaatacgcatgtgcatgaaaaaaaagggaaaaataaggctgtattcagaccaaaataaatataaaccaatctttcttagtttcttacactcttctgatcttctccaatggtctaattcgcacaagtttactcggcgccggcgtagacaa

SEQ ID NO: 9753 - DNA, 3884 bp, Oryza sativa
catctatagctgctgccttgtcaagggatacaaaactttttgagcgaactgctccttcaacatactgtgtcaagtccccttatagaaaagatccagctgattctgaggttgtgctgtcatcagcacgtgaaaaaattagggcttttcagaatgtgatttctgactctgaagctgaaaaggaggctaatgatgccgagagggatgaggattctgaatgtgatgatgctgatgatgatcctgatggtgatgatgtgaatattgatgtaggagatggcaaggatccccttattggtgttaaagaacaggatggagtaccgattacaactatagtagatagcacaaagagggaaaaagaaaaagtggatgcattaacccaatcgagtgatcttactacatctggaaaagaggctcccaagccttctttaggcaagcccagttcagcaaatacttctagtgattcacctgtcagagcctcatcagagtaccatgaagtacctcctactgatgctgaagataaggagattgatgaaagtaaccaaggtgaatcttgggtccacggattagcagaaggtgactattgtgatcttagtgtcgaagaacgcctcaatgccctggttgcacttgttagtgttgccaatgaaggaaactttattcgtgctgtgctggaggtaataatcttacttaaaatatccttcaatctttgctatttttctcattggataacacctgatcacttgtctttcaggaacgtctggaatcagcaaatgccttaaaaaaacaaatgctggcagaggcacaacttgataagaggcgttccaaggaagagtttgctggcagagtgcaatataattccaacatgaatttgaaggctgatgtaaatcaagaaaatgctactgagagtactccaactccatttcataatgttgataaacataatgatggaaatacaggggttgtggataataataataatgagataattgaccataacagtaatgcagctaatgcatcttatgagaggaatggtttagggcaggacatagctgcaacaccagatactttgtcagttcagcagtatgcttatgctgataaaacacggtctcagttgagagcatacattggtcatagagcagagcagctctttgtttatagatcgctgcccctaggacaggatcggagacgaaaccgatattggcagttttcaacttctgcatcaccaaatgaccctggttcaggacgaattttttttgagtgcagagatggatactggagggttcttgacacagaggaggtagccttttcttttaaatatctactgattcaacttgattactattattgctctcgagtaaaaataatgtcacattttcgactatgtgacgtcaaccttagtgaatcatgaatatttatttgtattagacatactgaaatggtacatgtagatttatcggcttatcgctaaaaatgcctccatgaaactatagtttccccgtgtcttacaaatatattacaagagaaataagttgtcatttacattttggatgtccttgaaactgcaagttagattgatatgctaatttgtatttctatctttttctatacgctataattgttcgaatgcaatgtgttaatccacgtatgaggattgtaccatattcacattgcttgataaacatatgaatttttgaaccaattacatgtccgcatgctccatgcacttatgaggattgtaccagattcatgtttcttgataaacatatgaatttgtgaatcaattacatgtccacatgctccatactggtatctaatatcataatgccctctggtcttaaactacacatagtgcaacagcaactgcttgttgaaatataaaccttatgccagtttttgccaccaaatggtgaattcccttgtacttgggcttcacactgagctatttatagttttgagtttaagacatgcataatattgttacggagattatctgcatttttttttaccacaagtgcctgctcttcatgcttttgcattacagtggatgtgtagttcatgataacctcattaagtagaaatgtgattgatctattgtcaatgtttttttttgcataatgagcagcattttgtgccagaactgtacataaatcgcatgctctctaaactttggacattgtatctaatgaaaatgcaggcatttgattcattagtagcttcccttgatacacgtggcagcagggaagcacaattgcattcaatgctacaaaggatcgaaccaacctttaaggaggctattaagaggaaaaagagtgcagttgtagaacaatccgctggaaggtatctaaagaatggagctacggaaatgattagggcaagttatcgtagtgattttggaagcccaagcagtaatctttctggtgtcacttctgatagtgctatagcatattcagattctttcaaaatagagcttgggcgtaatgatgttgagaagactgctatttcaaaaagggcagatgtctttataagatggatgtggagggaatgcaatgattgcaaattgacatgtgccatggagtatggcaagaaaagatgctctgagttgatgcattcttgtaattactgctatcagatttacttggctgaagaaaggcactgctcttcttgccacaagaattttaaatctattcacaatttttctgaccacgcatcacaatgcaaggataagctaagaactgatcataactggaagatgcaaactgcagatcattctgttcctataggagtgagattgctcaaattgcagttatcaaccattgaggtcaagtaacatgttttatgtttgtcacctgcttctaagttgttttttttcttttaccagttgaactgtttggaaacgtgttaatatttttgtttacaggcttctattccaccagaagcaattcaaccattttggactgatggttatcgaaaatcttggggtgtgaagttgcactctacaacttcgttggaggaaatatttcaggttctggatttgctctcctttagttaaaccagtttcctttttgactggcatacatctattacctttggttgcaaacttgaacatttgctggctataaatagctggattacatggttgacttgaggccttaaacaacctcaaacaagaatcaattgagaacaacctcattctttgttaatacatgttgaattgctaaaatagcttgtctcaccttagttatcattttatgatgcgggattttccatcaaattgaccaggcacatggttgattaaaccatgtaattttcatccttactgcagatttgaattaatatattgaactaccagtcccaaggatgaaagacgccaaccattttctttaagaatttacaatttattgatggctttcttgtatcttctttctgtttccttcttctgaaaactaatactacgggggtatatttataggcaaaattggttctgtagcatcgaaagttcccatttttacttttatagcatcgaaagttcacagcttactagaatagcatcgaaagttagctctgtttctcatatttagcattccgtcaacaactctgttagaatctcatcggtttcctttttttttaaaaaaaaacatgtgaaataccagccgtgccctctccttcttccacctccagcccccctctcctttctcttcttcctcctccaatgaacgccaaccggatgccatcctcgaggctcgagcttgtggctgtcagcacgctgacgagctcgaccatctgcacgtctgcacattctcaagctcgaatgaatggtggtactgcagttggttcggctgggcacatgccgatgccacagatggaagtacacggtccatgaggacctgttg

SEQ ID NO: 9754 - DNA, 10756 bp, Oryza sativa
gcaggttcgtgagggttcacggccttgtttaataatactgtgtagctctaggatcgtctttataaaatggctttgggcaactaagtgacttttaaaggctgttactgcaaaacttaacccctatattattatccccttgtactcccttgcattaattatgcatctccggtgtggcttgctgagtactgtggttgtactcattcttgctctatctttctccccccttcagtaagagaagctttggagaagaagtcttaggtggagtcctggcttataccccagttgagcgcctgtgaagatggagccgtaggcccgctagtccgctgctgtttatttttgattgtcaggccttaagtgcctttgtaataatgtaaatattatcgatataataaagatgtgtcttttatatcatgtttgtgtggtgtaccccggcttttcctgggacggggattaatacactagcgttcgggaaaaggcaattttccctgtcgcgacacctagctccgcctcccagctcccgtattgaaggcggagggtgtcctgcgcctcgttcatcacggtggtggcaatgagggcagccccccgctcctcctccacttccttggcgatttccgccaacaccttctttcgggcttcaagctccgaaacgtgccggcggtgtgccttgcggcccacctccaccatggcctccactgagcgccgcccctcctcgacacgcgcccacgcggcgtcgagctccgcccgctctgcttgcagggcctccacctgggcattaaacccgtccaacaccgcggtgtttgcggcggccaaggccagcagaaggggctctgcgctcagcggggcgatagaaggcgcggggaagagccgccttggagaggatgccgcgcggctcgggccgccgatggaagtgccggactcggggatgtcccctggacctagttggtcctgggtgtcgcccgagggagtgggcccaggcgacgcgcctgcagcctcgtcgccagctgccccggaagttgtcgcctgagcgtcgcctgagggagtgggcccaagcgatgcgcccgcgacctcgtcgcgagctgcctcggaagtcgccattgcctcgtcctggcgaaatccggctttctcccgagcggcttcctcggcctggtgggctcgggcggcctcctcccgagcggcttcctcggcctggcgggcccgggcggcctcctcccgagcggtttcctcggcctggcgggcccgggcggcctcctcccgagcggtttcctcggcctgacgagcccgggcggcctcctgggcggcctcctcggcttcccgtaggcgatccgcggccactcgccggtcagattcccgcctccgggcctctgcggccgccggatcctcggcctcagattggccagacttggaatgacgggagggacgcgacgggatctcgctaaaacagaagaaaagaccagaagacgaacaaagatgggtgagtgaaaactcgcgttgaagagaatgaatacagccacgatgggtgagagacgaacctgcgagggggtcggttgaaagaccactttggaggggagatgaggtttccccgagatggttctgtctcccccatcttgcggagccgtttcttcttgtgctccccctcgggctgcgatgtcggcgcggccccctccgggcgcctgctgctggcacgtaccgccccgccccctcggggaggagattggggaggtgttcctccctgtttcctcttcccccgggcgtcggcagggcggctgctccccgggtctccgtcgcgagacccagaagcacgaccccctcccggggtagattgatcccccttgcggctcccgcctgcgccgtcgtggccctttggagctccctcctctgaggccccgaccgccgtcataatggtcaagatggaggcgcggtctggatcgctgcagagggggaggattccgtggggaatgagggacgcctccacggagttgagattcagcacccgttggaccactatcttgaagtcctcaggagcccagtcccatctgactccctggtggatcctcatgtagtcttcggacccggtgtactcccaggcgccccgagcgcgccgctggagcggcgcaatccgacgacggaggtagtcaccgtacaccatggcccctgtgagcccctgggatcgcaggcccgccaggcggtcgaggacggcgtcatagccatcccccagatctaccggcgcccgccagctggaggcctgcgccgggggctggctcggaagtcggaggcgcgcttcgtcggcgaggggggtgtagaaccagtcgctcttccagtcatcccacttcttgcggaggacgcaggggatgtagcggttcaacaccggcccccgcggcaggaagtagcagccaccgaccaccgacggcggcgacaccgactgcacggtgaagaaccaccggaacagccgaagagatgggcgcaccccaatgaacatctcgcacaggtgcgcgaagatggctaatgtcatcactgcgttgggggtaaggtgcgccatctggagatcgtagaactccaggacatccatgaagaaagaagaaaatggcggaaccagccctgccattgcaaaggggagaaagaagacggaccgccccgggtagtctggcgccgggcgtccctcgcccagcatgactatctcccggccggtggcagattccggcatgaagcggcgcggcagcccagcctgcctctcgctcacgatgcgggaaggcggcaacacgctaccatcgagcagagcggagccccgtgccatggcgccggacgaagagaagatggagagcgagcgcgtgtggcgaaagaagggcgcaggaaagaaggagttagggcgcaagcggcgaagacaaggggaatgatggcgaaaggaaggaaacaaatcctctcctcagtgcctttatactcttgccaatgctgtgcccggctcctcgtttctcgcacccaccgtttcgccccctcgtttctcgcgcccacacctccactaatcccattcgcccgcttgcggcgcgtgaggtggatatgcggttgtggcagtcgagatagatcatttcgtgcgcgcgttgattacgctcgccgaccgaagcgccatcacatatctcctggcaaagcgaatcggctcgtccagattcgtgtactactcgagtaatgtggcagtctggaagagaccgctcattactgacagccgagttaccattgccgatgtgcgtagtttgtgaccgttgggtttctgcctaattgtagagaccggtcccacttgtcaccaggctttaggggtggcgtcacgcccgaccgcttcccttgaaaagggcgatcgccctggcataacgccgggggctactgtcggtgacatgggaccgggagtatcatgactagaggcttgaggcagacacaatcgcccacgtggcctggcaccctcgggggacgtcgggcccgagggtgatgtgtgcgcccacctcttggtctccccgaggggggtcggaccactcctgcctcgcccccgagggccgaggcgccccgacccctcgcgggttctactccgcgtgtatgggttaggtgagcacagcggggctcacctaaccgcatttattgcggctcggctaaacgtgtcacgccgcacgaaatgcagtgcagtgcactcgtttatccggtctgtgaccagtcacagaccggtcagatcgcgggttaggtggcaacaggcggtctgacgcacgcttcgccccatcccgtcaagacgagagcttctaggcactcgtccccagctggagctagcgtgttacctcccagagatggcacgttagccccggtcggatatatgccaggcttcatcctaaccattacaagcaagatgttgtgtgaagaagggcaaacatgcacgttgctaagctgacgcgtggtggacaagaatgaccgatttgtgaccggtctgacactgatcatgccgtcagcagacagccacgttcccacgacgcgcctgcctccggcagaagtggaggtaggtatgtgccgtcccgtcagaaggatgttcggagggcaaccgtgcaaatctccgtccatttatgaagagaagaaaagtccagtttggaaaggggggggtgcatgtggtatccccttgaaatataaaaggaggaccttgcccattgagaagaggggatttttctccagattcggaacctagaacaagggagaggttggctcacactttgtagctccttcatacacagatccaccaaaacacaggagtagggtattacgcttctcagcggcccgaacctgtatacatcgcctgtgcctcatgctctttcgataggtcgcgatctttccacatacagagagagcttgggatttcaccctgagcccccggccgaaccggcaaagggggggcctgtgcggtctcccggtgaggagccccacgctccgtcaaatatttttatataaatatacactatactattagtacttggcgcatctctcatacacatataatatcttatagctcgtgttaaagttggctacaaatatataacccgtttttttctccctcctctcctctacgtatgtctgtagctagctagcttagctaccttataacttgctattgtacctgctctaactatatatatagtcccaacccaccacataagagcaagtttaatagtatagttaaccactagcttcaaattatctataatcaatttaatagccaattcatacaatagttatatactctattaatacctgatcccacttatcatacacacactgcgtcttggagtccgtgctacagttggctacaaatttgtagcccgctgctcttctctttttttttatcttcttaaaatatatttatagctagcttatagcttactattgtatttgctctaagctggtgtctatggaatttattaggatgccacctaataaaaatttgatgtgacatggtaattaaagaaggaagagaaggaaaaagagaaaatgatgtggcaagcaccaaaccggatcgccgtgtgcatcaaggccctggaaagtagcaaaatcagcgttggggttgattaattgtttcttccccgacacatctatctatctattatattattaagacagctcgaaaaaaagacaccacgttcactgtggaggctagaaattcccatattaatggaagaaaaagaaaaaaagagttcaagtagaaatacaatctaaaaaataactgaaattcggaattaaaaataagtaatatttaaagaggagtccatataagaacctaatacgtgattaattaaaattcagaataataaataaataaatttctgaaattaaaaaaaagaaaaaaaagagagttcaagtagaaatacaaatttgaaattattaaaagaataatggtctagatttactgtataaaagataatcatatcaatctaattatagatcatacaatccgtactaggagtccttgtccatttagaaaaatcaattgcaaaactatacagtatatagagttatgattctaaaccaacatacattgccgcacatatatatatatagggtggagataccagaccagcacgttaggctgcagcagcagaaaaataatatagtgccctcatttcatacaagtctacgaacccaatacgagattaattaaaatttgaaatgaaaaacaaaataaaatccgaaattagaaataagaaaataaaagaagagttcaacttggaatgcgatttaaaaataactgaaattcgtaataaaaaataaagactatttaaagaatacaccatctagaacacataacgaaattaattaaaattccgaataattaataaaataaattctgaaaatagaataaaacaactaggaatataatttataaataaaatctatcggaacgaaaaatatggaaatttcaaaaaaaaaacatctagaacacaacgatgataaatgacaataaatatcggagaagcaacgaggcagggagtagagtggtgacagctgatgggatatctaaaaaactattaacaaaaccccaaatagaatctcaatgacaattaaaaagagtgatgacggacaggccgttaagcagcacggtcacgacggttagcgggatttctaaaaaagtaaaaaaataaacctcaatgataatcatgttcgattttaaaatttcaaatataataaagagtgggaggaagcgggcgagccatagagtagtacagtggcaaagccactaacggtttggtgggactctagaaagtaaaaaattaaactcaaacgatgattatatttgatttttaaaatcccaatgacaataaagagaggaagcaactgtagcacccgtattttatttgcttttattttaaaaaaaaagcttgtcatttaaaaattggagttaatttggttcttagatgattttgtgccaaatggatctcaaatcctctcttagaattgcctttcaaattcctgtgaaactctaggtcaaattcaaattcaaatcccttcaaattctcctcaaaattcaactctataaatccctgggaaaatgtgaaatatcactgttcatattgggcctccttcccttccctctctctcggcccaactctcctccacctctcctctcttctttcccctgagcaggccggcccagcgcagcccatttctgctcatcgtccccttccttgagccagccagtgcatgcacacaaggtgttcgacgaaataccgacccgagtcgctgcaccgttccgccctcgttcccgtaccgcgttgcaccataccaccctcccgtgcgccccacaacgtgccagggccacgtagcgccgccccgcacgccgcgccaaagccgcatcgcgccaaactccacgaaaaccgccgcgccctctccgggagacacggagccacgtcgccccgcgtcacccccgtctcgtcgccgttccatcccgagctctcgcggacgcgcgtcccttcgctgtcgcccgtcgtcttgtcgtctgtctcctcccgggaagccgccgagctcgcgcctccctctcactcgcgttccatcgccaccaccgtgtgacgtcgctcgcgtcgcatcgatctgagaaccctaccacccaaatcccggccgtagccgccgtcggccgcgcgtcatcgatgtcccgtcgcctttcccgctctccgcgcgtcacttcgtgtcgcgtcgccgtcgttttcaccgtcgagtcaccaccggtgcatgacgccaagccatcgcgtcgccatctcgtccaccccggaatcccgccctagccgctagccagctacccccggagctccgcgtctagaccgccagctcgccaccgcgccgcttgcctataaaaggggaagcagcccgagctccttctccccacaccatcaccatctctccccatctctctctcctctctctttctctcgttttgctctctgttgctgccagccagagccgccgcgctattctcccggcgccgccgtcgccggtggagcctcgccggagttctccgccgccctccctcagccgccggtcgcctcgccgcgccccatcgccgagacgcatcgctatcccagaccgagccgagcaaaagagcgagaggaggaagaagcaggcctcctcaagcctctgccaagccggccccaccttcctttattccttcctgccactgacgagcagggcccgtgtgccttttcctctctagcagccaccgacaggtgggcccctcccttttcctttttttaagtcaatttccaacattccagaaaatcctttattctttgaaaattcatagtaaatcaaccgtaactccgattgaccccgttcaagttcctaaattttttataaaattgagatctacacagtggcaccattgtttctctgatttgagctagttttattgccttttcttagttagttttatttttcgcgtttagagcccgagttcgaggaagctccggacgccgctttcgaaggagaagaccccaacgctgtgcaaggcaagcccctttgatcacattgcccctatattttcaatgatatgttgtttgcaaagatgcattgttagttcacacgattaacatgtttaggcctcggattgtttatacaaccgacggaccaacccagtagtcgcacttatattacataggttgatgtttccataccattgatagctccacaaatatttgcgccggtatcattattcgattaccgaggtagtttcgcttagccatgcttacgttgttgccgtgtgggaaacttgggttattccaaatccatgtttaaaaaaaatccggtatgttgtaccgaggaattgtgaaataaaatgtgttgtgaaagtggtgatgatgcggagtcatgcctttgtggtttggctacgtattgtcgttaaggaccgattcctttgggaaatccatccaaacacgttacagtgcgaccacacgggtatttatgggatgcctctggctaagtaaattgttttcacatgggagttggtgtgccgatggttgtggaatgccgaggatgaggagacgaagtgttacacatttttgcccatcatgggtgtcttttgcctctattgtggcgtggtaccggtaggagtaggaggcatcctcggtatttcctgagtggatgacggctgtcattgcctgatacttggctatggatcttagcccaactaggtggcatgcggttttcatgggttagctttggaaaggccttatcacgaactttcattgccgacgggtaaacgatgtcagtttcgtgtcgtgtgggtaaagcgtgcaacctctgcagagattaatgaactgttcgaacagccgtgcccacggtcaagggcgagtgtaaggtgtttctcatagcgtagatttgtttgacaaatgtttgtgaagaagtggttacagggaagggtaacgttaccagagtccgcctgtgtggcagacggctaacctgggtggttaggaacgggtctgtgtgacctggggtgtcgtctgacaccgaggtgttgttagggccatgaagatggcgttgttgtgctgagataactgtgtggactatgtgttgttgtgagaagaaactaatagaggaacaaattaatttgctgttcgttaatcgtgacaagttgttgcaaagcaacttgtggaatgggtcgaggcgtgagcctcctcccgacaactaaaacttgactcactcactaggagttttgtgaaataaatcactttgccaaaaaggcagctttcgcaaataaaaccttagcctccttgtttaaaccaaacatgtcattctttcccctggcttgctgagtacgttaagtactcacccttgccccttataatattatatagagtatggagatgaagacatcgacccgaccgccgaggagtatctccaggagcaagccgagtatgaagacttctagatgtttcgtgcctagccccaagcctcgcctgtggaataagatagatgcctaggttattcgcctagtgcatagttgcttagtcgcttagtgctccgcgctgttcgcttctgcgccgttgcttttatggttttctgtaatgttgtgttgctcatctatgggcctgtccatgatagcaacttatgtaaggactactacccagtgatgtaataaagcagtttactttgattccacatttattctgtgtgtaccagctagttgtaacatcctgaaaattcccaacaataaaaatcactaaaatttcgaactttttaaaactttttgcatcatgctggatgttatggttgcttttacttgccaaactataaattgtcacaatggaaaattaaactaaagttatacagctaagtaataattataataataagatatttattatgaaccccataaatatttacgcacgagaaaacgaagccagacaaagggaaggttaattaccaatttaatttatggatcaaatattaaatacttgaaccatgtgatgcgtgccatgaaatataaacacttaggaaatgataatcattcaaataaatggaactctatctatagaatagttttactgggaaaaattaattagatattatataatttgaattgaatcacaaatgctaaattatagaaatccatgtggtggtaaaaccaatccaaaaagataaaccaatatatgtgaaaacatataaataccaaaatcccaaacataggaaattataaaaatctaggatatatattaaatattggacaatattaaattttggggaaattcacatttgagcacttaatatggtcactcaactgcttagtagtaaaatacaaatttaatttgcaacttttctcaatttataaataaaccaaaaccttaaaaataggaatacttagaaaaatatataataaaaataaaaatatgttcaatattaaatttgaatacaaatttcgatggattaatttaggcttggtgtattgtgacaaaattaggggcaatagtatatttttcctaattgcaaaataccctataaaatcaaaaatagttggctagcattgttcattagccctctaggtgtttgatttggttccctaaccaccacccctcctctgccgcgctccccctcaattctcgcgccgcccctacgtgcgccgcgacgctgccgccctctgctgcgccgctgccttgcgccccgcgccgccgcgcgccgtcttgtcaccgccgtcgccgtcgcgccatcgccgtcgcgtcttgtcgccgccgccgcaccgcgcgtccccattgccgctgcc

SEQ ID NO: 9755 - DNA, 14575 bp, Oryza sativa
ggtacataaatgatggaactctgtcattaaagttaggatttcatatccattagcttataaatcatataagaaaaaaactaacttaaaagtctatgaaaataaactcaatcaatagccatgtgagaggagagaggaaagataaattatttttatttttttcataaaggtatatcttatgcataacataaaggcaaattttgctacaggacacccaaaatttgtgtaatttgctgatagacatcgaaaaaacatgtcatggctgaaagacattctaaaaaaactggtaatttgctgtaggacacttttggctcaattgaagggatggattccaaaaaaaagacgagaatgcccctctggccacatgcttcaaacatggtgttagagtaaaaattaagaatttttccaactctaaattttccatagcccaaagtatatcactagcatacaccatatttcattttcactctagtatcggctcaaaaagcttttgaccctagggtcattcttgtctttttgaaaaatttctctctctgattgagccggaagtgtcctctagcaaattaccatttttttagagtgtctttctgatgaaccctgagttcctctcgacactcaaggcagttgtttggcccgatctttcggtgagttgatgataactacgatttgtggaaaagacgttgacgacccgattacaaccgtacaagacgttgcgttgcgccttagcgatcgatacacctctccgtgggttgttgatcttgccggtgcagatcaaccttattcctgcaagcaatcgagaacaagcaagaacaagatataaagcaactgaattgctagatagacaagacttacaaagataaattgatacacgataaagtggggttccgaacaagcagacggacggtctagccgacacgcgcgctgcaagcgaagtagcaatggctaaacttacaattaatcaaaacccgagaaaccctgaaggggtaactagctatatataggggtgggagcacgacctaggggtgcctaggtcatgctccaccagcttggggcgcaccccacatgggccccacctgggccggggtcccaaatgaagttacaagcccataggcccattataggtgacgcagcaccttgttcctgtgattccggccacacgagatggaattcagagaagaggctggatccgttggaaagagggctccgagagctttccatcaagtactcacaggccgaaaacggaggtcgtatgcagattcggtggccgtttgaagtcagcagtgtagtaggtggccgaatcggattctagcacttggaggacttgatcttgatatcttcttgttcatccatgatgtgagcaatggttgcatccgtggtagccatggtcacatcatctctttcagccataacacgttttcaagatgtctatcagcaaattacacaaattttcggtgtcctgtagcaaattttgcctaacataaaaagtgttatattgatcactttcacaatgttaaggcatgctatatagaccaataataaccaatttttctatatatttaatcgtggtgtattacgtgtttacttctaccttaaaatatgcctaaatattttttatttaccttataacaaagggactaccacaacgatattacgttttccaagttgaaatacgcttatatatttttgtcaaaaaaataaatacatctatatttcattttgatttgtatttaacttctgactactctctctgtcaaaaataaaagattttggttggataagacattgctaatattatgggcatattcagattgtagccaaaattttggcaggatttcttatgtattgatcaaatttggtaacaaactaaagacattcttttgacaattttacttagaaaaataatatggttgaaaatgacatcaaagtgaacatgccctacgaatcatatagcgaggaacggaagactacgacctgttgtgtcagttctcagttgtgatcaccacatgaacaggcccacgtgaatggcccatagaacggcggtccacttctactccggcgagccacctccctcgaactactagtcctttcgccttcctcgtcgtgtccactccccacgcacgcacgcggcggcggcgagccgccaccccccctcccgtcggctttccgatctccgggaacgtcgcgacggcggcgccaatgcgtatgctatgccgcgcgcgctggttctctccctccccccctctgccgccgcaggcgtcatcattgccctcatgtcaggtgccggcagtggggactggggaggctgttgcccttgcaggggcgagaaacgaggtaaagctgttcatcttccctgctggttaagtcgcatccatgtcgtgttcaccacttggcatcgcgctctccttcaagcttccagtgtgccttgagcgacgcagaagccatgggctcaagcagaattgttcggtgcaatgcaacttatccggtggccatcacgcctagaagagatctgcccttcgcaatccattacaaggtgcgtatttctgaggtgagggcatggtttccttgtaaactatgcacgctgcagataattttattttgctctgcatatattgaattaatatggagtagtttctggttatttgggtggggttatggattcgatgcttgtgaaaatgacggttaaagtttgtaggcttgtagagataattgagagaaaacgaacaaaccaatcaattctggaatagccctgcatactattcattcactcatttcatctacagaacaaaacttgttacattatgcaatataatcattccaatgtcataaacaataagcccttgtcaccatatctagctatgcctataattacatcatctaggatatcctattacgtacacatctcaaaatttatgcagtagctgcaggctaatatgaataggcaggatggtagtcgtcttcgtcatcacataacatgagagccttcagaatttcatccattgttggcctcttgcttctttcttccaggcatgaaagagctaccttcaccattgtaattacttgctctggatcaaagtgtccatgcagtctgtcatccactaaatcggtgacattccctgtagcctgaatctttttggcctcctggacaaactctggaaactccacttgcctttcatctaccactatgccgcttgaaaccctgattcctgtcacaatctcaaggagcactactccatagctgtagacatcaacctttgcattgatcggcaaattcaacgcccattctggtgccatgtagcccattgtgcccctcatatgggtgaaattgaaactagtgctgtctcgctttgcaagtttggctagtccaaagtctgctatcttggcatcgaaatctctacttagaagtatgttttctggtttcacatcacaatgcacgacccactcaaggcattcgtgatgaagataagcaagacccctggctgtgcccagggcaatcctgtacctttggctccaacttagcaggctttcgtggcatctctcaccaaagaggtacttgtccaatgactcgttctccacatactcatataccaatagtctgtttgtcccttctgagcaaaacccccacatccttaccaaatttatgtgattgatcctcccaattagagtcacttctgcccagaattcctcctctccttgccgaacgtctgtaagcttctttactgccactattttcttatcttcaagtactcctctataaacaattccagccccacccctcccaagctcttctttgaattttccagtcgcttccttcaattctcggtatgtaaatcgcctgaactggtttgttatcatcttgtatccatcctccatggacttgggtatgttatgcttcttgaaaaaaaggtaccagcctgtcactattacaagcgactctagacctcccaatattgcagcaaaaacatagaagtatgcccactttatattgtccttctttgttccatacatacttgctgagcctagcatgatctcaggagcactgaggttgcaagtgagtctttgttgtttggagattgagggtgttgatttgcttgaattcttaggtactttcatgtagttgtctccggggaaatatgggtacacctgaccattgtagagtaagcctttagtgtaacataaaccatccccacccttgtatgtgaatgataagcaggagctgctgttcaagcaaatattctgacatgcttcaaatgagatggatttatttgatcccagatcgaagccatagaagtctgcatgaggctgtttgacgaacataaagtcctcatgtggtcttttgctatcgattgtaaacgttggttcacatcctttgttccaatctgttggatcaaccatcacatattctggaggacatctacatcttagacctcccgagtagtcacatatcccattcttgccgcatagcccatgaacataacacatctgtatcacggcctgccctgtgatagtccagttgcccgttgactcgttcaagctgtacattctaaaattgccatcataatcaattgtaatccttctcttgatcctaggacctgaatctgtagcctctatcttgaatccatcacttgacacaaaattaccctcatcatcaagaaatgctatcctggtgctgttaaatctagtacgcccatttttttcggcattataatctggacttggccagtagatgcttgtaatctctgggccgtcatataataggcgcaggacattatcgttatcaaagtagaggtgatgataacgagagactaaccttatgtttttggtcaggttctgccatggcagcaaggtatcggtcggtgagtcgaagctctgccacacagtactattgctggaatccttgattacaagattgccggtgtcaagaagggtaactgtagtatgcttgcctgaagatgtcttgctttcccacaccgtcgtgccgttggtatctgtgaggactaggttgccatcatggcccagcgacaccctggagccgtaaaggttcactggggagtatcccccattcgccggagagtagggattcgccgtccacacggcagttttctcggtggtgtgggtgtaccagatcgagaaggtgaaagcatttgtgccaagctgatggaagccgcaagagaaggtggtatcaggtgagaggaggaagatcttgtcatggtcctcagctctgatgtgtgagccggtcgtcatggttcgccatggggaagcacaagagcagaggtggaaggagagtgatgagaggatggttagatacagcagcgcagccattatctccttttccagggagctttggctatcgaagtagagagaagaagagagacagagagaggcaggtagctttaggttcagttttaacactatgcggcttacttaggtgacgatatgcattagcgcgcatgtggccgtaatacccatgtatgttgctgacttgaacaattgaatactggggttggtaaggcaaaaaaactgttgggcatctccacggtgtacacattgcattgtcctactatattgcttgatttagactgcaagacggaatattgtcaacttcatgggggcatccatgtttctttcaatgtgtgaaagaggagtaccgatgaaaccgtgattttgtatattatatatatcagtttttcctcccttctgccccaagctaagttcttttacataagcaactagtgtatgaaagttaaaagtatctttaaagaagaactttatttgggagtaaaaagaggacaatttttggatgaatagtaatagagaaaatctattatatgccattaactttgtcacacttctacaatttaccactgactttatcacgttctacaatataccatcaactttcacttaacttctacgatttactattgccgtccggttagtctcagtgagtactgtacaaatttattgaaatgatcaaaatatccctgggaacaaaaactttcaaattttggacaaaaattctgaaatatcaaatttcatgttttagaccaaattttagatggttacaatcttatgtttataatatgatattttgaaatttttatccaaaatttgaaagtttttgtcgtaggggtattttggtcatttggacaaaattgtacagtgttaacggaggctaaccggacagcgatggtaaatcgtagaagttaagcaaaagtcgatggtatattgtagaatgtgacaaattcaatggtaaatcgtagacatgtgacaaagttagtggcatataatggattctctcatagtaatatggcactattcacctaaaatttatctcttttttttcctctcaaatgaagttgagtttgaacttgtgatttcgtgtgaatgtatgtgatgcctactgctaactccaatattttttttgatgaatttagagaacttttaggtatggttttcacttatgattttcactggatattttctcattatctacccaccagatctgtctctgatgtcatgtttaatatttatcaatttatgatggacaaaacaaatagtatggctgcatcgtatcgtaaaaagtttgtgtacgatcttattttgttcatgacctgaagtcgtcgtcatctctctctcaatatttaaaagtcatttctttggtatttgcccaatataagaagcgccccactgatagcaatttggatgacgaaatcaacgatattaatagtagtttggatcttgacatgatagcttgtggtttgatcaaacgactcttcgtttcagtttgcccattctatctttttatcttgcactaagtctcttctaaagcgcacacagtcatcagcacttaccaatttcgctttccgatttgatgtgtcattagctgatctttctctggtggcgagacattttacctggttttgacctgaccagctgatctcattctgcaggggaaaccatgcacttggtcatactagttctactgcccaaataatgcaaaactgcaagaattacccctcttggctactggctttgtttgacacaatggcacttacactctttcaggatttgatagtacataaccacaaatagtagacgcacatatgcatgtagctggcaatggcatcttcttgacctgccgctccaattgtaattccagtacagtctatagggaagttgaagtatcatattctatagactgtcttaatttaagactaattgcacaaattttgtacgacctagtggcctaagacttcacatcttgcctggtttttttttttttgtgcatctttcagcttctagaaccggctggcctgcaggcacaccagtagtgacttcacatctttaatctgctagtgctagttgtctgagggtaaggtttcatgctcaaccgctcaaactaggacctgcaatgcaagtgtcgtatttttcttctcacattcttgtaacataacatcagtgcttggacagcatcgaccaactggtctttcttctcccttgcccggtcttggatccatggatcgttttcctgcagctttctgatcgatgcaattaagcttgctttgccttcagctatcgtcagtgcttgactgaccatgcgagtataacgtagctgcctcttcctggtcaatatcgttacctgccatggacaaaatgtaaaatactccaggaaaatccattatatatctatatgatacccacaaaaccttatttttgtggtgtactcctaatcttattgtatactccctccgtactcataaaggaagtcgtttaggacagcgacacggtttccaaaacacaactttgacttcttgtttctataaaaatatttattgaaaaatgatatatgtatatttttatgaaagtattttttaaaacaaatctattcatataatttttatattttcaaactcaacaacttgagagttattcatgatttatattctcaaggtttgacttaaacattgttctaaacgacttcctttatgagtacggagggaatatgtacaggatttgagctcttcttttcgcgaaaagagagaatttgagctcttttacagtgctccttggcattggcgttgcaagccatgggacctcactgggctgcaatgctgaagcttcttccctatctgaatagattgacctcagttgtagtgggcaatggtatcagagccagctttcggaaagatcgatggcttatacaaatgccactgcaagagaaattcccagctctattcaccccttccaggcaacaacaagcaacagtggcagtacatgcaaagaatattgttccgtctccaatttgcgcaaaatatgcagcttagcagatgaaacaacaagctacctctttcttcactgtccttttgcctctggtctatgggcttcactccacatcgatccaggtattgacgatgtaaaacaactccatgcattacaaccaccatcagtcatcccgacagcgcacttccgccccttctttctgctctgcctttggggactctggaaccaccgcgccatgatgccatcttcagaaaccaggagccttgtcatcgtcgcctcctccaacgatgtatcgaagacgcaactctctgggcacaccggttaaagagccaggatagaatcgttgtttccacctggaagcaagtactctcccaccccctaaattctgatcaaatggtgcaattggatctcaaatttattaggaagttcttcctctagaatcctcctaaatggatgccccggtaacccaattttacataagagaggtctaagacaaggagacccactttctcctatgctatttattctagctatggaaccactgcatctgatcttcaaagcagccgaggaagccttaattctcaagaaaatagatccgagacgacaaagatttcgttgttccttctacgcggacgacgtggctctcttcatccctccagaggcacaggaactaacaactgtaaagaacattctccacacttttgcaaggatcagcggcctccacacaaatccttccaaaacagaggttttcccgatagcttgtgataatctgaatgttgaaagccttctaaattcattcatggggaatttaaaaaccttcccatgcaattatctcggcataccccttcatacgagaaaactgaggaaaatagatctacagcctctagtagataaggtgggtgcaagaataccaggttggaagggaagattctttacttcagcaggaagggaagtgttagtgaaaacaacacttacggcaacaccaatttaccacctcacggtactgccacaaatgaaatgggttttcaagaaaattgatcgtttcagacgtgcctttctttggaagggagaggaccctgaaaatgtgaatgccggtagcagtttaattaattggcaagaggtatgtaaaccaaagaatttgggaggacttggtattttaaacttagaaaaatttgcaagagcattgcgcctccgttggctttggtataattggaaagatgatacaaaaccgagggtgaatatgtcagttccatgtgatgaaactgatagatgcctattcagagctgggacaaaaattgagatcggggatggaagaaaaacctctttctggttagacaattggttggatggccaaacacccaaggatctagctccgacaatttttaggcttgcaaagagaaaaagtaatagtctacatgctgatctgaacaacaatcattggctatctctgttaaatccaatcacttccttggaggaggtaaacgaccttgtccagctggggggaagacttcagaacatatccctacaagatggactggcggatgaaataatttggagatggactgaaaatggggtttactcagaaaagagtgcctatcttgcccagttccagggatcacacacaaacgttttttacgagcctctttggaccacatctgcagaaccaaagcatcgattttttggctggttagtcttacaccaacgaactcttaccgcggaaaatctgctgcgctgacactggccatgcgactggatttgtagtctatgtaggggggccttcgaggatgccacacatctagcaaaagagtgcccctttacgaacttggtttggaaccatgtcagtagttggcttgacattcaagcaccacaacaacatacagcaccttccattgaagactggtggagcaccctctgcaggatcaagcctaaatcaagaaggaagcacattctgagtgtccttttaacaacatggtggaatatttggctagaacgtaataggaggattttccaaaattcttcaaaaagcgagctgcaggtggccttcctagttaaagagaatatagacctcatcaaccaatccaggctctattgctgctgatagaacctggtcctcaggcgttctttccttgggttgtaaatttaatcgcaggagctgtactgccctgttgttgttttcgtttatgcaccctctgtaagactctcttgatttatttcttctaatatatacggcaaatctcctgccgtttaatgtttcaaaaaaaaaattctgatcaaatgtaatagcaggccgctggcccttcttttgtttctgtttgtgtttgtatgaacatctctgctttaatttcaatggaaattcaggtggggaagctctcccctccggtgattattaaaaaaaaaaagagtattcagatcatcagatgtatatcaaaattttagagaaaaaggtatatacaatatgtaatacgcatgtgcatgaaaaaaaagggaaaaataaggctgtattcagaccaaaataaatctgaacaactctttcgtaagttcttacctcttctgatcttctccaatggtctaattcgcacaagtttactcggcgccggcgtagacaaaataccatgttattattcccgaaaaaataccatgttattactgttttttttaagaacatgctattaaccatttaaccgaattaaaaaaccctaaaatacccaaacaagtcaatgatactacaccatcacgagtaaaagatctgcaaaaaaacgtagaaggggaaaaaagggagcgacgacacgagccaatcagccaaatgtcacgagtaatctattgaagatttctctggaatgggccttatatgggcctagattctccctctcaaccaaagtgtggcctcagcagcccacatttattttccgacaattatcgggctcggcctcttcgcgccggatcgtctcactctcaccccttccatagtggccagctcggcctcgatccacatcgtcgttgttgcacacagcttcgatccacaccgccgccatcgttcatggctttgatccacgccgccgcaaacatccatagcttcgaagccaatagttaaccctgattttgtctgaactctgatttttctctgaacaattgagcaagatctgtctcctttggtatataataaaattccagcacatacatcactaaaacttgaaacatggaaaggctcatcctggtacttctgaatgttatttcatacagatgaaagcttacaaatgttaaaagttcgttgagcaataggtagtcaaatttctgttctgtgttttgttcataccgtaacctgctcacctgctgctagcttcataatacccaaatgttcagaaatggaattggcgctcgtcgattcgttaaaaaaaaaaaggaaaaacagatgttcagaagggaaaagaaattcaggtgtaatagaagggttttttgggtgaccccaaaattacaagtggaaaatatttgtaggggtaaagattaaccaaacatccaagcgtgcccttagcaatcagaaccgcatcctgggtaggggtggataaaaagcttgggctcgtgagctcagctcgggcttggctcgagctcacttagctcggctcggcttgaatgccaaacgagccaagcccaagtctccctttcagctcgtttctaaaacaagccgagcccgagctggctcgcgagccgcttgatttggctcgtgagcctaggccatcatgtatttatatggatgattttatcttctagtggagttattatttgttaatatgtaatttatcatctatattttgatgaattgaatatataaagttattttaattttacatgttgatgatttgttattgcttttcttaatgattacaaattatgtatcttcaacggaaggctcgcaagccagctcgagctggctcgagctaagaaataagccgagccgagctcatattttaactcgttttactaaccgagccgagccaagcctaacttgttgcgagccgagctaagcttgtcttggctcgtttccacccctaatattgggtgacatagaatgatggtgcaccatagtttcttacctaggacctgtttagatttcaactttttttcttcaaacttccaacttttccgttacatcaaactttcctacacacacaaacttccaacttttctgttccaatttcttcaaacttctaattttggcgtgtaactaaacacagccctagcgtagaagctctatgaagctccagtattaaattctagcatcggtcagtttaggcatgcacaagcacaagtggtatatcgtcagtaacaagaagacaaaggagcacaatcaatcactgaccacggatgaacatattggaccaatagctagtagtaaaccaatcatcagcacttcaaatcaaatggaatgttctatactaagcagctggttccttccaggaacatgaaaaattgaaaactctaaacactagcgacacgctcacggcggctcacccgtgacagatcctgacctctctcgcggagcactcgccgcctcgtcggcccttggaccggcatgaggaatccgactcactgctgaactttgaacagctccagctggttcattgagctgaaaatgttttggatgtttgtttagagatcccctcggaagtgttacaacctgcaaagatttatcgacgtaaaatcagcaagcataaatcataagccagctttaggaagcgtgatcacaatttgccggctacaccaatcaatttgggaacctataataacgggcacaactttagtgttcagtctacttttaatagccaattaaaaagaaaagataaaccatgtcagttcggctagcatcgccgcaatgatattggtaccacgactccacgagacagtgacaacacaatgatcaatgacaatacaataccgaactgcccggtcagacatggctacatgacttgcgcgtcactgtcaccctaacgatcagggcatttatcatgcaaattaccaaacgaattgtccacctctacaactggcaatcaacaagtcagcatcccaaacaatggcatggaatgaacatagccaatctttgctccaagtagacaaattactcccatatatagttatatactctagagtccatatagctagcagcaccaaacagaatgttttttttgggatacgcgagggacgcatctttgtattaaggaataaagtatttacagagcgggccgaaaaatcaaaaacacgaaggggacaagatacaggaggggggaggaggaagaaaataaaagcctaatctcccaacgaatgtggcgaccttccacccgacataggggtcgccatggccggtatcgcggctctagccaaccgccaaaggtctgcttcgcccgtcatggccctagcaatttccgcccatgtcctactcttttggttgaagacccgattgtttctttctttccaaatcgtccacgccaaacagaatgttggtattgagaaataatgaggcagctctcaaaaatgtgaaagctgtcatgaagattgtatgaccaagacaagaaacatgtcaaatatttaagctgcacgattagagaatgatggtaaaaacaaaagttcagaccttctaaaattagagagctttaaaagcagtaatatattcaatcactttcatatacctgaaagccgccaggactgaatgcaatgcgacaatgtcctgaaggagcacttaactattcccggtttactggtttaggcatgtagaatttgcagcatggattcaaatttgactccacgaaagaacctttgcaacaagtggatatcaaataaggatgaggcagagcatcataaatggaagcaaacaccttcctccataccatgatctgatggcctgaacacaaagaaaacaaaatggcaagattactctgtctagtcattcttcccttgatcagtgtactgccattctcatatgcttcacccctgttgatgctaagcaccggctcatccttatttgttgaagagcataagcaaaccttccttacctcaccaaacgccgatttctcttgtggcttctatgaagttggagggaatgctttctccttctccatctggttcaccaacagcaagaataggaccgtcgtatggtctgcaaaccccaagtccccggtaaatggccatggctctaaggtgacactgaaccatgaaggtaacctggtcctcgctgatgtcaatggcaccgcaaattgggacagcaagacgagctctggcaagggcacaacggctgtccttcttgacactg

SEQ ID NO: 9756 - DNA, 14453 bp, Oryza sativa
caacagcttgtttatttcttcgaagcaaacagaatattccaaagtcagtgatggatggttatgaattgatgactgagcacttcaggaaattctcatacagagaattgaaggaggctacaggaaattttaaggaagagcttggaagaggtggttctggagttgtttatagaggcgtacttgacagaaagaaagttgtgacagtgaaaagattaacaaatgcaacagaagctgaagaggagtttcaatcagaaataagtgtgattggcaggataaatcatgttaatttggtaaggacttggggctattgctcagaaggcaaacataaactattggtttatgattatgtggagaatgagtcactggacaagcatctctttgagagcatagatgcaaaaaaattacttcgatggaaccagaggttcaccatcgcattgggaacagcaaggggcttggcatacctccaccatgagtgccttgagtgggttgttcattgtgatgtgaagccagaaaacatactcttgacccaggactttgaagttaaaatagcagactttggcctagcgaagctatccaaaagggattgctcttgtttgcaattatcccatatgagaggaacagtaggatacatggctcctgaatgggcgttgaatttgcccattaacgcaaaggttgatgtttttagctatggaattgtgcttcttgaaattgtgatgggagctaggatttctagtcagacaacaacagaaggggagaaactggatttgacacaaattgtggaagcactaaagcaagttgtagcttgtggagatgttacacacatagtggatgctaagctgcatggacaatttaaccatctccaggccatggaaatggtgaagatttccttatcatgcataggagaaaggacaaagaggccaacaatggatgaaattaccaaagctctgatggcatgtggtgatgaagacaagtatgctgactgcacagaatagtatgtaacacataaatgcaaaccagtctcatcgaattaatcaaatgttacttcaaaagtataaaggcgaagcaaaaggaccattcaagagtcagggatgtaaaaagtagcacaagccaacttacaacttgttcatgccaatgaatgctattactacctctgtttcaggtataagactttttagcattgcccacattcatatagatattaatgaatctaggcacacatatatatctagattcattaacatatatatgaatgtgggcaatgctagaaagtcttataatatgaaatggagaaagtagtatttacgaatgatgtatgtttgtagattaagaattctctttaattatctttttccagttagttcccaagttctatataattcacagcctgatggttcctctttctgttaccacaccacttgttttcagaaaaaaaaaagattcatttactatctttgtttcatattataagactttttagcattaaccacattcatatatatatgttaatgaatctaaacatatatgtgtgcatagattcattaacatctacatgaatgtgggcaatgctagaaagtcttataacctgaaacggaagtaagttatagcaaatcagttcttcatgttaccagatttccttgttctcagctatatgaaagtgattgggacagggagatttgctcaaatgtagaacaaaggtaatggtacagagaaaaggataattaactaaaaagagcttccctacacgttcctgtggcttttcaatgaactattaataacctatactcctatagattcaagattactgcattttatctaaaagttctcgtcccgatctcttagagcagggtaaatttgttatttcaatttctagtaaccaaagctgctaatgctgccctctcagtaaccaaatgcagcaatgatccagagcaaaaccacgcgtcggtcagagcattgcataacagcgaagagaaagagggaggcgtcacctcgacgaacaagagccagcgccgtcaacctggccggcgagacggtggccggctgggaccgcgaagggggtccaaactgctcatcccccattccccctgcgcccaagcctcgccggatggccagccccctctccgcctcttccgtcgccggtacagcgtgggggtcccgtctcgcctgccaagccctccaccaccacctgcctcgtcggcatgtcgcggaggtaggcaggggcggggattcacgcggaggcctctcgtagcgtagttggctagcggcagcagcaggccgcttctcgttcgcgcgccgccgctcggcggaggtcgccaccgtcattatcgggcgcagccgataattcgaggggttttatgggaataacaacatcccgcacctacgtttctaaatcaaagctaccaatatcagatcggacagttcaaagttagcaagccttgaaccgctaccattggttgcggaacaaaaaaaattggtggagccgggccgccgggggtgcaggcgtgcagcgcgcctcctccgtgctccctccgtctcagaaaaaaaaaggacttaattcttaggttttttatccaatgtttgaccgttcatcttatataaatttattttatgattagtatttttttttgttagatgataaaacataaataatacattatgtatgacttatcttcctgaacagagaacagtgaaggcggattagtgaggacgacgctttgtcaagtaggtgctacaaggtaatcaatatcaacatattagatatagtattttttttatttgtcatatcatataatcgagatacaatcataaaatcaggatactatcaaatttataaataacacattttatatataatcggtcgtggctgttctgatccaattgatgaatttcaagatgacttggtggtcacgaccgatcggagtggttcttttctggctgctcttctggttggaggcagtcatgttcttttctggctgctcttctggttggaggcagtcatcagttgcacctgttgtacccagtgagctttctttgatcatggaagaatgtatggaattcttggcaattaatgatatcacccggaggggggggggggtaaagtcatgtattatttttttgaaaaataataatgtcggtatttgtttgtcgattcttttctatggtgtcgcgtcttagagttgtctttgaagggaagtctagaattgactttttagcatggcttgagcgacattggtagacaaatgattattccttcttgaattcgatgttttggagggtgttatattcctagcgttctcctgattgtagttgaacacactgtcacagaaacaaatgatatgttaatttatgtgttcttttcttccttagttagtgtaagtggataggtcggatgatttcgttgttcagtttcattactaagaaaatattatgaaggtaaatatatttgtagttgcaaagccaggtagtttagtagtaattaactagtattgttaactaactcgtactcactggcacgtgcaattcacgtgtaggcgttgaccatataaaggaaaagggttgcgatattgtgggtggaagtatatccaatcaagataactaaggttacgtttagttctctttaaacttttaattttttcgtcacatcaaatgttttggacacatgtatggagtataaagctggacgaaaaaacaattgcacagtttgcatgtaaattacgagacgaatcttttgagcctaattacgccatgatttgacaatgtggtgctacagtaaatatttgctaatgatagattaattaggcttaatagatttgtaacgcagtttacagacataatctgtaatttattttgttattagtctacatttaatacttcaaatgtgtatccgtatacttaaaaaaaattaaaatggaactaacacggcctaacgctttgttctgctcattctcttccaagacttcacagttcacacccccacccgtagaaaaatgacttcctaccctccaacttgtcacgctagctgttgaaaaagacctccattgctgcgattggtgatacttctgcttctcttatgctacctccgttctaaattaaattaagtgtaaccatgggttttcgtatttagcatttaaccatccgtcttatttaaaagttttataaaaaaactattttaaaaattagtcacacataaaatattatttatattttatcatctaataataataaaaatattaatcataaaaaaatttcaattaaaatggacggtcaaacgttgaatataaacagtgcaaaactgtatttattttggacagaaggtagtatctctttggctacataaaataaaaaaaatagtttgaatttcaatttggacggagttcattaatcatccttgacgacataccctcgtttattctaacctgtcaaatataaatcaaatgcttaaaaaaaatctgaaatttttttttgctaagattgatacgacagtcgtttattattcctccaaaaagataattttgagctcaactgatctacaaattgataaacaaaataacaaactaacctttaagtttcacgagcactatccacggttagatttgtttcttcttaacttaatcgaattcaaacttccatgtatgtaaagtgatacatactccatctgtctcaaaaaaaaagacaaaacggggtttccgtgtctaacatttgactgtccgtcttatatgaaattttttttataattagtattttcattgttgttagatgataaaacatgattaataatttatgtgtaacttatctttttaattttttttatacttttcaaataagacgaacggtcaaacgttggacacggaaacctagggtttgccttttttgggacggagggagtatataccacaaagatctatgctgtgatatttcctaagattctttttactgtccaaatgattgcaaataatgaggagatattctcttaagaggcagaattgttttttttttttttgaaaggaatcagcacagactgtgctatatcattgaatagagaggtaaaaaagtactacccctatgggtgaaaggagaaaaaagaaactgtacaaggcgaaattaatctttgcactggccattgtccaagctcgtgcctcttcttttatttttgccattaggctggggccgtcatctctttgtgttcaaagattctcctgttacgctccttccgaccgcaggtcttttttgggcacttccttcttgttggctatcatttcccaccaatcctgaacaccctgattggggcagaattgtttttccattttgaacccaattttcacatcgatgtttcgtattagacccacttttagtttatactttcactttaattcattttcttcttttttatgttttaacaaaactgatataaaaatatttggtgattgataaatactactagcaaaagtggtttattgattaaaacaaagagagcaattcacttcgcccctaatgtagctcgagtttggctcgatactccctcgcacgattttagatgtactctgacgtcttttgtggaccaaaaccatgcgttctatcttcacgcaactctattttaaggctccttagaacaacagatttttaaacaaattttagaggaatttattcttatagaaactttttgtttgatcatttggattaaagaaatagctatccaaaaatcctatgaaatttctttgaattggctcaaaacatagaatttttgtaggaattctgacatgggcttcaacctctcgaaaaaaaatcctttgcatctgtctttattttgattcctaccttttctcttcatccaaacaaccatttctacagttttctcatgtttttcaaaatcatactcccttcgttaaaaaaagaaaatctaggactggatgtgacatattatattacaatgaatttggagagagatatgtccagattcgtggtaataagatacattatattcaatactagattaattttttatgggactaagggaataaaatgtaaagtattagcctgtctagattcgtaatgtagacaaattcatagtattagaacgtgtgccttatcatctaaaatcgaaagtatgacacatcgatccttatgtattactatgtattttggaaatccactaccacggactcttgctgtcactatcggacagaagatatcaaaacagtttatttcagcaagtggttatcagaaaggcgattcaacgcatccatctagtctacgcacgcatgcgttgcacgcatccgattttcacatcgatgtttcgtattagacccacttttagtttatactttcactttaattcattttcttcttttttatgttttaacaaaactgatataaaaatatttggtgattgataaatactgctagcaaaagtcgtttattgattaaaacaaagagagcaattcacttcgcccctaatgcagctcgagtttggctcgatactccctcgcacgattttagatgtactctgacgtcttctgtggaccaaaaccgtacgttctatcatcacgcaactctattttaaggctccttagaacaacagatttttaaacaaattatagaggaatttattcttatagaaactttttgtttgatcatttggattaaagaaatagctatccaaaaatcctatgaaatttctttgaattagctcaaaacagagaaattttgtaggaattttgacgtgagtttcaacctcttgaaaaaaaaatcctttgcatctatctttattttgattcctacttttttctctccatccaaacacatttgttaaatagtcccacattggttgtggaagggcaaatgacctaaaatataagtgggggagcccctcacctcaatggagcttttggggtgggaaaggccctttacgatcctacaattggtatcagagcctggctaggttaacatctctggcccgatggacacgtgtgaaggcctgatggaccgtgggtacctgcggggcccgtatacctgatggaccgtgggccggtggggtctatacacggtgaaggggcggtgaagggctgagggacaccaatgtgtgaagggggagattgttgaatagtcccacattagttgtggaagggcaaatgacctaagatataagtgggggagcccctcacctcaatgtctagcttttggggtgggaaaggccctttacgatcctacaccatttctacaatgttgtcgtgttttcaaaatcatactcccttcgtccaaagaaagatgaatttagaactggatatgacatattacattataatacaatgtatctggacaaagatatgtccagatttgtattactaagatgtgtcacatccaatattatatcggttttaaatttgacggagagagtaagattgaaggtgttagtctgtttaaattcgtagtactaaaatgtagacagattcgtagtatttgattatgtgtcttatcatctaaaatcgaaagtatgacttatcgatccttatgtactttggaaatccactaccacggactcttgctgtcactatcggacagaagatatcaaaacagtttattttaaagtaataataaaaaaagcaagtggttatcagaaaggcgattcaacgcatccatctaattcatagtctacgtacgcatgcgttgcaggacccccttgctgtaccaaataattgcaagcaagtgacagtcagaaccctcgagcgtcatcaatttctcatgtgcgatatgattatctaaactctatcgaacgtgccaacttccatgcttttttttttttgaaggaatacaacttccatgcttaattgaggagtagttttgtccggctaatttgctagtctcggccaacccacatacagctagccaccatattttaagagctttatcatgcatatatgcgatttgccaaccaattgattcgagtccaactcaagactcgtagacgaaatcgatcatgtacacaggaagtacccagctaaaagtgaaatcaaaaccagcgtgtgctctgggtcttgccaatggacaaatgttccttttgtgattattactcaagaggaatttcccttcacgaacgaaaacggtcatatcaaatcggcatagcactagtgacggccacgactagttgaggactgaagaccagcaataatgacaatcgtaaactgatgaaatatcaaagtgattgtcagacaaagcgccattatcctgtcgcttacggctgcgtatgtccaaatcaagaatactacccgtactttgatttgcataatgattgcgttgaacgttggttgcttgatcatcttttatacactttgtcccataattttctttgcctttgtagaccgtagttcaaccaatgaaccaaacagcgagctgaaacgatggctggattggtcatcggctgcctggccgtgcagctctcgctggcgtctctgctgctgtgctcgtccgcgtcgacggcgcagcacacgctcggcaccggctcctccctgtcggtggcggaccggtcgcggccgttcctggtgtcgccggacggcaccttctcctgcggcttcattcaggccggcgacgacggcgacaacgccttctccttctccgtatggttcaccgccgccagggacggcgccgtcgtctggacggccaaccccgacgcccccgtgaacggcaggggctcgacgatctcgttccgccacgacggcgagctggccctcgccgacaccaacgggaccacggtgtgggcgagccggacgggcggcggcgggcggggcctgaccgtctccctccgcgacaccgggaacctcgtcatcgaggacccgtcgaccggccgcgccgtgtggcagagcttcgactggccgacggacacgctgctcccgtcgcagcggttcaccaaggacaccaagctcgtcgccggctacttcagcctctactacgacaacgacaacgtgctgcgcatgctctacgatggcccggagatcgccagcatctactggccgttgccgggggtgagcattttcgacttcggccggacaaactacaacagctcgaggatcgccatcctcgacgacgccggcgtcttccgctcctccgacaggctgcaagcccaggcctccgacatgggcgtcggcgtcaagaggcggctcaccatcgagcaggacggcaacctgagaatatacagcctgaacgcgtccaccggaggttgggcggtgacatgggcggcgctcagccagccgtgccaagctcacgggctgtgcggcaagaacggcctctgcgtgtacctgccgagcctccggtgctcgtgcccgccagggtacgagatgatcgaccgccgggactggaggaaaggctgccagccgatgttctccgtcggcaactgcagccagccggcggcgcctgagcggttcaagtctgtggtggtgccccaaaccgatttctacggctacgacctgatgttcaacgggtcctcgataacattcgagctatgcaggaaccagtgcctgagcgattgccagtgcgtcgccttctcctacaggttcgacggcgtcggcagatgcttcacgaaaggcaggcttttcaacggctacacgtcggcgaatttcccggggaacatctacctcaaggtgtccatcgacttcgacgaatcgtcgccattggtcagcgcgcggagcgccgccggcctcacgtgcaatcccaacgtctccatcgtgacagtgcccgctgccgtgtacgggatggctccaagaaacagcgggaagtggacctacctgtttgtgttcgccggtgtgctcggtgtcctggacctcctcttcatcgcgacagggtggtggttcctgtccagcaagcagagcatccccagctcgctggaggcagggtacaggagggtgatgacgagccagttcaggcggttcacgtaccgggagctcaaggacgtgacggccaacttcaaggaggagctcggccgcggcggctccggcgtggtgtaccgcggcgtgctcgacggcggtaaggtggtggccgtgaagaggctggcggtcgacgtgacgatgcagggggacgaggagttctgggccgagatgacggtgctcgggcggatcaaccatatgaaccttgtgaggatttggggattctgctccgagcgcaagcacaagctgctggtgtacgagtacgtggagaaccagtcgctggaccggcacctgttcgacacggccgaaggcggcggcggcatgtcgacgacgacgctggcgtggaaagatcggtacaagatcgcgctgggcacggcgaggggcctcgcctacctccaccacgagtgcctcgagtgggtcatccactgcgacatgaagccggagaacatcctcctgacgagggacttcgacgccaagatcgccgacttcgggctggccaagctgtcgaagcgggacggcggcgccggcgtggagctcacccacatgagggggacgtcggggtacatggcgccggagtgggcgctgaacgtgcccatcaacgccaaggtggacgtgtacagcttcggcattgtgctgctggagatcgtggtcgggagccgggtggcggaccagaggacggaagccggcgagcggctgcagctgccgcagatcgcgcaggcgctgaggcatgtgctggacagtggcgatgtgaggtctctagttgatgccaggctgcaggggcagttcaaccctcgtcaggccatggagatggtgaggatttctctggcgtgtatggaggacaggaacagcaggccgaccatggacgacatcgccaaggctctcacggcgttcgatgacgaggacgaacaccccgcttaccggtcatgatcatcaccaggctaaccgttagcatagttcagcttagagcagcagtcagctgtgagtttaattcagcacttgaatttcaaatttaaggattatgaaattccgaaaaattgtagttaagacttcaaatcgagtatactcagtagaagtactatagtcagtattgagctcctccccaaatattaagcaatcagttgactgaaaaaaaaaagaaaaaaaaaagaaaagcactcccagaattctttgaaacaaaggtcccatcggttgcatacggctgattaaaaaccattacggcttattagtgataaaaaagatttatgagtaaaacttttatatatgtgtacttagcgtgtcggtgatatggctcggggtatgcgaagtgcgggggagttacctcctgatccagccacgtggccctacagcttggccctccccccgcgcctcggaagacccagaggcagccagggagcctcgggtgccacgtcacacccctcgggccctcgcgctgcctcgccctgaggccctcgctcaactgccatgtggcgaggggagcgagcggggaggagactcagactgaaccaccatcaatgcgcgccgccccaactgtccctcaccgcatttaatgcggtaagggcggacgtgcggtggggcccgtttgactcacgtcaatcaggcgtgaccaaactgtgactggcctgtcgccggtcacgtccgatcggacgggcggccgtgcccccacactcgcccctgtacccagcggagtggaggcaggtatgccccgtcccatcgaagtatcatccggagctccctccacgtgagaaggaccgccacaagtcttcatccatttaagacggaatgacacggctgtcccccgtgtcaggtggggggcggcgctgtgtcccactcaaggacggactgccgcttagcttccgggcgaagacacggatcgtggtccggtcaaggtaaagtggatccccctcccgtgaaagagtaggtagaagcggtgcatgtggtatccccttgaactataaaaggaggaccttgcccaccgagaaaagggacgacgctcagtaggcctgaactctaggaggagaagagcgagagtactctccggagtttaggaacctttgtaacactcaaccataaatcccacacacaggagtagggtattacgctccacaacggcccgaacctgtataatcttggcgcccgtacgcgatctagaaaccctcagggcggatacacgatctcgacaagcgagccttttcccccggccgaactcacaaaaggggatctcacgatctcccgctagagaggatcactcctcgacatagcgacttaaaagctaaagctaaaaaagaaaatctttgaaaaaacatcaaaatcaaatattaaaattcaaattttagcattggcttataactttatatgctataaggcaaacgatgaggctcaaacatcatcatataccttagcagaactgaattacaaatagtgtttttattccttcaaatttcagaacggtatggcatcccagcgcgctcacgctgccgatcgcgcccgtcgtgcctctctccatctctcatgcgcttcctcggtgcacgctaagccaattttgttatatatttgttgataagtgtttttctaaaaatttaacaaatgaaattatagtataatcgtaatataattacattggaacttgcatataaccgtaatataacctacacgtaactttcatataattttaaactattagatttgtttcaagattcatgtaagtgaggaaggaaaaaaatcacagcacacacatatgtgagaggattcagggtgtgttcggttgggcttttcaacttgcttttgcttttgtaaaagccaaaagccaaccaaatggtccaaaagtcacagctacttttgcccaaagtcagcttttggtatagtacaaatcaaaagcacctctactccctcattcatctgcttttgggggaaaaattagccacctcggccattacacaaaaaacgcttcacttcttctttcttttttctcccatccttccccccgtgcgtccctcctcctcacttcaccttcgccgtcgccgccgctcctcctcccccccgggcgccgccgctcctccttgccgtcgaggccgactccatcaccgttgaggccgactccgccgccgcatgcgtctacctcccctccgccgccgttgcacgttctgcctccccgccgccgccgtcgaggccagctccgacgccgccgaggtcgactcccgcgtctgcctcctgcgcgttcgattccgccgccgacaccgtcgaggcctcctccgccgccacgcgcgtctgccgccgccgaggccctcctccgcgacacgccgccaccgccgctgaggtctccttcgccgccgcgcgtgtctgtcgccgccaccgccgctaaggccgacgccgcgcacgttatgtgttttttctttcctcttttttttccttcattttcccctcttttccaatgggtgtatgacatgtggagcccgcttgtaagtgggactagttatttcaaaagtcacaactgttgaaccaaacgagcttttccaaaagccacaccaatattccacagctacttttcgaaaagccacagcccacagctattttttcaaaagccacagctcaaccaaacacacctcagtccccacaaccttcatttcatagaaataacatgttttggagaaaattttttaaagttgaagatacatttacattgtaattacataaaaattacaatctaattgtattgtgattgtactataattacacaataaaggtacaggcaatccccgttgagctagttggcctgatagactggagggtggggagcgtggggctgggtgctgaggattcaattggaccgataatgagaggagatatatcctaatgggctgcacactgattggatcagcccaatagatgcatatctttcatgatcgtttatattagaaataagttcactttaactcccttaaagtgacccgaatctaatccgtaaccctgaaccgtaaaaccagaaatcttgacccctaaactattaaaaccggtgcaattttgactccccgggtggtttggagggcggtttcgctgacatggcggtgttgacttagtctccgtccgacgtggtgttgacgtggcgtttgtatggcattagaattaaaaaaaatgcaggacccatttgttattcgccaaaagaaatattgtgggacccacatgtcagcatctctctttgaccccttcttcctccctctctcccccttttctctctccctctctcctcgacaggggcgcgccgttgcagccgcgggcggtgaaggcagccgtggactcggcgttggtgctcacggcaaggggacaattgaggcaaagccgcgccatcctactgcggcgccagcgggatgacgacagggagcggcactgaggagactacaggcgacgagcttcatggttggtgagttatgaggaggaaggagagcccggagcagggggcggcatcctcctcgcccgccgctccgccccacttcggtcgatgggacaggagtcggagacggcgacgtcggcagagaggtcaacaccgacgccgca

SEQ ID NO: 9757 - DNA, 12841 bp, Oryza sativa
gctatagcaaaattgtgtgatgtgcatggactgtgtggcgagaatggtatatgtgagttcttgccaagcttcaagtgttcttgtccccctggatatgagatgagagatccaacaaactggagcagaggttgtcgtccactattcagcaaaaactgcagcaaaatagaagaatatgagttcttcaagctcgctcaaaccgacttttatggcttcgatctaatcatcaaccaatccatctcacttaaagaatgtaaaaagacttgcttggacatctgctcctgctcagcagtcacgtataagacagggtctggaacttgttacatcaaatatgtactcttcaatggctacagctccacaaattttccgggtgataactacatcaaactacccaagaatatggtttccaaacagtccgatctctcatgcaacccaaccaaagagattgtactaggatcttcaagtatgtatggaatgaatgatgcaaataaaaattatgcaacctattatgtgtttgcagcagtattgggagctctagtgctaatcttcacaggtacaagctggtggtttctttacagcaagcacaacatacccatgtcaatggaggcaggctacaggatggtaacaagccaattcaggatgttcacgtaccgagaattaagggaggcaactggaaagttcaaggaagagattggaagaggagcctctggtattgtttacagaggagtacttgaagataagagagtgatagccgtgaagaggctaatgaatatttcacatggtgaggaggaattctgggcagaaatgagtattattggaaggatcaatcacatgaacttagttaggatgtggggtttttgctccgagggtcaacaaaaactactggtgtatgagtatgtggacaatgaatcactggacaagtatttatttggtgatgtaagtgctgagcgattgcttgcatggagccaacggttcaaaatagcgttgggtacagctagaggtttggcctatctccatcacgagtgcctagagtgggttgtccattgtgatgtaaaaccagagaacatacttctgaccagagattttgaagtgaagatagcagactttggactggccaaactctcaaagagagacagtaccagtttaaacttcacgcatatgaggggtacaatgggctacatggcaccagaatgggcgttgaactcaccaatcaatgcaaaggttgatgtctacagttatggtgttgttcttcttgagattgtaactggaagcaggatatcaagcgggataaaagtggatgggagggaggtggagctcagagattttgtgcaggtcatgaaacatattctggctactggggacgtcaaggatgtaattgatactagactgaatgggcatttcaattctgagcaagcaaaggtaatggtggaagttgctatatcttgtcttgaagaaagaaacagcaggcctacaatggatgaaattgcaaaagccttcctggcatgtgatgacgaagacaatcacccagcctactcatggtgacctgcaaagcaatagtgttttgatttgaaggatcaaaaactagttattcagtttagcatgcacaatacttgaagtaaacagttcttgttagagaaaataagtcagatacttctataaattcatttcagtatagtggcaggtttgtttattcaaatgtacatccaatagaaaaataagtgtgttggatcagtggaacgctgtaccaatgtttaaagttcttaactttgcacttctggtgagtctcctgagaatctcctcatactgacgtgtcattctccacgtatatatttccacgtagctaagaataatttgtagttgtgttgctggtgtagtcatctgttgggaaatacagcaacagcatccaacaactatttcttcacattttttcacccgttagagatctaaccaggaaagacccttccatcatgctttagacaacgagtagtgtctcacgatatgaccacaaataaatttacgaatttaagtatttgttgttccctggaatagtaaggttgaattaatatgctaggctgctagctgatttgcccagataatgtacaaagcttaaagagaatatagaatccaagaataaatagttgacttgagtatgacatcctgtaacttacctagtcatccatgatcatgtgtggtagttatgtaaacataatacaaatcaatgataatcagcacagtccgcagaatgtttgctaaaaattccctcaaggcactgagtatcagagattaaaatggcaaataggatttgagggtgcctcacctacgagtagttaatactatataatatggccattttgatcctaaacaagtgaattaagataatgatgaaaggtgctagactgctacacctatcgttggaaaatttgtaaggaccagaaaggaactctttccttgaaagaaccagctcactaataatgatttaaatactggaagttctcctagaatacaaccaccgcgataatcagacaacctactaatggtgaccaataacaacactaattttattttgcaagaagaagaattattataccatagagaaaagatcagttcgagcatgttatgaattcttcttagggcaataatatatcaacttgttcttaattgtaatgaatctgttgaatattctagtgtctgtatgaactcttgcatgaaactaagtaggttcatttagaaagaagtacgataccagtacctttatttgatggcaagctgcgttcagttattcagaagggcccaagtaaggatatgatatacacaatatcaatttagtgcacatttctcttgatcctttggcgcatgatttacactaccacagtaccatgtgatctcgtaagcagtaagcttactttccttaaaaaatatacacatacacaaagccataaaggatacgctctccgctatgcacagccgcattcagttctagggatggctcatcgcctcatctatctactgctgcgacatcacctgtggggtaccaattgacggcaaaaatgtcagttttctaataccatcacgagactagtaataacataaccgagccatcaagagggaggggcccgcgatatgtcctcaatcatccgagtcatccccgattccccattctcgtggttgccgccaaggtgttcgatagaattccgcaaagacaatagaggtctgcacggggcagggacaagggcggaggagggagggggggggggggggataacattcacctgcgcagagagcacgccggacgcggccggggacacggagagagctgcagatctgatggctccgctggtggcaagaggcccgaggcaacgtggttgaggcggagcgaaggcgagcgcagcggcagttcggcactcggcgcggctggttcgctggtgaagtggggagtggggagtggtgaagtggttcagtcgcagagtcgctcaagggccaaggcggtttgaaggatgtctagttcacctcttgaatcatctatcagcactaactagctttttcataacgaaattcgaagtgatggcgttctacatggtaatactccctccgtccaaaaaaaaaaactcaacctactacttcgatgggatataatctagtacaacaaatctagataggagtactaggttaagtttttttgggacgaaggaagtatgcggtaactttacatccaccgtagatctataaatttgaatatattaaatctggatatagatatatgtccatattcataattctaaaatacttctaatcttattctaaattactaatctatctatctatctatctatctattatattattaaaacagctcgaaaagaaggcatcacgttcgttgtggggctagaaattcccacattaatcgaagaaaaagaaaagaagagtccaaatagaaatataatttaaaaatagctgaaattcggaattataaataagcaatattgaaagaagagttcgtataagaatccaatacgagattaattaaaattcggaataaaaataaaataaaatctgaaattggaaaaagaagagtctatgtaggaatataatctagaaataattggaattcggaattaaaaataaagaatattaaaagaagagtccatataagaatccaatacgagattaattaaaattcggaataaaaataaaataaaatccgaaattagagaaataaaaaagatagtttgagtaggatgaaacaactataaaattgaaaataaaaaacattaaaaaataattcatataagacataatacgatattaaccaaaattctaaataaaaattaaaataaattccaaaaatagaaaaaggaaaaataatagttcacctaggaataaaatttataaataacttaaatttgtcataaaaaaataaaaactattgaaataagagaccatctagaacatatcacaagattaactaaaatttgaaataacaaaaaaataaattctgaaaatagaaaaataattataagagtttaagtaggaatataatttgtaaataaaaatatcggaatgaaaaatatggacttctaaaaaaaactccatctagaacacaaatgatgacaaacaacaataaagagggggagaagcaacaagtttataaagaagtagaacggtggcggttgacaggacatctaaaaacaattaacaaaacctcaaatagaatcccaatgatgattaaaaggagggacgacggatgggccgttaagcagccggtcatggcagttggcgggacttatagaaagtaaaatatgaatccaaataataattatgttcgatttttaaaatcccaatgacaataaagagaagaggcagtggataggccgaagagaagtacggtgacagggtttgatatgacttctaaaaattataaaaagatgacaaatgacaacaaatataggagaagcaacatgcatgtaaaggattagagtggtggcggttgatggaatatctaaaaactataaacaaaccccaaatagaatcccaatgatgattaaaaggagggacgatggacgggtcataaagtagcatggttacaacggttggcgggacttctaaaaagtaaaaaaaaaaacccaatgataatcatgttcgaattttaaaatctcaaagacaataaagagggaggcagcgggagagcagtacatgtgtacaatggtaaaggtgctgacagtttggtggaacttctagaaagtaaaaaaagaacccaaatggtaattacgtttgatttttaaaatcccaatgaaaataaagagaagaggcagtggatggaccgtagagtagtatggtggcagcatttgacgagacttctgaaaattataaaaacaaaacccaaacgagacaataaactctaaaaactataagtctaatttttagaggtttttagtgagaccaaattgtcggagatatgggcccgggggtatgtggagtaaaggagagctacttccctttccagccacgtggctctgcgagctggtcccacccacatacctcgtgagtcactaaggtgatggggagagcctcgggggtcgacgacatcccctcgggggtgacgtcaccccctcgggctctcccgtcgttttagcccgaggccctccctcggggggaagggtgagaggggagtctaggctgggcggccataaatgtgcagcgccccaaccgtccctcgctgcgttcaatgcggcgagggcagacgtgcggcgtgcccgaccgacccctgtcagtcggatacgaccggtctgtgaccagtctattgccggtcacggccgattgaatggatggtcgtgcccccacgtcgcctctgtctccgcggagtggcggtaggtacgccccgtcacatccggacgtcgttcgatatagggctgccgcaagtcctcactcatttatgagggaatgacagggctgccccccgtgtcaggcgggagacggcgctgggccccactcaaggaccgaccgatgcttagcttccagcaaaaggcacgggttgaaacccggtgggaagagggagaagggccccctcccctccctccgatggagggggagggtagaggcggtgcatgtggtatccccttaagctataaaaggaggaccttgcccaccggagagcggagaggagcaaggagaaccttgtaaaagtccactgataatcccaaacgcaggaggagggtattacgctccagagcggcctgaacctgggtaatcgaattgtgtgctatctaaacggggatcggagggacgaacacgcgacttcggagagacgagtctctgccctcggccgaactcacgaaaggggggtcacgcgacttcccgcgatcggggggtcttccctcgacagctggcgcgccaggtagggggcagttgcgcgtttgagaagaagtcgcttccttccgctccaagtcggaccaggccctagaccgccatggtcgaggtcctggaagcgggggaagcggtggcgtttacccccaccccgtctgggagtggggattcgggcgaaaaccgtgaccctcatcaccatcgccgtggctctcgaagtcctccccgccgcgagccttcgcggagggaggatccaacccgttcaagtggtacggccctctcccgcccccaggcggagggaggtcgcgacgcgtcggagcacgtcatcgtctcgactacggagacggtggttcgccccaaggcgcgcttcaggcggtgggcgcccttctgcggcatcccccggtgaacccggagccggagacccccgtacggcgctggctggacgacgtggccaacttggtcaccgctgcccagcggcagttggccacgggtggccaatccaccgccacaggtacatcaagtgccccggctaccctttcctcgtcggcgaggagaagggcccgtcgatcggccacaacctcgaggcgatccacggctccaacgacatcggaggtctcgggaaggcggaggcgtcacgatgacctctacggggcgcaggacgctcgggtcaacatcgagcgacgccgggacgagcgccgggctacccgcatgggggaaggcgcctcctcatctggagtgccacgctcttcttcgcgaggcggccctcccctcacgctcacccctgggggggcaggttgtagggctttcgttgcgagtctccggaatgtccggtggcccccgaagtttcgccccaacctcacggagaagtatgatggcagcatcaacccctccgagttcctccaaatctacaacacgatcatcgtggcggcagggggtgacgaccgggttatggcgaactactttcccatggcccttaagggtcaggcgcgtggctggttgatgacccagccccccgactccattcactcttgggaggatctgtgccagcagttcgtcacgaacttccaggggacatatccccgcccgggggaagaagcggacctgcatgctgtgcggcggaaggacgacgagtccctccgttcgtatatacagcgcttctgccaggtccgccacaccataccgtgcattccagcccacgcagtagtgtatgcattccggaacggcgtgcggcataaccgcatgctggagaagatcgcctccaaggagcccaagactaccgccgagctcttcgagctggcggacaaggtggcccggaaggaggaggcgtgggcctggaactctcctggcaccggtgcggcggctgcggctgcccccgagtctgccccccgctctaagcggcgagataggagaggcaagaggaaaccggcccgttccgacgacgagggccatgtccttgcggcagacgggcccacgcgggccccgcgcaaaggaaagattaccggcgataagccgagctccaccgccccctccggcgaaggccggtcggcggacaagtggtgttcggtgcacaacacttaccgccacagtctcgccgactgccgctcggtcaagaacttggccgagcggttccgaaaggccgatgaggaaaagcggcagggtcgacgggagggcaaggctcccgtgacctcaaccagtgaccagcgagaggaggccaagaacaaggcccctgctgacgatggcggaggtagtgaggatctggatttccagataccccaagggaccgtcgccacattcgatgggggggcttgcgctcgcatttctcgtcgagggttcaaggccatgaggcgggaacttctggccgctgttcccacccacgaggcgatccggaaggcgcgctagtcggaggtaaagctcaccttcgaccagagcgaccatccgacggtactcgctcggggagggaagttggccctggtggtctccccgactatccacaacgtcaagatgaagcgtgtgctggtggacggtggggccagtctgaacatcatctccccggctgcctttgacgcgctcaaggccccggggatgaagctccaaccgtcgctgccaatcattggcgttactctgggacacacgtggccgcttggtcacgtcgagctcccagtaaccttcggcgactccaccaatttctgcaccgagcggatcgacttcgatgtggcggatctcaatctgccctacaacgcggtcctgggcagacccgcgttggtgaagttcatggccgccacccattacgcctacctccagatgaagatgccaggtcctgccggtcccatcaccatctttggtgatgtcaaagtcgccctcgcctgtgcagaacagcgcgcggacaacttggcgatggccacggggccgcaggccccggaggcccccgcgtcccgcgcccccaagaagcgcctcaccttggccgacgaggttcccgtcaaggagattccccttggcgacgatccgtccaaaaccgctaagattggcggaaccttggacgccaaataggaaggcgcgctcgtctccttcctgcgggcgaattctgacgttttcgcatggaagccgtcggatatgcccagggtccccagggaggtgattgagcaccgcctcgccgtgcgaccggatgcgcgacctgtccggcaaaaagtgcggcgtcaagccccggagcgacaagccttcatcagggaggaggtggaggaggtggcgcggctcctggaggctgatttcatccgctaggtgattcatccggagtggctggcgaacccggtggtcgtcccgaaggccaacggcaagctgcggatgtgcatcgactacacagacctcaataaggcatgccctaaagatcccttccctctaccacgtatagatcagatagtcgactccactacggggtgcgaccttttgtgctttctagatgcatactctgggtaccatcagattggcatggctagggaagatgaagaaaaaactgccttcattactcctgtaggcaccttttgttatacaaccatgccttttgggttaaaaaatgccggtcctacctttcagcgcatgactcgaattactttaagtaatcagatagggcgcaatgtagaggcgtatgtcgatgacttagtggtaaaaacgcgccgccgggacacattgctgcaggacctggccgagactttcgatagtcttaggtccacgcgcgtaaagctgaaccccgataagtgtgtgttcggcgttccggcgggcaagcttctcggttttctagtctcttcccgaggcatagaagcaaatcccgagaaaatacgcgcgatagagaggatgcgccccccaacaagctcagggatgtgcaatgtgtcgctggatgcatggccgccctgggtcgatttatatcaagactggacgagagagtgctgcccctattcaagctcctcaagcgccccgggccgtttgtatggacggaggaagctgagcaagccctcaatcagctgaaagcttacctcacttctccccctatcctggtggccccggggccggaggagccattgctactctacttggctacgaccccccacgtggtgagtgccgccctagtagttgaacgcgaggagaccgagcgggaggtccctccggctcgtgatggcccctcgtcccccaaagcccccagcccccgggaggaccccgaggcccccggaggagaaggcgaggctttggcaggaggccccgagccctgtgatcccaagataatccggaatcccctggggcccccgagcaggcgcgccccgggtcatccgcccctaacaacacgaaccggccccgccgaacggtgcagcggcccgtctactttgtcagcgaggcgcttcgggatgcgaaaacccggtacccgcaggcccagaaaatgctttacgccgtattgatggcctcgaggaagttgcgccattacttccaagcacatcgggtttccgtggtaacatcgtaccctctcggccaaatcttgcacaaccgagagggcaccggacgggtggtaaaatgggccatcgagctagctgagttcgacctgcacttcgaaccgcggcacgcgatcaaaagtcaagtcctggctgacttcatcgcggaatgggccccagtggacgaccatgttccgtccgaacccccttcctcccccgaagagaaagaggacccaaacgctgacattcgtggcggacactggattatgcatttcgacggctccctcacccttcaaggcgcgggtgctggagtcacactaacctcgccaagcggagacgtcctcaaatacgtcgttcggctcgacttccgagccacgaacaacatggcagaatacgaagggctcctcgcagggttgagggcggtagccggaatggtcatccgccgtctcctggtcctaggtgactcccagctggtcgtaaatcaagtatccaaagagtatcaatgcaccgaccctcaaatggatgcatatgtccgcgaagtacggcgcatggaacgccacttcgacggaatcgagctccggcacgtgccccggcgcgacaacatgctcgctgatgagctgtcgcgtgttgcgtcggcgcgagccccacttcccccggggacctttgaagaaaggcttgtccaaccatcagcacgaccgaacccctcgaggggctccaacgacataccctccgccccgactcctgccgacccgcgccccccggagcccgagggggtcgaccccgaccctcctccgcgccccccggagcccgagggggtcgaccccgacccccctcgccaagtcgcatggatgactgacatccgggcgtatctcgacggcaatactcatcctgaggaccgcgcagaagctgaaaagcttgcgcgcatctctaagcggtacgtcctcgtagaagggaccctctaccggcgtgccgccaacgggatactcttgaagtgtgtttctcgagagcagggcatcgagctcatagccgacacccatcagggcgagtgcggggcccatccggcctcacgaactttagtcgggaaagccttccgtcaaggcttttattggccgactgcattacaagatgcccaagaatgggtccggcggtgtaaagcgtgccagttccacgccaagcagaaccaccagccggcccaagccttgcaggtcatccccctctcttggccttttgcggtctgggggctagacatccttggacctttcaaagcggctcgaggcgggtatcagcacctgtacgtcgccatcgacaagttcaccaagtggcccgaggcttaccctgtcgtcaagatcgacaagcattctgccctcaaattcatcaggggcatcacctctcggttcggagtgcccaaccgcattatcacagataacggcacccagttcaccagtgagctgttcggcgattactgtgacaacatgggcatcaagttatgctttgcctcgcccgcccaccccaagagcaacggccaagtcgagcgagccaatgccgaaatcctcaaaggcctaaaaaccaagacatacaacgtcttgaagaggcacggggattcatggctcgaggagttgcccgccgtgttgtgggcaaatcggaccaccccaagccgcgccaccggggaaacgccgttttttctggtgtacggcgccgaagcggtcctaccctccgagctctccctgggatcgcctcgcgtcgcactgtacagcgagaccaaccaggatgaccttcgccgcgatgatctcgattatcttgaggaacggagaaggcgagcggccttgcgtgccgcccgctaccagcagagcctgcgacgctaccatcagcgtaacgtccgggcccgatcactgcaaattggcgacctcgtcctacgccgcgttcagtcgcgcctagggctgagcaagctttcgccaatgtgggaaggcccatacaaagtgatcggcgtgccccggccaggctccgttcggttaatgtaacgccccgattttcgttcgggattaaaaatcattaataatacattttctagaaattaaataaaagataaatcaatttaatcaagtgaaataatgggagaattaaaattttcccttaaaaatcattggccgggaatattttgtaatattctttgtgccctaatgtactctccggaattttccgtgaattttcggagctcgagaaatagttttagagtcacaaagttcattaaactaatttaaataaaaagaaaacaaataaatttcccccttcctctctttgggccattttcggcccaagtcttcttttctttcccgggggccgcgcgcctttttcccttttcttggcccgctcgcaaaagtctgtttttgcgttccttctttttttccttttgccgacaggtgggaccagcgggcccacccgtcagctccttcttctacctatcgcgggccgacccaaccgccattgcggccacgttgtcgcaaaatacggggcccttc

SEQ ID NO: 9758 - DNA, 26645 bp, Oryza sativa
taccccaccccctccccactttcccccactccatttccctcctcctcccctcttccctctcaaccgcgccgccgctctcgtgccactgcgccgccgccctcgtgccgccgcgctgccgccctggtgccgccgcaccgcgccgtgtgccgtgccgagcgtcgcctcgccttgcgccgctgtcgccgccgccgccgtcggtaagccgccgccccttccctcgttccgccgccgtcgccgccccgggtaacttgagtcgagagagagaggaagggagaagccgggagggagaaggaaaaagaaaagaaagaaagaggaaagaaaaagagaaggaaaaggaagaaaagaaaagagaaaagaaaaaaaagaagagagagagaaaggaaaagaaaagagagagagaggaaggagaagagagggtagagtgggccccacctgtcagtcactatagctgtggataaggttgtattataaataaatgaattagggacagtaccatttcgcaattattagaattaattcaaatttgaatctttacgctagcataacttattcatttcagctccgatttgagtgaaacttgaacctaaattcatctaatttcataagctttccaatgatatataattcactattggataaaatatatttataaaaattaaataattaatatcaagatgatgcataatagtcaacttaaaaatatgctaataaataaaattagtattgtacagcagaataattatctttaatatgttctgtcactgtagcaaccacataaattaagtataatcgatgtttgaagttaatggatatataggaaaatattagtgccatttattaatctatgtccaaatataattaaaacccacgacttattagttatttaaatagagttagccttataattattaggtaagtaaaatatagatacacatagatcggtcctaagcttgtttatggcaaataataacagagctagtgtgattaaatcacctatatgaaattaatcaacgacatatcccatataatagcatatagtgggagaggtgagcaacccttagttaaccaagcagtaaatagaaattattcaaataaatgattcaatatactaagatattgtgcacacatatattgtacatcccattatagatatatggtatcgtattaatttgcttgttgcgtatattaatttagagggagtatatgacaaacatgaatattagataaatactagttatacatcttgtcctcgtataattacagatcaactgtaaatttggattattcattgtaaaattatgtgatgggataatccgtaaccataatatgattaacctaaacaattctaacatacaaagcatgggtaattgttaaccttttataatttattttgacaagtgaaatatgtacataattaaaataaagcctccattaataaaataataatacaaatgattcacagtaattatttgaccgatccaaaatccatccggcaacagaacctctagtgtataaccgtgctatgtagataaatgcatgcctagccataatccttccatagccatttgatagactaaaccaccgattagccaaatatatatgtatcctataaatgctatgttggttaactcctaaataggccacgttgacaatagaaagattaagaaaccttagcccctagcgagattggaatccattagcagacatgagtagtatattttgttgtgcatatttggttgttatttgaatattggtttttcttgcgtattatagaatttatgtatcggttagtcgtgaggcaacgtcaacaacttccaggaggtgaaggttaatcaagaattacatcaagaataaggactatcctgagcaaggcaagtcatcactattctttgaacatgttgatcccaattgcgaaattgttttgtttacaaataaaattgcatgcaattatgaacatcctacttgtgattataccatgccttgattattgttcacctttaaatctttgtaaccatagatacgtacgagtctctagtcaactatgacacttgcttagaaatgctattttagattcatgcatactcatatttatcaaatgctatatgcttgggcaattacctttgggaaggtaattgagatgcggcatgtggagacatgagcgccacattgccatgatattgatgacatgatttgtgaaaggaaaataaagtaaaacaactgttttcgactggggcggctggaggacttgggtggtgtccggaaaaggctagtgccgtccctggtcaattaaggaccgagccatgaagttaagcatgaaacgacccccgtacaaccgcacttctcgtatgggtatagacctagcggagtagatagctgagcggaggcagtatccatgcatagtggtttcttgatgtgtgaggcaggggctctacggtggggcagccattggtaggaccgcgaggcgggtgtctacagtggtgtcgccatcggtaggactgccatgtgagaatctaaaacataattataacttaatgcatgtgtgagtcttcccttcccgggtgcgccagaactcctctcactgctagaaaccgtgtacgcctagagtgcatgaggatgaaaagttcatggagcgggtactgccaatgcgaggttatcgaaaagctttgccgtgacgcgtctcatgtgttgggacgaggctcatgtgttgggcagtcgcggagtgcgggtaaagtgtacatccactgcagtgtgagtaaaccaaatctattcgaatagccgtgctcgcggttattgagcaccgggacatgtattacacttggctagactctaaattcttaacttgtgtgggatgggatattgcatgatgaattttatgctgatggagccacatcccgagaggagggaaggtggacatcctcagaaaaccatgacgattcaatggcgggaagctatccttgggatcacaatggatggtggacagaaccgtcgttgtttaaagtgaacactggtactaaaatttgatcagtctatgctaggttttaggcttgtgaaaagaattgtaaaattagctttatgcaaaagaacctgaagccattccttgaaatacccgctatcatatgcattgttgttgtggtggcttgctgagtacggttagtactcacccttgctatttatatatcttttaggagagtgttgaagagaagcccttgtcggtacgcttgcgtatcccacaagatgatcggagtgcggtcttgttctaggtctcgttccccagtcgactgcctgtggcatgttaaccgggcccttatattattttgtcttccgctgttgttctctgatagttgttggcctacctggccctaatgtaagtatttaactcttttagcctaaattcattcgtgatatgttgtgatccaactatgtatgtgtgtaccaactactgatccagggattggtacggataaacacagaagatttccgatttccaaaatcgggggtctacactagtgtatcctgggactggtactatatcacaggtaatgcataacaccctggtgtgatttagctgtgttaaaggctaatgaatgtcggggcgttacagcaacggataggccgtagagaagtatattggcagcttttaacatgacttctaaaaataaaaaaaatgaaacccaatgagataataaactcaaaaactataagatccaatttttaaaggttacaaggagaatgaacataagccatggtagatcgagaaaacaaataaagaaagggtgaaaaaaaaagtaaagggtagcaattgatgtgacttttataaaagttataaaattagaaacatgggatgatatggtttggtctttcaaaatcttaagacaatgagatatctattgaataaattataagtaaaatcatattaaaaatagataattttgtatgggtgctaaccgcgcaattgcacgggccacccagctagttttttataaatatcccgatcctctgcgtcggcctccctttgccccatagctgatctttaggatttttgccgtagctgatccttgcacacgcatgaaggtatttaattcattttctcggtaggcattaccatggacaatatgcattggagaagattacgtctaaatgggtatttgttgccctctctcttctctatacactacctatggatattctgggttgggactgtctaaaacaaattagtagtaaggagaaattacgtactgtagtgcaccttagtaatactcttgattgtattttctaggctccaaataaatacgtatgtcttaactccgttgaccataagatgaaacaaaaattttgtgggccaaattttgaacgatatttttttgtggaaacaagtggaccaagacttaactctgttcacgccttcacgggactgttaatttggagttttggactaagaaatatccacatgtttggactctgcggttgccctcggacagaagagacatcaacagttcaattcattagaaagtgatccatttttctcctaacatcagaaaggcgattcaacgcaccccggaagttcagtcgacgtatgcatgcgggcatatgccggcacagcctgtggaaaattgcacacgagctagagaacaaccctcgaccgacatcattcgcatttcgtgcattataataatatattttttcgaacgactcgcacgagacggtgcgaagttctattgatagagcaggaaaaaattacaagattataaccctggagggtcataaccagtaaaaggaaaaagaaaaaatataccaccccccacacaccgacagtgccaacacacacgaccaggaggaggctagcaccggaccggccgccgctaaaccaacaaaggaacacagacgagatcgccctacagctagggggtgccaaaacgacgtcttcaagaagagaagcgacggaaaaaccgccgccgccgtccatccgggctcaaaggagccaggactgggctttcgcccggcaaccacccttgaggggtgagacagcacgacaacgccctcaggagggggaattaaccatcgttgtcggcccggcatggccggactgggttttcacccgccgcacaccacctgcgaatccacggctaacgcaccgatgctccaccaccacacaacctctaccgacatgtgggacccccgcaccggcgccccccgccggccagccttcgagcgccgaaaatcgtgccacgcccaccggcatctcctcctcgcaccagggtcgcctcttcctctgccggccgcgcatctcgcgccgaaccggcctcctccaccggacgcgcctctcgcgccaatccggcctccctccctcggccgcgcctctcgcgccaagccggcctccatctccgccgcccgcgcctctcgcgccgagccggcctccgctgccatcggctgcgcctctctgcgccaaaccgatctccgacccctcctccgtactctcccgcgccggctagatgcagccgtcggccacgtcctcggctagccgaccgaggccaccatgccacctcccaccaccaccagggccgctgctgccgacggccacctcgccgccagccagccgcagccccatcgacgtcgtccagccgctaccgcaaccgtcgccacgagttccgcgtcgctgcctccgtcgcgagagccccaatgccacagcagccaacaaccgccaatgccgtcgaccagccaccgtgctgtcgccgccgacaagccgctgctgccaccatcgccatggaatccgcgccgtttccaccgccgccgtcgccccgtggtcccgtgctgttgccgccgccgacgtcgcccgcgagctccgcggtgccgccaccgccacgagcttgccccgcgtcgccatcctcgccggcctccgggcactcacacgcgcccgaccgcgtcgcccgcgacctcagctgcaccgccaccgcctcttccccgccgccagcatgcctgcttccccgccgcccgccgtcgcccggcgtcagccccgccagatccggccaaaacggcgcggatttgggcgggggtttccgccgccgccggcccggtacgccgccaccacgcaccgccagtcgccaccgccaccactccgccccgccaccaagcgccaccccgccggatccggccgggcgggtgcggatccggacggtttgccaccgtcgccgcccggacagctccccgggccgccgagcgcgcgctgaggcgaagccccgccgccaccatccccgcggccgcgcggctttgccagcgcccgctcaggcggcggcgaggcagagaaggaggggggaggaggaagacgacggcggcggcgtcgcctctcgtgtcgcccgtggggagggcgacgcgagagctggtcgtgaccaggaaacctccattataataatataaagcggtaaattgaacaataccatgagttacgacaccatcgtatatgtatgagccttccgaacattatagaatggaataaatactagaatcctataacaccaagcatataaacactaccattaccgtttcatcggttgccaatattctctaataaatctttttaacttgttattagaaaataaaaataaatttagaggtaaaacttttatatatgattttaatgacttaaaagtcaatactgagaaataaactacgttgaaaatatcttcaaatcaattttaaaatttgttttagattattagagcaaccagtggctcttaatcctcatttatgagaaacaagaatggctgtagagagcacggctagcattccaagtcgcatgggggacgatgggaagttggtcatgggacccctgccggcttaggccccaggccgtcacacagcccgcctagattcagagccaacccttgtagtttatataaataaatccaattttgctatatatttatcgataaattttctcctaaaaatttaacggatgtaattacagtacaatcgtagtgtaattacactataacttgcatgtaattacactgtaactataaatataacttgtatgtaactttcaaaaatatctccgtaaaatgttattttcggtacaatggaggtcgtgggaacaaatcctttcacatatgtgtgtgctgtgatttttttctcttccttaccaaaacaaatcttgtaatagatctaacgattcaaaattacgttaaacttacatacaagttatattgtatttacatgcaagttacagtgtaattactctacgattgtactataattacatccgtcaaatttttaggagaaaatttgtcgacaaatgtataggtggtcccaaataaatccgttagttgtaactccgtgtaatttgtagcaaatacacagtaccagggtagaattgccttgtcgtgcaaatccggcccaaaatgcagcttgggtctagctctacattccctttcgcgatttcagacgtacgtgccaagtgtccaagtggacgatcgaaaaccctgcatatgttcaagcgactcttaaagtttggactaagataagaaattccctagaccacgaccacatatatactctctttaattgctggcactctcggacaaatgagacactatcaatagtttaataattcagcaagtggttcgtttttttttctctcataacatcagaaacgggtattcaacgcatccgagaattacagtctatgtgccggccctgccgattgcgccaaattgttcacgagcgagaaactcgatcgagacttcatgcgcattttgtgcataattaatccgaactaaacgcgtcacacttaattaattagctttgttttttttttcctaatttgctagttgagtagttgacccccctcaaaaaaacaactaaacaaatttctagcagttggcattggccaacgccttcatccaagctttgtgccattttttaaagagcttatcatacatatgtcatcccagtttgatatagatgatgcttgttgaaactcagtttgtgtaacaattatacacaaacgaataattaaatattagaaagctcaaaagtccatgtgctgccaatgttcggatggtggtttcggattggctaacagagcatggcggcagggttgcagagggttccaagcgaaaacttagcccaatgatttattgggtcaactacgcttttgggcgtggtaatcatcctgaggacgctgttgggatacccctcctccaacagtaaggagctctgagtgaaaacctgtctagttctttggacggatgacaacggcgtctttcggcaccacaaccttcgtgagggcgtcgttttttagagtctccgcttcgtggtggtgttgtaaacccggtggtgaccggtctctcgtagcgacggtcggcttggtgctccgcttccctctctgtaacatgtgtctgtgcggttggcacatggttcggggcgtgtgctctagttcatattctttctcgacagtcagttgtcgatgaaaaatttttttgcaacatttttttcatctatcttaataacatttggataaccttctttggtcatcccggtaagaaaaaaaggaaaagctcaaaagtaaattaaaaaacttttataaggaatgccaatgaaaaaaaaaaggacatcgctccaacttgcaatgtcttttctaaattactgtttagtcgatgactcgatgtaatacattgtattcgcattgttatttttattttatcaccctgcttagagtttcgcccggagccatgaaattttctgggatggccttgatataattatcctcttccgcagaccatgtaagaggaaaacagaaccttcgcggacgaacagtttgatctctttttttattactcgacataaattccctgtatgaacagcaatttattttgcatggcattggtgatcgtactgtctgtgcgagtagttaaaaaaaaagtgatcgtactgtcacgacgagtcgacgaacgaagaccagcaacaaccgagatcagaattgaagctagcaaatgcacgcgtccacacaaaaccttgcgaaaaacgatccacgaccctcacaagaaatcttgacctcagctcactaattaactaacacagggagtacgaaaacaaaaataaaacgtagagaggtgcttactcctaatcatcatcaaacgaagcatcgtttcctgtggcacacgcctcacggcgtatgtccaagtcatcaataattagacttttcaacacatgactgcattggctgcttgatatcgccttatatgcgctcataatttctttgccctatgtagtacaagtgtacaaccaattgccaaactgctatagttgaaacgatggctggattggtcatcggctacctggccgtgcagctctcgctgatgtctctgctgctctgcccgtcctcgtcgacggcgcagcacacgctgggcagatcctccatgtcggtggaagaccacgcgcggccgttcctggtgtcgacggacggcagcttctcctgcggcttcctcgaggccggcgacaacgccttcaccttctccgtctggttcaccgccgacccgaacaggaccgccgtctggtcggccaaccgcgacgcccccgtgaacggcaggggctccagggtctcgttcagccgcgacggcgagctggccctcgccgacaccaacgggaccacggtgtggtcgagcaaaacgacggctggcaccgggaacagaaggggcctgaccgtctccctccgcgacaccgggaacctcgtcgtcggggacccgtcgaccggcctcgccgtgtggcagagcttcgagtggccgacggacacgctgctcccgtcgcagcggttcaccaagcagaccaagctcgtcgccggctacttcagcctctacttcgacaacgacaacgtgctgcgcatgctctacgacggcccggagatcgccagcatctactggccgctgccggggttgaccgtgttcgaaaacggccggacgaactacaacagcacgaggatcgccatcctcgacgacgccggcgtgttcctgtcctccgaccagacgaaagccgaggccaccgatctgggcctcggcatcaagaggcggataaccatcgaacaggacggcaacctgagaatgtacagcctgaacgcgtccaccggaggctgggcggtgacatggtcggcgctcaagcagccatgccaagctcacgggctgtgcggcaaaaacggcctctgcgagtacctgccgagtctccggtgctcgtgcctacctgggtacgagatggtcgaccgccgggactggaggagaggctgcaagccgacgttcccagtcggcaactgcagccagggatcggcgccgccgccgtcgccggcgacggcgccgccgcagttcaagttcatcgaggtggcccagactgattttttcggcttcgacctggggtacaccgagtccatcacgttcaagcagtgcagggaccagtgcatgaacaactgccagtgcaccgccttctcgtacaggctcgacggccggggaaaatgctacccgaaaggcacgctgttcaacggcttcacgtcggcgaatttccccgggagcatctacctcaaggtgcccctcgacttcaacgcctcgtcgccgcgggtctccgcgcagcgcgccgccggcctcgcctgcggtgccaacgtcaccgtcgtgaccgtgtccgctgacgtgtacgggatggcgccaggaagcaacgggcagtggacctacttcttcgtcttcgccggcgtgctcggagtcctggacatcctcttcatcgcgacgggctggtggttcctctccagcaagcagagcatccccagctcgctgcaggcagggtacaagatggtgatgacgagccagttcaggcggttcacgtaccgggagctcaagggcgcgacggccaacttcaaggaggagctcggccgcggcggctccggcgcggtgtaccgcggcgtgctcgacggcggtaaggtggtggcggtgaagaggctggcggtcgacgtgacgatgcagggggacgaggagttctggtcggagatgacggtgctcgggcggatcaaccacatcaatcttgtcaggatctggggattctgctccgagcgcaagcacaagctgctggtgtacgagtacgtggagaaccagtcgctggaccggcacctgttcgacgcgtccgacggcagcggcggcaaggcgacgacgctggcgtggagcgatcggtacaagatcgcgctgggcacggcgaggggcctcgcctacctccaccacgagtgcctcgagtgggtcatccactgcgacgtgaagccggagaacatcctcttgacgcgagagtttgaagccaagatcgccgacttcgggctggcgaagctgtccaagcgggacggcggcgccggcgtggagctcacccacatgagagggacgtcggggtacatggcgccggagtgggcgctgaacctgccgatcaatgctaaggtggacgtgtacagcttcggcattgtgctactggagatggtggtaggaagcagggtcgcggaccagaggacggaggccggcgagccgctgcagctgccgcagatcacgcaggcgctgaggcatgtggtggacagcggcgatgtgatgtccctagtggatgccaggctgcaggggcagttcaaccctcggcaggccatggaaatggtgaggatttctctggcgtgtatggaggagaggagctgcaggccgaccatggacgacattgccaagtctctcaccgcgttcgacgacgaggacgaacaccctgcctaccactcttgatcagtactcatgaccaccaggcaaatggcacgctggattaactatagaagtacatccgtacttagttcagagttcagagttcagaatttctttttaagctcctcagagcatactaattttgtatgaagtttttgaaaagaaaaacttcattttatctctcaactcaaataaaagatagaactgcgccaaatctttttaatgctagacaaattagttctcttagtacaatgctacaatccaatatatgttattttcttgaaacaggaatccaatatatggttttggttaaattgccacatgttttgcctctctttgcctagggctgaaactccatccgttctcaaatataagggacataagcatttaaaatttatttcaaaatataaaatatttatgtacaatttgtccaatcaatcatcttaccattcaaattttcttttcactttccgaataacattttcactcaccatataatggggggtgttatagtctttatctttattattaatttatacaagaaaacctataattccttgtacgtatttaggaactgagggaatatctatctttccctcgttggtagagccaaggaagtcaagtcacagctacaatggccgatcattgagctcaatattgtggtgactacggtcatagcatattggaattttctccagggaattctattggacatggatcctctctgcagtacaacacatgcattagcagatccgatctcatatgtcagtagtagctattagaggtgtaatactacagacaattcgtactgaaatatatttgtctcgagaggacatttatttgttttgtgcaagtcgcgtaaaaagtcataaaaaataagatagatcaatatgtggcacaaacatacaaatcaaatttaacctatataagcataaaaaaaaacaaatttgaatgtgaatagtgtagttgattatttgctccatgcctctaaaaatactccccattggtacataagtataattttagctagtcgaagacatattaagtaaagaattaaaatattactatgcccttcattattatgcaaagaaaacatggatggggagtaaactagaaggatgagatatttatattggttcaatggctaaaaaggagaagtaaaagatgaagtagtattagaaagttctagtggaccactcaaaaactaaaattatttacagacaaatcttttaattaaaactacacttatttaaggatggcaggggtattttctgtatattgtttagatcacttattttgtgttgtttgttcagtttttaaaatttttaaatcatctctatatataacgaagtagataattcattaaaaaaaatgtagggccttggagcacaggaaacatctagaacaatgacgggtggttttcggtaaggaatatggataatagttggataatagccaaacagtgccatcatcgtgtgtagggagaaaaagaaacaaaggaataaaatggcaaggaatgacgtgcgggatgatctttctttccttgtttttttttttactattttgctactatctctgttttaatatgtaactagcatggtggcccgtgcagattgtacggttagcatcattatattttctcttatataatagcatatatgttttctcattatattattcaaatatattaaaatgacaacataattttaaattttgcaataactttacaaaactactaatgtgtaatatttatattatattttatatacgtgttagttattaattatttttaatatcaaattttagttatttgtaaattatatatattcctatatggactctagactcatctttaatatttttttaattctgaattttctgaaaattgtatttctatatagagtactctatgctcttcttccaatattatttattttatatctgaatttttattatttctaattgtatttctatgtcgactctaaattcatctttcaatattctttaatttttcatttcaaattttgaatttcagttacttcgtaagttgtatttctatatagactctatgctcttcttccaatattatttatttttctttctaaatttttattatttctaattgtatttctggactctaaactcatctttcaatattctttaatttttaatttcgaatttcgaatttcatttacttcgtaaattgtatttctatatagactctatgctcttcttccaatattatttatttttctttctaaatttttattatttctaattgtatttctggactctaaactcatctttcaatattctttaatttttaatttcgaatttcagttacttctaaattgtattcctatattgactttgaactcttcttcccatgtttttcttaatttcgaattttagttatttgtaaattgtatttttatacggactataaactctacttttaattttattatgtttattccaaattttagttagttttaaatttctatatagactctacactctacttataatattccttactttttaattccgaatttctattttttttcttaattgtttttatatatggactctatactctacttctaatatttcttatttttaattccgaatttcagttattttctaattgtatttctatatgaactctatactctacttctaatattccttatttttaattccgaatttcagttatttcttaattgtatttctatatggactctagtctcctattctaatattccttattttttaattccgaattttaactatttctaaattgtatttctatatggactctagtctcctcttctaatattccttattttttaattccgaatttcagctatttctaaattgtatttctatatggactctgttttttctttttctccgattaatgtgagaatttctaggccatgagagcaaacgtggaggctcctttttatattcctttaataatataataactagctgggtggcctgcgcaattgcgcggctagcaccgatataaaattatctaatttttaatatagttttacttaaaattttgttaaatagatatctcgttgtcttaagactttgaaaaaccaaaccttatcatccctgtgtttctaattttatttttttaaaagttatgtcagttgctactcctaaattctttgtcacctgtcatttatttgctttctcgatctaccactacgtctatttgtgtcgagggaagaccccctgatcgcgggtcgcgtgacccccctttcgtgagttcggccgagggcagagactcgtctctccgaagtcgcgtgttcgtccctccgatccccgtttagatagcacacaattcgattacccaggttcaagccgctttggagcgtaataccctcctcctgcgtttgggattatcagtggatttttacaaggttctccttgctcctctccgctctccggtgggcaaggtcctccttttatagcttaaggggataccacatgcgccgcctctaccctccccctccatcggagggaggggagggggcccttctccctcttcccaccgggtttcaacctgtgccttttgctggaagctaagcatcggtcggtccttgagtggggcccagcgccgtctcccgcctgacacggggggcagccctgtcattccctcataaatgagtgaggacttgcggcagccctgcatcgaacgacgtccggatgtgacggggcgtacctaccgccactccgcggagacagaggcgacgtgggggcacgaccacccgttcaatcggccgtgaccggcaatagactggtcacagaccggtcgcatccgactgacaggggtcggtcgggcacgccgcacgtctgccctcgccgcattgaatgcggcgagggacggttggggcgctgcacatttatggccgcccagcctagactctcctctcacccttccccccgagggagggcctcgggctaaaacgacgggagagcccgagggggtgacgtcacccccgaggggatgtcgtcgacccccgaggctctccccatcaccttagtgactcacgaggtatgtgggtgggaccagctcgcagagccacgtggctggaaagggaagtagctctcctttactccacatacccccgggcccatatctccgacagtagcccccggcgccatgtcagacgcgggcttcctgggatcggtctgacatggtgcctcacgacctccctagctggggttgtgggcccggcggggagtttaaaggagtattgccgagcggccagattagcgggccagccatagcggcggttcggtcgcctctgatcgcgctaaagacgaggatgcttgggacgcgataatcgggggatcggttagaccacgcctcgattacctcgcccgctattcctacggcggttgtggtgacggttcactcagcttgcgcttatagccgttgcgcattccacctcgagtgcgccgctgataggcgcactaaaggtgggacgcggacacgacgggcgacgtggtgaacgggcgcgggaaacggagagacaactgcggacgtgggggcaattatgagggtgcgaaacgaggaggcgagcgcggatgagacaagaattaaaagggagtggaggcagggacctctcctccttcctttcgccaaccgccgactcgtcctctcgcctctcgaaccctaacactctcgccactccacgcagctttgcgcgccacgccttctgccactgcctcgccggccaccatggctcaagacaccggcgacacagtgctcccttctccccgcatctcggcagacagacaccttagcctcccccgcaaaatcatgccggacggcgccgtcgtgagggcgggggagtcacggccgcggccgcgatatccggagcggtccgtgcacctcttgtccttcgccatggcgggattgattccgcctttctcccgatttttccacgaggttctggatttctacgaaatccatgccttgcatctcgcgcccaacgccgtgatgacaatgagcatctttgcgcacctgtgcgagatgttcatcgaggtgcgaccgacgatgcggttgttccaggccttcttcgtcccgcagctgctacagggtgcggtggtggggggatgttacttccagccccgaccaggcacggcggggcagtacatcgagagccacctccgcaagaaatgggaggactggaagaaagactggttctacaccgcgctgccggatcacccacgacttcgagttcccgccggtcctcccgagagatccgccgcatggctgacggcttcggagctgggcgaggaatatgacgcggtgtgggatcgtctcaggggcctgcgaagcttgggcctcacaggagcaatggtcttcggcgactactttcgccgccgtatcgcccctctccaggaacgatcccgtggcgcgtgggagtataccggccccaacgaccccatgcgcaagcacgcgggcgagcgctgggactggggcgaggaggacgccaagatggtgattcggcgggtgctgggcctggactccgccgagcaaacactgatcccggatgggatcctccccctctgctgcgaccgcgaccgggagagcatcttggccgtgatgtcggtcgtcggcgccggcaggggccggcctggccgagggggcgccagcggtagcgccgccagcgccggtggtggcggcgcgtccgtgggcgggagccggccaagcggtccgggcggtggtggcgactcacgggcgcccggctcgggcccggagacgacccagcaagtgacccgaaggggaagcggaaggcggccaaatcttggccgccctctcccccgcgtggaaggggtgcagagcgcgcgacagaccttccaccggcgggtcacaagcgacctgccgggcccgaggccggtcggaagaagaaacggcttcggaaaatagggcaaacggagccgtgccgagggagcttcatcgagcccccgaagtggaccttcaaccatcctccccgcaggtacaaacgctggcgcccacttcggtgctcttacctagctcggcctcttgttccctccctttctttttcttttgttaacgcgatctgggttcccttgtagcgatattccttctcaggggacctcggggtcggacccctcgcggaggacgaaatccgcacaaccggagcggtccgggcctggccaatccaaggccacggggtcttcgcaacctcgcggtggggtccacaggacacgtaccgggcccgaggttgaggtcgaggctgggggcggtcctgagcccgaggccgaggccgaatccacccgaggactgggagcgggggacgaaaagaacagccgctcccccttgcgtttggggcaccctcggggctggcctcgcagaaggggggccgagagcaggccccgtctcgcggggggtccagcagcactccgtcgtcccgggggcgaaccgcgggcttttcttccccatccccggcgagcatggagccacttctgcaggtgctcgccgccgccgactccactgtccgggaggggctcaacacccaagttcaagccctggcggaagagcggacggccctggatgccgaatgggctcagcttgtggcggaccgcgcgcgagtcgacgaggggcaccgtgccgtggaggacatggtgagggtggggcgcaaaaaacaccaagcccacctagctaaaatccaggcgcgcgaggaggtgctggactccgtcatgcgggaggcggaggaggagcggcaggcggcgctgatcgcctcgagcgccctggacgaagcgctgggcgatattcgcctttagtacgaggcccatgccgaggacctggcggagagggtcaggaatgcgcgtggcaccctcgacgcagccgctgcccacgagcggcgagcagcggaggccgacacctcgttgcaggcccggactgcggcactcgaggctgaacgcaaggccttggacgatcgtgcccgctccgtgcaggagtttgaagccacgatccgtcggcggattgaggtccttgatcggagccagcgcgaacaaaacgcgcgcggccaggaacaggcgcagcgggcccaggagctggaggagcaagcacgcctgctggatcagcgggagtccaccttggccgcccatgagagaacggcggcggaaacggaggcctcccttcaccttcgtgaagaggccgcggctgagcacgaccggatcactctcgccgcggaagcttccgcgggccgccgcgcggaagagctacggctgcgggaggaggcgtgccgggaacgggacgccgcactcgccgagcgcgaagccgaggtaaaccgccgcgaggtagccttgcgccggctgggcgagcagcttgcgaagcgcgaggaggctgctgctgggcgcgaggcccggcatctggagagcgcttgcgctgagcgcgcggcgatagcggcgagggcttccgaactggaggcccgggagaagcacctggcagccggcgggccgcccggcggcgcggggttggcgagcgagctcgctaaggctcagagtacccttgccgacctggggcgcctggtgcaagatcaggctggggagatcgcggcccttcgcctcaccaacgaactcgggcccgggcagctctccgacgccgtcgctcggctggagcgcgcggcgcgccgagtcggcgttcccatgcgccagcatagccaacttccgcccacacaaccagcgctcgcgttccggttggacgggctagcggcgggcctggagagactggaagaggaggtcggcgagaccataaagtcctcgtcagcttctttggcacgggccgcggtggagctggttcttgcaagccaccaagcgcgcgaccccgacttcatgccgtggtgcgcacttgaagattttcccccaggaactgaagcgagggcccgggagcaagttcgggaggcagccgacgcgattttctcgggcttcgagggatcggccccccgcttcacctccgggctcgcctcggacgaagaaagcgggagcgggggtgacgatagcgacgaagactaggacgacatcgtcagcggcgccggcctcggagggccgggcaccccgtgactatccgcgccttcaattccctcttgttgtgcgcccgtagcgggcacctcttgtatttaggccgtcgtgccatcctgccttgttttgcaattgaaacttgcttagctccttttcccctttcgcttcttctattcattgctccttccactgaatgtctttgaaacagagagaacaacaaacaaaaaacaagggaaaaaggggataatcagtccgtgatcgagacgccgctttgaccccaccccccctcgggcttgttctagcgagatggtgaatccgcgtttggtccagggcacctaagtggtgatggacaaacccaccgctccgagggagccgcctagcgggactggccagaccgaggccgcgtcgaccgggggtcggggacggccgtgtgtaggcccttccgatcctccggggttcggcgcaacccagggcacggcccgcgttcgtgctccctttcggggtttctaggccgcctcacagcacttaggattcagagcaaacgcagattaccccttaaaccaggacaagccagaggaagggaaaaaagaaacggtctttgggtaaaagtacacaagaattcattgcttgtaagaggaaaaaaggatacacagtggtagcccccggccaggcgcgcacaaaccgaggggttgtgcgggggctggcccgagctccaagaaagcaaaaaagtctcgatattatggatagaagcgatggaggtgttcgatattccaggggttaggcaattctgtgccgtcctccgtggttaactgtcacgcccagaaatttagcccaaatttccagactattttgtgtattaaatccctgtccaggaccagccagggtacacaaaacgacaaataatatacagttccaaacgtaaataaagcgtaaaatacttacagaagaggcacttagtcctcacaccgaaacaaaagcagcagcagcggaaaaaggcgatcctagcggggcttcagctccactccacaggcaaaactcaactggggtctgagccttggtcctctaacttcgtcttcagctcagaagcactacacttctgaaaagggggaataatagcaaggctgagtacaaccaccgtactcagcaagccacaccaacgatgcagacgtgcaaggggaacacaaggacggtttgtggctatttgcataaaggcggttgtaaaacattttattgagcaaaacagtaaaacagttgagtaattaaagtaacattaaatctccactgatcaacgctacaccacgttgaacaggcccaaccaacccacctggactacagtgtattgggtcgatttattaagatgggactaatcacggtgaatctggtcgaccgcccataaccgcgggcacggctattcgaatagttttactctgatcagaggtgtacaactgtacccacaaaacacagccccacgacacgtttccgtgcgccgacatgccaccacgacataccggaaagaggccgtgacaggacccttcgcataaccccctctaaccgatcgcaccacaccttagggttcgcccccgtccccagcaggcaacgggcagcccccctttcgtgccgcggtgaatccggaagccgatcaaccggacaccccggccgacccaactccatcacgcccaccctcgcctgggtacgtcggctagagaaaagctacactacaagcccagccgttgcccacgctggcttgtggtaagtacgataagttcttccagggcatcccgcgaaccggtccttaatcgccatgggcacgtctagcaaaaccatgcacccacagcccaccattcagttgcattttagttggataattacgaccatgaagcatggccagatgtctcgagcacgcagctcattctgatactaaaaggtctaatactgtaattatcccatcaactgagctagtagtaattaagcatggctaagcatatagttctagctaggtcacataagtaacctgagctagtcgattcattacccaaggttgacaaagaacagatatcaagtaaacatggcacaagcgagcagataggtaatacccagatcccatgtaattagcaaaacatgcatatttatttgtaaacggtaaaacatttataaattgggatcaacatgctcaaggggaatgtgtgacttgccttgcttcttcaaaacaatcttccgaactcttttccttgcgaccgcagacttccgaaacaacggattctacacgctggcacgcaaaacgaggaaaaactctaataaaaaccaaggaaatagtacataaaaagtaaacaaacatgtagagctcaattttagatgaattttgcaagttgaatggctcaattcggagttcgaatgaattagatatgaattttagaaggttttgagccattttaatgaatttctagaattattcacgaattattgcgcaattattatttattttctcaaaggaaaaggctgtgctgaggtcatcaaaggggaggggcggcgccggcaagcgggccccaccggtcagcggcacaaaggcgccggtccaccgtggaccgggaccaccgaggcggtccaccgccggtccacgggatccgacggcccggatcggcccaaagccgatcggacggccacgaggcggcgcggctggggcacgggcacggcatgaagccggctcggccgagacatggcgcggcggcggcaagggggaggcggcaagggggcaagggggaggcggcaaccggctgcagcagccggcgacgtggaacggcggcgggtggccggaggacagcggcgcgcacggggacggcgacgcaccccaagaggcggcggtcggcaagaaaggggaccggaaaaaaaggaagggaggagagatcctcaccggaagcggcggccgacgcggaggaagaggacggcgacgacgattgcccaatggcggcttgcgaggacggagggcggacggggtcgcccttgaccttccgaaggagaagagggagttagggagaggaggaccgatgcggggtgactggaaacgaagaccgatggcgatgacaagaggtagagctcaccggcgaccgaggaaggaggagctccggcggatttccggcgaagaggggcggcggccgaggtcctcctcgtccttgcggagctgagggaggcaacggcgcgagtcgacgtcgaccgaagcggcggcgcgacgcggctggaggcggtgaaaggggcggcggcctcgggtgtgcggtgggagtggtgctcgaggggtggagagggggaaataagaggcggccggacttccccttgcggtggcgaagctggcggtggtggtgctcggcgcggcgacggctgtggcggcgggaaacggcgaccggagctcgccggagtgtggcagcgcgtgggtgcggcgtggggagagcgagggagagtatgccgggctcgggaaaaatggggaaacggacgaggggagcacggggatgctttttatgggctcggggaggagaaatcgtggccggacgagcggcaacggccggcggagtggggaggtgaagtggagctcgtggggaggtcaaaccggcgctgtttcttgcggggtgagtgggggaaaaggtggaggacgtggagggggttgtgtccacgtggttggatgtgagctcgggtgcgggagggcgccggattttgcggcgacgtggacggcaatggcggttggggtcggccggcgagaggtaggaggaggagctgacgggtgggaccgctggtcccacctgtcggcgaagggagagaaggagggacgcaaaatagacttttgcgagcgggccaagagagaggggagaaggcgcgcgggccgcgggagaggaaagaagacttgggccgaaaatggcccaaagagaggaagggggaaatttatttgttttctttttatttaaattagtttaatgaactttgtgactttaaaactatttctcgagctccgaaaattcacggaaaattccggagagtacattagggcacaaagaatattacaaaatattcccggccaatgatttttaagggaaaattttaattctcccattatttcacttgattaaattgatttatcttttatttaatttctagaaaatgtattattaatgatttttaatcccgaacgaaaatcggggcgttacaaatctaccccccttacaggaatctcgtcccgagattctgggatggctagaaagaaagctggtgctggtgggcggtttgactgatctgcacattgaactgccacattctgcttcgaactgattgattgactggttgatcaaacctgcacgattgaactggctggattcaacctttctgttcctttgttttgccaaaactggaccgactggttatgcttgaactgacctaggccagaactgtggatgctcctgaaacttacttatcttggactgaactgttgagattggcaattttggtaacctgagaattcaccacgctggctataagaggatgaaaatggaatctggcatttgtaaatcatttaccctatgtccgcttggactggtcccaactcaaatgacaagtaattccaggaaaacctgcttgacctgtctttcgtctgtactacaactgtcctcgctgttgcttctctaagctgaactgttgacatgcttcacaggtgtaccttagaatcgaacctgtcgacctgagattggggtgactctgctaatggttcgcaactgactcctttaattacgaaccaatttgccgcaccgggttgaacctacaactgaaacggcaacgaggttagccaaaactcatctgtgagacctaccccccttacagtgggtagtcttactttcgcctgactgagaacctttgaactgttgtccttgaaaaaatgaccaacatttctcggatttacagatgccctgactttgaagactgaaacttcatcggtccatcaaattgaagcaatggcgatgcactttcatcccgacaagatttggaacttaagccttagttgatgataggaaattccacataaaggtgactctcatttagctcatggacacattgactcttgactaactttcccataagttctaactactggcatgactgtcctgcttctagcttgacttcggtgtcgagttgcatagttgattcctcaaaactgaactgaccgactctgcattggaactgacacaacttgaggagttggggtgtcactaacaaagctcttgatgtgatgacgctgacgccttactgtggaacaaccctctgagaggtgccctgtcgtacatcttccatggatagttggacactttgcaaaaactgctcttgaaaaccataaccactgtaggtagcatttgttgcctctgggattggtggtgacttagctgtgctggtctgctgaagacttggtggcgtactgtctgaggttgcaggtgcttcctctttgaaaacaaactggctttggctctgatcctaattccagcttgcatctaggcttgtgcatgttgttggagacactgttgttgcatctgctgcatcggactctgcggttgctacatcaatatctggcacatccatcttccaatcttggctaaccagagcaaggtgctctgactcagctggtagcttgttgtcttgaactgatccactgactctgactgcaacacactactgttggagttatttccgctacatttgaccaggtatcgaacctgcatctcccacatcgaatacacccatcttctgatcttggacaccaaaagttgatcatgagcagggttcatctggcattggggcaccttgcagctttcaactaaaccattgatctgtggctttaatacaccgtcgttgctcttctctctgacactgaccatctgccgccagaacggaagagaggtggaagagaggggttgctaaagataaggtactaaaccacttgcctattgatctgttgtgagtagatttttatggtttaagttgcttaagcaaacaacctagtatggtcgcatccccaccaatgatgcaaaccatacccctacacacaagcaaacaacacacgatctagaaagctaacggaactactcttctgggaaagattgggtttaggtcatctccgagaaaactccacttgatcttcgcagaacgacgactctgaactgatcttctcgctccttgcacgaagcttgaggcttgacttgacttgactcccgaacagacacaaagctgacggtttatcctccacgttttaacaactataagaattggagggacagggaggagaattttgaaaaactgtttcgcaaagaaaagccgaagggcgaggggagacatttttcaaatagggttttcagaaagcttgtccttagggtttgaccgtttggctcaacctacagtcaacctggctctgataccactttgtcacgcccagaaatttagcccaaatttccagactattttgtgtattaaatccctgtccaggaccagccagggtacacaaaacgacaagtaatatacagttccaaacgtaaataaagcgtaaaatacttacagaagaggcacttagtcctcacaccgaaacaaaagcagcagcagcggaaaaaggcgatcctagcggggcttcagctccactccacaggcaaaactcaactggggtctgagccttggtcctctaacttcgtcttcagctcagaagcactacacttctgaaaagggggaataatagcaaggctgagtacaaccaccatactcagcaagccacaccaacgatgcagacgtgcaaggggaacacaaggacggtttgtg

SEQ ID NO: 9759 - DNA, 17904 bp, Oryza sativa
  unsure (1)..(17904): unsure at all n locations
catggtagagtcagagagcaagttggagaagtgattgcatccttgaagtctttgtgcattttcatacccatctgttgaaaaagtgtggtaaaatgtcaaactccaacataattccgattctctcggatcgaagtactgcctccgtttttcaacatgacggagctagctatagatggtgagacttgccctacaagttaaattaaatagtattagtagcagtggagtacctgattagattacactacttaccaacgacgcatatacctctccaactaatcgacgacgcgtatatttgttgtagtctaacgcaaagattgtcacagtcgaacaatagggagacgcttgcatgtcaagatacatatggaccagttatttttaactcttcgagggagaagcagatacgtgcacactttgtgctttttatatgccctcctgagaagcacaatgagattatatactcagattaaacttttttttcttcaaccaaatatgcatggagaaaatacatgtgaaaaataatattattggtgtgtagaaataggttgcaaatctcgttgaagaaaacgaataatatacctcaactgttcttttttttggttttttttgggggggttgaggaaagggtgttaaattattttttcgtaggctgtatattattttctaaaaagtattaaagtttaaactttgaccattaagtaaaacatattcaaggtactttttctgaaactaaagcaattcaaggtactttttaatacactaaatgcacgaatctggctaattattgatcaaaccatacaacattaaactttcaaaataaaatatacattctcccatctattgccccatctggtgtactaatttgacacatgtcgactatgctaaaaggtagcctaaccatgtactcatctacatctatctatctatctatctatctatctatctatctattctttactaattagacactttgagagagaagtctaatgacccctcgcaaacaccctacttctatttttttccgctcacacggttttatttttttcttaattaagtttatatacacaaggtatatatatagaaacttttaaagtagaaacatcctttaaaagacatttaaatctgagtgatcatacatttaacataatatttgaatttcaatcttaaaataccagtaattatagtccatataatatcctcaagggttggcgactaacacgttgtaatcagcctgaagttatgcttgtggttgtttgggtcactcccttattttgccaaacttcaccaccctttctaggatataccacttccgtcccataattaatatagcaatctagtgtcagatatgacgcattctataactatgaatttggataggggcgtgctggatgtgacacatcttataactacgaatctggacatgcccctgtccagattcgtagttttaggatgtctcatccagtacaaaattgccatatatggtacatatggagtatatttgtttcactatcaaagttatggcataccatagtttttcaattcaaaggcccacatgtcttacacccatcttttagccaaaccttgtctaagaggtgtggccatcaatttatgaccacacctttggctaggttttgtaaggaggtgtggcaatgtttgggagtataatgctataccttaaatacccttgttaattctcacctacttcatttgtttcacattataagatgtttggattttgaatatagttatgcatggatccatatatgtgcttcatatatgtgtccaaattcgtatagatgttagtggatctaaacgagcgatggaaatgccaaaacgtcttataatatactccctctattcccaattgatcatcatctaacttttttggggttattcccaagtgatcatcatattattatcattacataagtctattcgttatctgtgtatgggagtaaataatattggtgcatgtatccctgcacataatattttacaaccaaagtgatgtcttggtttgttattagttagaaaatagtgagaattgtccacatgcatcgagtttgttaccaaagtaaatataagtatatgagagttatggatttttctttttttttttgatcttggtgcgctcctataatacgatgattaattggaaacggagggagtagtgcctagtactacttatactccctccatactcataaaggaagtcttttagaacaatgtttaagtcaaaccttgaaaatataaattatgaataactcttaagttgttgagtttaaaaatgtaaaaattatatatatagatttgtcttgaaaaatactttcataaaagtatacatatatcacttttcaataaatatttttatagaaataagaagtcaaagttgtattttggaaaccgtgtcactgtctttacgagtatggagggagtattatacttaattaactaatctctgattcctgtcaatctgatccaggggcatgacgtatcgcttagctcatcgcgaccggccggaccgatacgccgaagatcaatggtcccaaatccacgccctcaaacttagatcgaccggtccaaatcccgcaggtgcgcatgttcacgcacgccacgacgcatctgcacatggcccccaaacgcccagatcgatcaacgtacgggacggatcaatacacgcgcggacgcgcctcgtctcgaccggtggatcgacgacgtacgcgcgcgcccccccggctcggtcgttcaggagtccttttgtcgctgggggctgggctctatacactactatcatcatttctctcttccaagacactctacggtgacctcatatctaaaagtccctctctctcccaaatccatccccatctcacgcggtcacgcacgcgcgcgcacaccgcagccagcccagccgccaccccccgcgactcgatccatccgcgagagacgactgactgacaggcgatcaatcgtgctgccaagtagtagggtgttgtgcgtgttgcaggtggggcggtgtggtgtggtgtggtgtggtgggacgtcctcgcgatcgaatcaggttgccccatctccactccaccctcctcctcctcctccccctcctccacacgtacgcttttggccagccggtctaattccctctctctcatgcatctagctacctcctctctgtccctcctttgccttttcccccaaccctctcctctctcatctgtattctattgcgaaatagcttagggtattcgcaatcccccagtttgatagagttatatcgatcgaacgtcatacacaccataaatcacagatcgaatggaataatattaatcaaagtgtacgtgtatagtttgtttaccaactgattggatagctatagagctagctaaccgtgttgaaacgatgaacagtggttagtatatgtgtgcgtatacgtatttcgcagcggctacctgcacgtacatgcacgcacgcacaccctgcgcgcaccgtaccagccggggtctcgcgcgcgcggaggagaatgtaggtcatcctgccgcctttaatttaaaccccagccaaagtacacgcatttcgcgcaaccttctcctcgaccaatcgcttcgtcatgcatttcatatgcgtttggtgtacgggtcttccggttaatcgcaagtgtaggtgctttcttgcaacgcaagcctttggccatggactatactatagtagtagtacgtacgaccagcgctatagcagcagctaagctatattaacaccggccggtgtcatttctgacgtgtaaatgttaaccgtcaaattggtgtggtgtgtacgtgtggtggccggacgtccatatctcgatcgggagatgtacacgcagcaactcgcgcgcagagaatccggcgcctggtttgcggctcacgtatacggtttgcattagcaagcccagacttgagggccaagcaacaccgcatcattcgcccggatcgatcccctgcgttctatgattcgctctcgctgttcgcctagcttaattagctatggagtttgattgattgatttattgtcagtttatcatccgcgcgtgttgccgcacacctcgcgacgacgacacacatgacacatatccgtccatgcccatagctgtcaaacgctcattgttcagcctgttaatcgatcgctttagcctttcattttgatctcctagctagctgttgcacgtacgtcccctatagctagctcgatctctctctaatcctagtctcttgctccttttgtggagtgttctttctgtagttgttgcctgcactacacagctgatgcactgccggttctgcctctgcctgcctcgccagagagagagagagagagagagagagagagagagagagagagagagagagagatcagctcgtggcgatcttcctgggaagcgccaaccgaaaagttggtgtgagaattgatgtattctcctccggaaacacttttaatcacctaggtagatacacccatttgttgtatgtcaactaaatgtgtatgaaaaaaattcaaaaaaatttgacaagatagattcatatgtaatatatcaccccacaaatatgcaagttcaaattcaacttctataagttgtaacaaaaataacaaatcaaactctgattagtgtttagaatccaccttcattctcctccttggtctgtaccagatggagatagaaaatcagtagccgcgcgcagcagctgggccgggaaggcaggcagggaggattaggcgattagcagctagtaggagtagcttttaacagggacaagcttcctatagctcccctctcttttctctttgttctccctctcgtcgatcaggccgctttgttccctcctctcctcctttctctctccctcctcccgcgcgcggggtctcgccttaacgtttgccgcatatgggggcgacgagcaaagcgtaggccggagggagggacagggagagagagagagagaggctttctggctcgctctctctgcacgatctctcgtcttgttggattatacagccatgacatggtgcaacagcttcaacgacgtgcgcgccgtggagaacaacctggccaccgccgccgccgtggccgcggccaagaagcagcagcagcagcagcaggtctcccagcacgtcaacctcatcaagacctgcccctcctgcggccaccgcgcgcagtatgagcaggtagctagctagagcttcctccctgctcgatcgatcgatcggtctcctgtgtacatgttggatggcattgagcatggtgtagagtcagttgcaggcagcggcggcggcgacgatccaggacctgccggggctgccggccggggtgaagttcgacccgacggaccaggagctgctggagcacctggaagggaaggcgaggcctgacgcgcggaagctccaccccctcatcgacgagttcatccccaccatcgagggcgagaacggcatctgctacacccatcccgagaggcttccaggcacgtataatatacttacatgcatgcttttcctacgactcatcgacatatatcgaatcagttttagtttcatcagttcatgatctacataagtgcatttgtctcgatcagctagcttgcatgcttaattacattgtgccatcagctatagcaattgcaaagatgatcagatctggacgggacgtggaaactataggtgctgtccgtcacggaagtactcctgacaaaacattttcttgcttggttgattctcagtttaaaattccctattttgatataaagttttactggtcgtttccaatttgatgaccttgcttcatatatgtcaatcatgcgtagccgcttagtatttgtaacatccacactagggtatatacatgtcgatcgtccttgcgtttttcattaatttcgtgtatgtccgatcgtgtgttgttgcatttgagcacgataccgtataaatattgctaaagtttgcctttgaagtaattgcttctcctacttgcataaaagtttatttcacattgaaaacgagtgattgtgacagcacagtgcatcaaaggtccacgtcatgcaggatacacgcaacatcagatcaaagggagaataaactttgaaaagacttgttgcaatatgaactggtttttcccttatccttttatattcctagtatttaatttgcctatatataatggtgtatttgcatgggtaggatagtcattgtatatttgtgcaataaggctatgtttagtttgtgtgccaaattttttttgaactatacggacacacatttaaagtattaacgaagactaataacaaaacaaattacatttgaagtattaacgaagactaataacaaaacaaattacagattccgtctataaactgcgagacaattttattaagcctaattaattcattattagcaaatgtttactgtagcatcacattgttaaatcatggcataattaggctcaaaagattcgtctcgttatttacatgcaaactgtgaattggttttttttcatccacatttaatgctacatggatgtgtctaaacatttgatgtgacggaaaagttggaagtttaaagaaaaatttttgaatctaaacatggcctaagaataactgacagatactttaaattattatgagtgcctttcctgcttttggaaatataatattatattcttcaggggggttgcattccattccacaggataacttgtactattttctaccatagtgatagaaatattgcaccaagagacattatagtgcactgatcatattattttcatggaactctattttcatataagcagttatcaataataaaccacgtgtcaccattgtactatatattaatccagtagaaaatgatatattacaaatacttttatctagcaagaattaattatgattaaaaaaccaatgcaagtggctctttatgtcgtttacaacgcaaacattttttttctttgttggtgctggagctagcggccgttcgtggggtattctcatgggaatattggtgtggtagtctgttagacatatgcgtgttgagctggaaaacaatgtgcatgcaggggatgctccttccatggtacaaagtaattttctttacatttcatagattacagctgacctaaattaattctatctgtaagaaaataattaagccgacaaataaaaatgtgttatttagttcnnnnnnnnnnnnnnnnnnnnnatatacattttatttatattacaccaaatttacctagattcagtggctgagccaagatcaagatccacctcgcgcgaaatgcaaatattttttttactaatagtacttgattgcaaaaattctatcggggttaattgaccttacagggtcacagcatggctccactactatctacattatattataagtactccataatgtggataaggattttctgaagtttatcggtgagtaattctttaaattcaaagatagtttcacccttcagcgccatatctccactaaaccactttaaattcagtccgttgtataaaaagtaatctatttttgatagtttatggttaaataatgtatgaagattctaggattgtctatcacacttttataaaagtttaaggttgtagttaacatgcataatcttttcctttttttacaacctgggaaatttcatttctatgttaagagatgcaaaacacaaatacgcccccacctcctctttaaatataattttattcggtgaaactttaaagtttaaccatcaacatctctcaaatatgtatttaatttgaaaataaaaatcaaaagagcagtttttttaagtacttttacaatactaaatttttgttacacattattgttatactaatagaaaaaaaatagtcaaagctatacgaacgaataaagttggtagtgtaatactccctacctcagaataagtttatttttgtctctcccatttattttaaaataaatttatttttgaacactcattgcactagagtttgtgaaagtaaataatagatgcactggaatgtaggtaaaatgaggaataattgcattaagatttgataaagtgagggtatgtctttttgttttatattggtacatatgggatgagtgtaaaataaatttatttttggaacagagagaatatgtattgaaacaccgagcaagtatttttcttatgatggaaaggacgcaaaaaataactaaacaataacagttcagggggagagagatagaatcagagaattgctggagtcggcccaaaaccatcattaactgggcccattcgtcatatagtttgactgaatggtcttatgctgcgtcagccgtcagccgtcaggacattggaactggtcaactggatactacgattacgaagccactcttgttgtgttgctgacctgctgttgcatgcatgcacgtaatataattgattacatttgcatctcttaactcattcgtgagagcagtggcagtgtggcactctaccatattaaccgtactgttctctttctgccgctgttaatttcaggagtcggcaaggacggcctgatccggcacttcttccaccgcccgtcgaaggcgtacacgacggggacgcggaagcggcggaaggtgcacaccgacgagcagggcggcgagacgcggtggcacaagaccggcaagacgcggccggtgttcaccggcggcaagctgaaggggtacaagaagatcctggtgctctacaccaactacggcaagcagcgcaagccggagaagaccaactgggtgatgcaccagtaccacctgggctccgacgaggaggagaaggacggcgagctcgtcgtgtccaaggtgttctaccagacgcagccgaggcagtgcggcggcggctcggcagcgacggccaaggacctctccgtcgacctcgtcgccggtaacaacatcaaggctagcaatgctgctgctgaacaccaccataacgacggcgtcggcggcggcggccacggtggcaacaacagcagcatgctgaaggaagctgcaggcattgtagatttctacaacccagcggcggcgctaatcggctacagccaggcggctcctaacaacagggcggctgcttctgctcatttgacgatgcctaactttgaggtgcacacaggaggtgcaggctttggcccctgatggatggaagaaaacaaagcaaattaaacatatttgactgatgatatatataggttagatggagagggcagggcaggtatatgatggcaaatgtgcatcatgcatgctagcatggtgtaatttgcatcgagtgaaaaaaaaggagtttactaaaccgtctacgtacgtattactggacaataaggagtgtgtcgagtgagttgctgcacagatgttgaagcgtaggggggtcgatattcttacagtgttcattattgttacatgtgtacacatatataacttgacattctcaatttttttgtttaatgatatatatatatatatatatatatatatatatatatatatatatatatatatatatatatgttgttctatacaaaaataatgttggaattcaatattgtacattgatcgcttaaatataaggacttgctttttcataaatataaaaaaaatgttatgcatgtgtaaagtatcatttttcttattatttagctagacaactagtaagaatatcccagcccaaacaataattctctattgaatttttttcttagtttgacaatctatgtataggtataggaagtaatattttagtatctagtttattaagaaacaaattaacccacaaattcaagacgataaaaagatccacattcttccacctgacagttaaaaccaacatttcccaccagccaagtgagcccaggtgagctaggctcatgatcagagtagtcactgtgggagtgtgttgcaatcggtctcatcgtctttctcgtttgtaccaacaacatcgccctcactgtcagagtcatcgtttcgatcgctagtttccgtcccctgacttagctagaggaccaggttatcttcctcttgttccgtaagctgtgggagcaaagtttcttggaataaatgaggtatcgtgccatcgtcgtgttctgttccctccatattagaatataataagcattttagagttagacacggttattaaaaaaatatatagaattgaatggtggagggttgtgattggttgagtagtggaggtaggtgagaaaagtgaatatagaagagtgttgtgattggttgggaatagaatgatggtggagaagagggctaaaagttgttatattttagaatggagggagtagattttatggtgaccatgtagaaccctccccagtaaatcattattactttgtacttatattgcatttgcatcctcaagcatttattttgcatcctcctcaagcaacactagtttctatgaaaaaggtttttatgtataaaatttctatgccaacttttatgtataaagttcctattgtatactgaatgttgctattaagaagtttcatgtaccaagttttttaatttttagctgggctaaatgtcaaatgagctcagaactctgcgtacgcactcttgtaacccgttgtgggcctaataggcttgaagtgaggccggcacatgggctagacacgtttgcaggccattgacacaacatcccctgccgtatctgcctctcgctcccacgtcttgaacacggcgctaaacttgatccagccttcgatgacaagtggaccaccaaatatatcaaaagagtaaattgcgttggcggtacaaaaacttggcaggtgggtacgattaggtgcaaaaacttgaaaaccaaacgtatactactagaaaaacgatttttcatggcgtcgccctataattttcgctggtggccgtacgcgaaaaccgccagcaaaaatgtaacgagtgatggggggctacggaccgccagcaaaagtatattttccctggcggccacgctaagagatccgccataaaaaaactctatttttcgaggcggagcacttaagcgtccgccaagaaaaatcgtgttttcactagcggctactaacacctccgccagaaaaatcgtgtcttatctccacccactgcgtctcctctgtccttgtcacgccccgaactagtcccgaccggaactagcccgtgacgctccaaattaacctgttaatcgataccagtcccaggaaacagtgctggtatcacagggagacagagtatcacagcaacagaggtctctttattaaagagtagaagtatagtcatgttgggctgcggacagatcccgagctcacaactgcattacaaaaggaaagcggaagccaggacttggaccaatcatcacaggcacgacttgggaactaggccgaaaccctaaaactcatcgtagccgacttgctcctggaagaactcctcgtcagcaggatccacttcatcttcttcagcaactggggggggattatttatatagagcaagggtgagtacgggagtactcagcaagccaggggaaataagtgtttaatgcaggcttcaaggaaaggctgttatttttgcaatttattttatttgaactcttttctaaaatgattaggtgagtgcttctcaaacgactcggatgagacagtgcgtctcgtccggtcggagtatgtgcaatgtgtcactctttaggattgcaacaaggttggcacccggccaacagcttttcaaacggccacccgggccaacaacttttcaaacggccacccgggccaacaacttttcaaacggccacccgggcctagctgatcccgtcagctgctgatttttcaaacatcgaaccccttttcacaacagcaatttcacaagcagtagtcaaacaaaactacgctaggaatcacctcacatccgcccatgaccgtgggcacggctgttcgaacagtttgttaacctctgcagagggggtacactttacccacacgacattactaacccggatcacccagcccgtggggatcagccacgtcgggagacctccaagctttcatgacaaggcattttgaaagccgatacaggtttaccatatgccaacgagaggggtcccagaccaacaacaggttaggtcccagaccatactgtgccaggaagcccaggggtcctccccgacaccaccccggcgaatccacatgtctctcggcatcaaggctcccctgataagctagttactcagccaggggtgtcccattccacccatgtggtcgtacttatcttatgtttggatgaaattccaaggaaatcggtccttaagtgcgagagcgggaaaccgtacacccggtacgttccccggtccgcggttctggaaattcatttagttcgcaagcaccgacccaggtgtcgggttttccaaatctttcgtaaaacccaagttttacccaagttgttattcagattataagtttgaaggcgtccgtcgatactcgcacaggatgcacgaatatcaagacgcaactaggtggttacaaggggacatgctgtaacaattaacaaggaaaggatcaaatgcaacaatttaggtaggtccgccaatctgccttgcagacggaacaatagattaagtgcgatcctatcaatgcataatattttgcaagcaatataattagatttcaaatataggctcaagatgttcaaaggtggcttgccttgctcgagatctggagcttgatcctcgaaatcctcgcactgcgggtcttcgggctccggaactacacgcgaaacggaacaactcaacaaacggcgaaaataaagccctattaatgacctctaagcgtgccattagatagatctcgagatttgaggaattttggaagttgaacggagtcaaacggatttacgggtgggaagatattgaatttctaagattattggatttttggtctaacggaaaaaggatttaattaaatcctttttggaaaagaaaaagaaaagaaaggagggagggaatatagacttttctcgggtggctagggtgcggcccaagagatttggggcagctcggccgagcttaacggaccggccggcccaagacggcccaagcgcgcgcgcgcgggagggaggagagagagggagccggtggaccgggctcaccacgcgtggtcccgggtgggacccgcttgtcagcggctcggctcaccgtgcggagggtgcgcacggcgcacgcgcgcgggcggggttgggacgcggtgcacgcgcgcggctcgcggtggacgcggatgcggcgggcccacgcgcagcctcacggctcgcggtggaacgcgcgcacggggagggaccgaccggggtgggctcgacccggtctaggctgagctggcgccgacgtggcgcctacgtggctgccacgcgggccggcgggaggtagacgacgacccggccgcgaatggacggcgggtggcggcggcgagcagcggagcgaaccacggtgatacaggcaaaagcgagcacaccgggcggctgcacgtgacaaggggagacgagccaacggctcggattcgtcggaggttgctcgacggcggcggattgcggcggcggcaaccggcggcgggagaagagggaaacggcgacgaggtcacgagaggtcgattcccggcggtgagagcatctacgcggcgtcgggaactcgacgctagcgtcggattgggcggaactacgccgagcgaggccggcgacgagcgggtgctacggagctcgggcggcgacggcggcgagcacacggcgagcgacggcaacagtcggggcggcgccggctaactacggggaggctactcgagctactaccgaaatctaaggggaggagatggagcgaggaggaagaacggagggaggcactaccgtgcgggacggggcgctgtgacgagaggccgacggcgcgggagtaatctctccggcctcgggccggggaagaggaaggagagggcgcggccggagtcctcttccgcgtccttgctcgtgccggctcctccgacacgcgcaacgacgatcggcgacggcgaaacagagggcggcaatggcgcggaggcgaaaatgagagagtttggagggggagggcttgggcttaaatgggcggcaatgtcggtttgggcgagggaaaccgacattgaacggtcaaggcgcgagctggcgctcggcgcttgcagccaaagcggcggcaggaggatgacgccggcgaggaggaaaaagggaaaaaggagggggagaaaggggcttgcccctttgccgattcgggaaaaaggggaaggggagcgggagcgtcgcggcagagggaggaggggcgcggctccgtcccttggcggcttgcgcgcggagtggcgggggccgggcgatgacgacgacgatgacggggggacggcttggagcggagcggcgacattggcgacaggcgcgtgcagaggctgacggcggcggcgaccgggcggtcgaccattcggcacgcgcgcgcggcttgcaacgggcggcgtccgcgcgggcgcgcgcacgcgaacacggcgcgcgggaagcggcagcgagggagcggtgagggaggacttggctcggcgcgggcggcttacgcgtgctggctcgcggggccgagcggaggggcgcagggcgcggctctcgcgctcgcgcgcggcgcgcgagggaggggcgctcggcgcggcgacacgcgctcgcgcgcgcggcgcggggcggagcggagggagagagggagagagcgggggcgcgccggggaaagcgagagagagagccgggagagagaggggaagatgggccgagggaaaatcggcccatcgaccctgggggaggcaaaatggacttttgcggaggaatttgatttggagggattggattcggaattgaactcgacgatagatcggggattgagatcttgagatggcacggacactagacaacaagcaaagaaacaaatttcgcaattagggtttttaagagataattttcccgctaggcgccacgacggaacgggcgctacagtcctctccacccacctctccctctcctcttctctccacccacctctccctctcctcccccttcactccccactagcagcggcgacgagcccagcagcagcagcacgcggatcgaggcggcgcccgtgcgtcgcgatgcggcggcgctcgtgcagctcacggcggcggtgcccgaggcggctcgcggcggatccggcgacgggaccagatccggagcggaggagcacacggatcgaggcggcgcacctcccaggtctctctctgccaccaccacacactctctctctcagatctggcgcacgggccacgatggaggctgcggcacggctctgtagcggcggtggcgaggtggaggcggtggattttttttaagaacaacggatgaatttttttggtattttattgtgatttgtgaatggatgtgttaatttgtggtgattttgtgatttgtgaattaatctgttgaatgtattatgagatttggggtgaatttgtgatgtgtgaatggattgggatggttgatgccatactgtagccacgtgctaatgattcaaatttttgtgatgctcatgcttgggtggatggagctttgatggaggtggaggcggacggagcgttcgctccgttcgtcgttttttcttataaacttggtcagtattttctctggcggctggtatagtgtaaccgtcagaaaaaaaaacattttcgctggctgccgtcttaaaccagtcgccagcgaaaatggatttttgctgacggctggcttaaggcggccgccagcgaaaatgttttttcgcttgtggtcgataaccgctagcgaagatcttgattttcactggcctttgctttgtggcggctccaaattccgccagcgaaaacccaaaatagccaccacgaaagatggttttcgtagtagtggtagcggtacaataacttggctggctaggtgggtgcactcatggtgcaaaagtagccacgtaaaagaaattgccaccttactattccaccttagcaaaattgccacatcagctttgacatgaaagaactatctcatttcatagaaaacccctaatagcttttttttttccaatcacattcctttttaactcaataaacaaaacaaacgtatgcatatcttcttccatctttcttgacgtgatcctaattgagaggtagctgcggtggtggcggtggcggtggccgcgacagcaacgacaacgagcgaaaccattacatcgcggtggcgatgagggctccgtgtgtcacattagttcaatccctaaaccaataaccaaaccaattcaagtcgataaattgctgctgtcgacgtgatcgccgcaagctttgggatagctccgactcgacgagtttttggagcatatgctcctagcttgttatggtaaatcacttgctgatggttgtagacttctattttttgttcatttgatggatgattgcaaagtaaaggtttcattgatctatacaatggctgtattttttttgggttttcacttgaatatcatattatttgttattacaattcaatgaagtgatctaatggtactagccacgagattggttgcactaaaattattggtgtttcctgtagctgtatacgatataagagtaacattggcaatgagaaattcttgctagatgtgttgtaccattatcagcagcatatagttagttggataatctgcaaataatcttagtgtattattttccttatgcggtatatcacatcaaccaattattttgtagtgcaggccatgagaaagaagaattcacaattgaactgcatcatggtgggtttttctttttttggagttggcagtagtagaatttatttggatgagaagatggactggtttgatcattgcgacacgaggaaaacagatacatctaaaaaagaagtaattgaaatataaaagttactagggacttttctgtaaaatgataaggtcaatgctcatgtgtcactttcgctgaggtggaacaatggcgtggcaacttttgcaccatgagcgcacccacctagccaagttattgtactgctatactcggcttttaagtttttgcacctaattgtatccacctgccaagttcttatacagccaacgcaaattactcatatcaaaatgtgcgtgggaagtgtccgactccggtccaatccatgatgcatgaggtagatgagtgcgtatgtcacacaaattaggggctagttggccacataatcacatatccgaagcgcgaaatgcacacgctttatccgatatcaaaccaactgtaacagatggcagaggatttgcttcctagttcccaactcccaagtggccaacacgaaacatctttgaaggagaacttcagaaaaactccccgcgtcgctctcgcgcgggcggctcggggggccaaaaaccctagccgcccacgcctccactccttccccctcacctcgccgctgccggagctcgccggcggcgtgtaaggaaggcggcggcgaggcttctctccttcgtggtgttcccctcctcggcgcgacgtggacggggcaccatccctcaccagcgcggtcagaggcggtggcgcggctcgggcgaggcggccacggcggcgaggcgtggggaggcggcggatccggcgcccccaaggccgaatccggccacccctcgcctagatctggcgcgccggcggcgcgacgcggcttgaggcggcgcggcggcgtgcggctacagctcggtcggcctggctcgagcgcggaggcggagggcaactgcggctcaccggcggtggctctgcagggacggcccgagcgcggaggcggcgggcgcctggggcagcgtggtgcggctagcccgggcgcggaggcggcgggca

SEQ ID NO: 9760 - DNA, 9292 bp, Oryza sativa
gggaggcgctcgctggccatctgcgcgtggggaggggctcgccggccgtccgcgagcgggggagaggctcgccggccgtccgcgcgtggggagaggttcgccgaccatctgcccgcgggggaggggctcgccaaccgtctgcgcgcgggggaggggctggagctcgccggtggtagggagcggcggcgaaggggaagaagggaagagaaagagagagaagggagtgagggaggaggaaggaggactgacatgtgggccccacatgtcaatgggcccatatttctttttgtgtgaatgactaataggtcccacgtatattttttatttctaccgtcacgtagatgccacgtcaacgccacgtgtaacaaagactcggtcaatattaccacgtaggcgccacgtggcgccacgtcagcaaaaccatctcccaaaaccgctcagggagtcaaattgcaccggttttagaagtttgggggttgagatatctggttttgtagtttagaatcatggtttagatttcaattatatttgagggtcatggagtgaacttattccccgcctgatagctcgcgtcgcgtgtcccgaggcacgcgcgtgcgcaccgccgcacagggcctgtttctcagatgtgcgcgaggaggagcggtgctgtgtacttgtgtgtgctgatcgcgattatattgcgttgaaagaattgttagaagaggataacactactactacagtagtcaatcgtggtagtcatgcactacactgaagtgactgatcactgttgcttgcatgattggattgactatttagatgccgagtagtaattcggatatctcatcgaaccaggttacaaaatgcatgagagcaagttgtttaatagtatagccaaatactggctccaaatcaactgtagtcaatttaatagtcaatttatacaatagtaatatataaacatatacacaatagtaatatataaacgtataccacactattagtttatggtcccacatgtcatacatatatttcgtcttggagcccgtgctgcaactggctacaaatctgtagcccactgctcatctctatcttctttcatctactcgatatgtgtttatagctggcatatagcctactattgtatctgctcactaccacacttgagaactaccctgtgggctgttatattttctatgggttccgcaaccaacccacaggaatatgtatttttgtgatggttctacttatccctacagaataattcatttttctggcggtgcggccctacaggtaaatgagactaaggagaagagagagataaccctaacattcgcccatcccccagaagacttcggcattttcttccccaccgctgccaccctcccatcctccgccccctcactggatctcgcccacgacggcctccgctcgctgactcaagggagcatccaccttcgccgcacctcctcgccctaacgccagggagcagcgtcggccacctccccgcgcctcgtcgccccgacgtaaggaagaagcgccgacacctctcttgcccttgtcaggtgaggagcaccatccccgcgcggccgcgcccctcgtcgtctggctttggccggatccactctcccttcatcttatgtccgttcgggcgggcaagcgtgaacccaccgagtatgcggcgcagctcggacgcatcagatctggcagcccctggcacaggcggtgccagatccgtctacgagggccgaggagagtgggcgatgcctccttccccctcctcgatgtccattgcctcatcctcatcttgaaagataagcttttttttttctccaaattcttgttatcctgccatggcttcagatccgtgctccccaccgtagtggctacagattgggaataggctttccgatctagtgactagagatattgggttcgacttgctaagatccggtgatgcctttgctttattataactagccgggtggcccgcgcaattgcgcggctagcacccaaacaaatcatatattttttaatatgattttacttataatttattaaatagccatctcattgtcttaagactttgaaagaccaaatcttatcatccccgtgtttctaattatatagttttttaaaagtcacaccagttgctaccccttatgtcatcttcttctttatttgcttgctcgatctaccactatttctattcattctccttggaacctttaaaaattggatcttatagtttttagagtttattatcacgttgggtttcgtttttataatttctagacatccagttaaacattgccattatactcctctatggctcgtccactgtctcttctatttattgtcattgagatttttaaaatcgaatataattatcgtttagattcatttttactttctagaagtcccgccaaaccgtcagcggctttgccattgtacttctctacggctcgcccgttgcctcccttttttattgtcattgagattttaaaatcgaacatgattatcattattttttttactttttagaagttctgaacctttaaaaattgaacattatagtttttagagtttattgtcttgttgggttttattttttataatttttagaagtctcgtcaaacgatgccactatgctcctctatggcatgtccgccgtctactctttattgtcattgtgattctaaaaatcgaacataactatcgttgggattcattttttattttctagaagtctcatcaaccatcggcggctttgtaactatactcctatataccccacccgctgcttctcctttttattgtcattgagattttaaaaattaaatatgattatcgatggggtttattttttttactttttggaagtcccgtcaaccgccttactcgtttgcttcacggcctgcctgtcgtccctccttttaatcatcattaggattttatttggtgttttattaacagtttttatatgtcgtatcaaccaccaccacgctactcctttataggcctgttacttaatttatctcgtcatgtgttttagatggtcttttctttcaatagtctttatttttatcacaaatttttgttatttataaattgtattcctaactgaaatcttatttttctttttctaattcagaatttatttttttcaaattttaattaatatcgtattgtgttcttttaatttttttattttttattttcaatttcagttgttttaaaattttattcctacttgaactctcttttagtttttctaattttagatattattatatttttttattctgaattttaattaatctcgtattgggttcttatatggattcttcttttaatattgcttatttttaatttcaaattttagctaattttaaattgtattcctacttgaactcttcttttttttcctaatttcgggttttatttttatttttatcctcaattttaattaatctcgtattgggttcttatatggactcttcttttaatattccttatttttaattccgaatttcacctatttaaaaattgtattcctatttggactatccttttcttttttaaattttagattttattttatttttattttgaattttgattaatctcgtattgggttcttatgttgaaacttcttatgtggtgtctcctttcaaagttgttttaataatatcatagattttagtagtcaaagctttgtcattaaaattatgcattagttcctatatctccttatttctcatcttatttttcgtggctaatttattgtctgtagctagttgcacaaatatctcctcgtttaagtctggttagtgtccagcacaagttgctcatttttctcgattggttgaagcatctacttgagtcgaatgttgcattaaactagttagtttgctcataaccgatttgttgtgcaattttgagatggaatctgaagtgatttggggtttgaggggagtacaacgtaggtgatacatatgcttgactttgtcttgtggacttatttaactactgcaaactatttttttttcacttggcatgctcttttttgccaatttgctaacgccattgctgtccttgaaggtccttagcgtgagcaggcttggcgtggcctaagcctttattcctcttctgacagaatcacaaactgaggtaaatcacaaattaattcatggtacattctacttgtatactgcatcattgctaatcaattaggaaaaagaacagaagtggttgatcctaatgacaatgcagttactgaagctgttgtgaaatatggcattaaactagttaatttgctcatgaactgattttttgtgaaatgttgagatggagtctgaagtccaatgttggggttcaagggttgttctatgtactggtgaagtggtgacacatatgcttggccttatcttgtggacttatttaactactgcaacagattttttttctcttgccatgctattttttgccaatttactaacgtcactgctatctatagtatgcactgaactgaagctgttgatgcaccatatattaatgtactgcttgtttctagaggtagcacagtgtacttcaatgtttttgtgactcgggaaaatttatgcatgtcagaattgtcttcagaatttctcaattgacacatcctaaaatacttaatgccttatttttcttgttcctctgaatatgtcagtgaaggatatatagtttgtgcaaagcctgttgcttaaaagccccctcctcaatatgtagcatttcaaagacatacaaaagatgataaaatagctagagcttaaatgcttggaagagggataagttatctgcatttgctgtttcatctacttgtattattggtactggaagttgtaactcccataactcgtaacttacagtggtgataaaagattcttgttgaatgtaaattggttataaacttataagttacagggctgaaagtttgcttgtattttgatggatgaatttgtgtgcatgtgaattgctgtgtatatatatataggaaacaactccattgctataatgtgttgagaaagtattgttcagtaatccatattgacatatgaactgcattgttggttttttttttctgccttgaagttaatttttctgacggttctacctttgtttttctgacggttccacgtcaaaattatggggacaaaaacgtgacggcagtggattttttctgtgttcctccatcagaaaaatacccacagaaattgtttttctgtagggaaaccgtcaggaaaatggaatttttccgtggtgatttttctgtcggcaatttctgtcgattcacccacaggaaaataatttctgacgggaaaactatttttctgacggtttcgctcctacagggtaggtcccaaatctggtagtggctctgataccgctatattcgaagggcgtacccagccttagctaaatcttatgctacttggagttctagaacaaacagaaaaggtgctgaaattaatttgaagagagagtggcacagcgcaaaaagcctgaaaggccaaaatgatagccacattcgctgcatggccaacttaattggttagggccacgtaatcagcttgggaaccactgaaacccatttgacagggcaccagtcattacggtctcctggttttcctctcttccctatctccctaggacgacggcggtagacatagagaaggacgacggccaacggtagaggagctaggcaatggcggtgggcctcgatggcatctcggagaggggcgatgtggagggagctcaacttggacctcttatcacgtctggtgagagatgactcagagtaagccctcttcagcaactagagggtaaaaaaaagaggaggaaacaacgagcagccggcggcaaagtacatccgttgcgctccccatcgccgttgccgccactgcgaactttgatttcccaagtccctctgccctgatcctcctttgcgccctctcgagctcgtcgccatctcactcatagccgttagtggcgccaacagtctttcaagcggatcttagcagacgaagcgcatgcagatgacgactgaccatccccattgattccccttatcgttgtcagcatgcaacctcctcacgcgcggctagatgaggttgctcacgagctgcgatgtgactcccaaccccgcgtgacggcataacatccgatgaacacccagacaacgagaaggccaccatggctagttcgttacgctctatcgccgcaacagtccatgtcctcccttttcatccccttcccctacctcctcctttatgatatcctttcctttttttggcgccgttgtccctgagccttccctatagccactgccctggagagatggtgaagaaatggggaagaatgtaagggccctgacataggtttcatgtggtctcacggccattttgactacagtcaactcaccatgtgagtgaaaatcggtcaaaatactgtcctgcgacctcgggtactctggttgtaagttgtgggatatgttatatctggtattaccattcaattacacgatgcaaactcgaagttaaaatgagggaccaaaagtgcacttattccgctgaagtgctgaacattggaccgatctcctttgtgcgtcctaaccgatccaacggctgcccacgcacacgtacgagtaacccagttttatttcggcccaactggtgcccaagtgcccgaccgcgcgtaggtttgctattgccgccgcggatagctctcgtggccgccacggaacgaggtccgcgcgctcgcgattgggctggcagatggatgcctggaagcgttggaagtgggctcatatattaggagaggaacatacaagtcaatagtggtaggcatgcacactgaagactgaactgactgatctgaactgttgcttgcatgattggattggttgtttagataggagtacttggataccttaatcaaatcatactacaacatgcatatggtactagagttctagagtactctctgtatttattttgcgatggagggagtagaaagcaaaggtgttgagattttctttagaagagagagtgccacaacaatgtcttactttttttttcagattattcattggattatcaaaacggattatttggtatatacttttaaaaagaatatgttttctacaaactttttctactatattgcttagatcactcgttttaacttttaaactctttttaatttatttttaaaaatattttggttaccccttaaaacccatcgcaataagctgcaaaataatctgaaaagtacggggtgggtttgaaagtttatactttggaatggcaaccacattgctgcatggccatcttgaggagagataaagactcaaagtattctttccatgaggttctacctcatgttaaatttcctctaatattcacatgggaagaggcatttcataggattccataggatttattcttttgattcaaaaggctatataggaaaaaaaaatcatataggaatgaaattccctaaaatttttatgaatttcctttcaatcaaaaggggtctaagtttgctagccaacaatgagatggctagctactcatagacttactttgtacggcaaacataaccaaaaataccataattagaaccatctcgatctaagctctagcgagctacttcaaacctttcgccactagcgcgcagcatgtcgttcttgttgctttcctttcgtagcccttgggctacggtttactttcccgggttatacggctcatcagagttagcagtggggcataatccacaaactgccttgttgatcgtcgaaatcacaaagaaacacgcaaaattctggcgtggcggccgcggggaaccgtactgcatgccggcaatacggcgaagaagcaccggccccagtaccgtgtggatgcacggcatcatacggtacgaccgaccccgccgggggctgcgctgatgaaagatgcgcttaaaccgggggggagcagtatcagcatcagcagaacgtgacaccccggtcccgcgcgtcatagtcgatccaaaagccccccatgatcctctcgccagagcctggcaccgggccccacatatatcgcccgcccaatcgagcggggccccgaaaagtatcaggcacaggagacgcgatgcgttcgctgatctgaaaaagataaaaaggaccaacgtacgcatgcaaccgcgcggaggagaggaggcgagcgtgcagcggggcagagctaaacacgaacgaaagcccggtggtggcgagttggcgactgagcgcccgtgtacgtcgctggattccccgacttgtcaccgttgcaggcttgatgtcccccgctgcgttcgcccgacggcgggggccgtccgcacattaaccgcttgtgtaagtgagctttatgcgcggtcgtcggaagctagctagcaaacaatgccttgactgttgggggcgctttgggagcagctggcgcgcgcgtggggtcttctccggcgaagcagagcggacaacgtgtggagttcccaggagagatcgagcgagacgccgagacggacacggtcacgcagctttgctgctgatgtgggggcttcgttcactgcgtgcactcggtccgtggaacagtggattagataagaggctccgacgcgagctgatcggacaacggcgtccggctctccgaaaggccggctggagtggagtggagtacaggagggttcagcacagcgccaggccggcttaaacatgaattctgtgagaaaattttgtcatcgatcttcatctcatctctttaaacgtgtattaagagtagttatacctacgggtgtttgctgcacaggcaatgaggtgtatgtgtgtgcatctttctcgaaaaatataaatgtactcgtgctgattttaaatataccatgtaagttgtttagacttgtgttgtgtatatgaattgagaaaacaacttgcttactccttgtttttacatttctgagatttacgagggggatactaacatagtaacatttagagtatatttcattttgaaccacttttaataaccactggtagagaaaccatctttggtcggtcgacctatatccacaatagtcccggttccattaaaaaccgggactaaaaatgatttttagtcccggttaataagaggaagatctttagtcccggttgttgttaccaaccgggactaaaaatcatctttactcccggttgattccatgtcaggctgtgtcagggccctatgatctttagtcccggttagtaacaccaaccgggact

SEQ ID NO: 9761 - DNA, 11241 bp, Oryza sativa
tggaatttttttttctcactggatcattcgaatcggccgtggtcggaagcaccgcctttttcctccacgctagatgcttagtgcgcgaggaagtccaacagctggcatcaaccatgctcaatctaacagctccgtgctccaggccatctcgcctccacgggaccatggttccgcccttgtctctttctccctgagatcgaactccactactgccgccctccaacatgctcctgcagccaccctcgagttcgctcccgcagccacaatagaccgtgccagctgccgctgctgagttcatcgactacaccatcctacacctcgcctaccgctgtgccatggaggatgaagaagacgtaggggcaagggggaataagtgacggaagttctaacggagtgttaaaagaagtaacggagatcacttttgatgctattgaagtgaaccacaaactttcgatgctataaaaacaaaaacaagaactttcgatgctatagaaccaattttaccttatttatatgattcatgttatgacagtatgatacttgtgtgtttgtcagtatatctgattgtctgtacagatgcatggatcacatacatattattttgcctttgacccttgatacctctttcatttatcagctttgcacctcaatatcacggctgatgttgtttcacttccttgtagatgttgacactgctggaagccgcaataaaacgggaccacctatcttcagaatttgaaacaacatctgagttgcttaacttgaacacacaagataatccatcccagaatcatgttggattgtctggatctgctgctgtacttccatgggttcctgacactactgctgcgattgcactacgaatgttagacctagactcagcagtatcatacatgcaaaatcaaaagatggagagaaatggtggagatttcatggtaagttttcatgttagacctcaaagtttctgtgctctggtaatcatatgtactagatgttgtagtttgtctgttaacttctccggctactgcatttatacaattaaaccatgaaatgttgtcatatgttagagattatgatttatttgtacattctgcactttgttgtttgtaatgctaccatcagtttcctttcagtttgtaaattgtttcctctgtttgtgcagaagcctccatcaaggtttgtggctgttaagaatgcacaagaattagatccactggaaacaaccggtttagacctttttgatggaaggtgggctactggtagtggccgtaggggtcgtggacgaggaagtagagggggtagcaggggaggcagaggccgaagtcgaggtggaagggtcccaagaggtattagcatctcatctaggattggatttaaggatgaaaatgaagcctcaaggaagaacactcgtcgagggcgtactcgtggccgtggtcgtgggcgaggacgtcgaactgttaggtcacggcaaccatctgagggcaaaggcagatcaattcccaaggaaaatttgttggggagctttagcatgcttagcaatgcaaaggctgccactgttgaggagtctccaaggagctcaggtgctgatgaatggggcttggagaacagaaggccatatattgatggtgatgagaacagttctggatctcagttagatcaatcagaagataatgaggaaaatggccaacccatggatgaggaatatgatgagcaggttccagattattctagaggctattctggtggctcaggccccatggcatgatagatgatgatgtgagcgaagaagaggatgaagatgtggagggcgatgatgatggggaggaagatgatgcggaccgtgcagttgatgatgttgatgctgagatggacgaggatgatgatataggtgatgatggtgaggatggtggtgacggtggtgacggtgtggaggcgaatgctgatgaagatgaaggcggttcctcgtattcatcggagtacagcgactaagattggccagtagaggccttagcgtcctatgccgttatccctaaatttccaatagatgtctgaatcaagtactgttagtgggcattacttgcccttgtggttaaaatgctagacgcggaccagaggtctgtgtgatagataggcatgtagtactgatgttcagtactgcatgcttcttttgattttcggcgtagccgagctgcccaaacaaccgggtagtgtgaagctgtactttgctggtttaaggtgttgggattgatgcgtacaatgtgccaaggcaaagtaccaagtttacctgaatggttgcctttacatattgttacaaaatctcttgcttcgttacatctattattatatgctttaggtactggactgctgggtatacgcttggagaagcctacggctacgcgcatcatgcgaagtcatgtgatggaggaagattttgcctgtaattaagtgaaggtagggaggcgcgaaggcgaagctaatgatttagcaatcaataggttgtgcaagaaatgaaattttagtcatctgttattcttttacgggtggcaatggtgcaatcatttgttctgtcgatacgaggttagatgctggacgtacagattttttttttctgtgcttaatttgtctgcatttctgcattggacaaatccagctggagtagcgttgacaggaaaatcaatgaagaaatgtgttgggaggagaggcaaccagttccctgcgacgtcggatatatagactggagtttctaggcatgtacctaaggaatatatttagaaaatactcatacatgatatgctttgaagtatgcacatgtaatgtaaaaaaaaaaccctaatccatcggatatataggtagggtttgtctatttttaggacatagtagtacctaattatcctagtgtcgatggaaaaaaacaagcactgggagttctgcttagctccagtgcaggtccaaagaattgctttcgagttttgagcgtgctatttggtttgatcctgcaaccaacaagaaaccaaagatgaaacaaagttaaatctataaacaacagccgatcggctgggttgccgatgacgtatcgttcagtattaagccgatgtaacgtgccgtcagaaaaaaccatgggattagattgaacgatttaaaggtgctgataacgtggattaatatggagcaagctttataggagtaaatactctagtgggtaccaactatataggaaataggaaggagggataagtgactaaaaaaaggttcttttataatccacgagaccacgatgatgattcggtgaaaaagctgaaaagaatctgaaaacatatttgtttatttcttgtgagaaaaatgttttcaatgtagtactatatatatacctccacattactttttactaggaaaacatatttgtttatttcttatgagaaaaaagttttcaatgtactatatatatacctccacattactatttactagtaaaaaaacgtgaatattaggaaatgacctagtatcaaataattagaagggaggaggctttaaacccagaccgactagcccaccaccttgtggagctagaacaaagacccctagacgtttctctactatttactagtacatacttaaaaaatgatcacttattttgaaatgaattttgaatgcaagttattttgtaatggagagagtgcttgacaccattgatatatgttgttttaactttgactataaaaatcatatttgatgtacacaaatcaggtggttacatttagcatgtaacgtaccttagtggttaatttattaaaaaatttgatagatttgttgcagtactataaataaatatatccgtcaaaatctgaatagaaataacagctggtggcaaatgtttgggaacaaaggtgctactaagcaaaagcaacttctgttgcccaatgatgacgagaattagagctactcctgcacaaccacccgtacaacgattgatgcgtttcatcatacaacaactattataggacaaagaccgttttgagtcgtcatattaatataataatccaatctggtaaggttgaacccatcagattagggtagctgaaaaatcgatcaagtcaaggtcctgtccagagaagaagttattcaaacgctctaagcaacctttaatcctttttaagtaataccctgcgcgtcgtttgcgcataccggccaacctgctcggctcaatttggttgttggctctctctcgaaccaaaagcttaacgaattctcgcgtttcggatcggatgccgccgcgacgaaccggccttctaaaaaccgtgccgtgttacgtcccacggcggcgccagcgacacaagcaggtgaaggacgacagaggacagacgccacgcagaaaaacgcgcgtttgcggccatttcccgtggatttctcccgtgcgccgcgggggtcccgcgcggccgccccactgaccgaccccacgcccccccacccaaagtacccaaccggccagccaacccccctcgcccgccgtccgctcgaccgaatcgccgcgccgagccgtcgtttccacaccaaaaaagaaacgaaagggctcccccacgcgaggcaatcggggcacggctccacctccaccccaaccccgcaagcgcaagcgatcccccccacgaaccgaaaccaaccacacgcgcaacgcgcacccgcacccgcccgcacggccgcgcccgcgtcaccaccgctaccgcccgcgcgtccctccaccccacccacgcggtttcccgcgggacgcgatcaccgcgacacgcacgacgtccaccgacaaccggggcccgcgcgcgcgcgtgccccacccgtcattggcgtggcgtgtggtatgggaggagaggccggagcccgcctgccgtttggtggcacgcccggcgctgactcggacggcggccggtggagcgaaaagagagagaaaaaaaaaggaaaggaaaaataaaaaaaatcccacggcgcgcaccatttcttcccacccgctgctgcttcctcgcctttccgataagaagcttcgccgtctcctcctcctctttcccttcctccgccgctccatcaaaaaatctccacaaggcttaagcagagggagggtgagggattagaaacaaacaacccttcggagaaaatcacgagaggcttcccgagggcaaagtctccgattcattcaggtccgactcgatcggcgatccgacgaagctcgagcaggtgagggagacggactcggactcggagcacggaaccggtatattagggaggctgaagagggagcttgagagggggtctagccttaagctcgaacgcggggtggtggttgtaccagcagcagcagggaatcatggactcggagcactggatctcgagcctcgccgccgccaagcggttctacgcggcgcagctcggtcacgtcgacggtatgcggccatctcgacttttccctcgaatctttgtttggctttctgctgttgctgttgctgatttgtgatttgattcgttggattgggcgcgcagatatggcggggattggaatggaggaggtggagatggagatggaggatgatggcgagggcatggagctggagctggagatgcagctggaggaggcgacgtggccggacgtggcctgcccctactgctacgaggaccacgacatcgcgtccctctgcgcccacctcgaggaggaccacccctacgagccccacacctcggtgagctcctcgccgccatgccctgcgccgcagggctccttgctctgacgctctgatgacatgacgcacaaagtctggcaaagctgctccttttgttcgattagtaggaacgctgtagctttaggggttgacttggcgaatgaactcaatatttgggctacttgtggagttgcggtagtagcaaacttgcggggtatcttcttgaaatagccaaaattcttgagatgatagtattatgcaaagctcctctagccttgagttcttgcctctctatggcttggcttgcaatagtttgtgagcaaagaggtagaatctttggtatctgtatagtatcagtcaactacggagcataagcttatggattcagaacttggctgaaaacactagcgatttggaccgggaaattgtgattttgtgattcgtaggtagggaagttgtgttgtagttttaagggcaaggataattatatatttcttataagaactgtagattatgcttgactgaaggttttaaatcagtagccagcattgttcacttctgtagttgactgctctagcttgtagttgtgtgttctatttcaaggcctacttctgtaaacaaggtagctaatttcctttttatttgattgccactatagtacttatgtcactgcgccgactgtgcaccctactcttggtggacagctgctcagttgtcataaactaaatgttcatgaataccatgacttaaaaacgtaatcctctgttattcatctaacttcagcaacaggagttgattttgcaatggcacaaaataacctagaaaagttaatgatggtaatgtgatttagatttaaaagactcgaactgttgtgtggggtccatttttaagatttggattcattttattctagtgaaacagaggtgtttgagaatgccatatatatacttttaatgttataatctcgtctgaagttcgagatgttaactgcagaaatcctagaatctgaaataaccattgtgcttatttgaatctttcgctaagtttagtatcaaataagcacattgggttcaaagtatattaaatcagcaccttatgttcatatattgtgcatataaaatgtgcattgtgttcttctcctgatttatttgctttgctttgctttcagccctgtcccatctgcttcgaaaagattacaagagatatgttaaatcatatcaccatgcaacatggttacttgttcaaggttaatctccttccatacctattctgttgcacaagcatatgctaattctttgataaattttcttaattatttaggaatgttctgattcctttttcaaaattatttgtgatgtacagagtggtcgcaggatgcgcagattcgatattcccgagagccaggcactttctttactgagccgagatctgcgggatgctcagttacaggcacttctaggaggtggtcatcgtcagcgaagaagcaacactactgccacaaacatttctgctgatcctctgctttcttcgtttggcctgggcttctcaacattggattcagaggaacgatcaaaagcaccagttcctattcctgatgatacatcaattcataaggatactcctgctcagccatgggaatcaaggtatatatatttacactgctcagccgaatcacattagtggcctgatattcttccacctaaaaccccactactaacagcattacttcaagaatcatcctagtttgtctggaaagcatagcaaacactattgagtattagccaattagttcccatgtcctgccatgctctatgatttatttttcagctagcactttcacaaactgttcacagttaccttcttgtctgagacaggtactgtcaattttgttacatatgtcagaaagactatcaaccaccagttaaacagttgtgtccttgtgattttttagactgttcactagctgtacgcttttacatttgatgaaaacagtccatattatgtcaatgaattgttaagtagctctaagattgaccatattcacaactataaaggtctacataatacttgccgtttcccctagcattcagatggtcagaccaattaggtaaagtagagcattcaggtctatatatgtgctcagttagtatgtttcaaaccagcagcttataaactccttaagagatatgcaaatatgaaatatttattttttccatggcaggatcgactcatcgctcacgagtgaggaaagggaacaaaagcggaaacaagccactgacagagcaacctttgtgcaaggcctggtgctctccactttatttgaagactgactgttcaagtagccctagtttttcttgctagatgcatgtttcctctcgctggttcccataaaagcgcaatgttccacctgatttggtgaatctgatttcgtcaacagtgagatggatgtgcttctggtgccccgttgttctttcgcttcagtaaagcgcgaagttgatttgggcatgatacacaccttaatttatgtcagctgccctgtaccattgctttttatgaattaacgggtagccacaccttgactgtaactcgttgttgtacctctccatactgtctaggaacattggtttgtacaaacataaaagctgttacatgttgtacaatgcaaaggcaaatgcagaagcaccgtttatatcgaatcaactcagcaaaaatgtctccagggttagcaattgggcagatactgatgtgaaacacacaaaaatgctgtgcttggagtcttgggaccgagtctctactttcttttcatgatctgcccttgcgattccgcaatagcgttgctctttgtgtggacgacggctgccgcggaattccgcgctgactgacccggcctgcaacgtggatgaccaaggatatgcgcatatcgtactcagatcacatctcgtactttatagagtaggcaaaatcatcgaagtgccaaattgtcttggttatctgcatctgcatctcaagtgcttagaggtaaaattccattcgagaactgtaaccttatcacttgtgagtgcacctgtgagagctaatgccgttacctgtgtcaaaaggctcagtttagctccgtgggcgccctcaggttcaagttcaaccctgcgaaggtagcataaaataacagagatcgctggattgcattattgtgcttcgagggttagtggatagcaaatgatgtcgatgggcagaaggaaattataacttccgctgtcaatcgttgcagcggcggatagcctcaatcagtacgaaatttaaaatagcacgaaataactaaaaaaactcgttccagtggtgaaacgagcatcttaccaatctagttgctgaaaaacgaggaaaatataaggcaatgacttgagaagaggaaacgacagctccgcacacgcataattgtgaacacgagcggcggggcaagcccaagatttagttatacgtgtcactgtcagaaaaccgcggttttcgggattttgaggttttaacccggcttattgacaaaatttatccaaatttcaccagtttttcatgaaaaccgacaaaatacctcggaagaggtttacgataacggtacgttgtataaaacctgcgcagcatagccatcagcgggaacaaaacacattgaccagatagatgtagaaccattcggattcagcatgctgatgctcgaacgagccaacaaatggcatttctaatgacagttgggagtacaaaattactatctcaccacaatgaaggtgtatgtgcaggtatgcgcaaacagcaaacaataaactttacaacaaaaagggcagccacctcaagagatctacgcacggcataagcaggtgcattcacgataaagtttgtacagctctgtttcgctacaaaatttctaataagctaccaaatctcgaaccatgaatataaaccaaattgacaacccattcgatcgactgtatcatctctaccatagaaatccatgtgtaaattgagttaagaagaatcaagataaagagtcctgtacatagaactagcatccatctaatctaaactgggaagcctgtatgaacctgcggagcaatctcaattttagtttaagtttaaacagcatttggtaaaactatttgaccatgagcaatctatgtaacataccttgagaagggcagcgttccaatagaataccatcaaggcaggtcattttcagaaaaggaagatgaatccagctgaaagaaaaaattgcaaatgttcatgatcattgctaggggacatgatataacttgaaagctagcaaaagcactagcaatagagagttaaaaaaaatgcaacagaggtgctaaaggcaacattaaaaactgacagattgcataaatgatccttgacaaacaagcagtaacaaaccagcttttatcgtgataagcctcacatcttaaattggagcaatacaagaaaatttatctcaaaatgaatttatcctccaggcagtgaagtgttggcacttaattccatttatcacatatgttccaggttgagtgcccataaaagtagtgatcaactttcttaatttggaaacaaccaattaaaaaaaacaatttgctaataaccaagcatcaagccaacaagtttggacatcagtacatcgtaatatgtgcaacgtttcgtgtgagtttgccagtagtatcgactcaaatgtatggaaagtatgaaagacagcttaataaaactgaaaagtgaacacactcgcaagtgaaaatcatttaataaccctattagcttataagctgcatgttagagaacacgtccaattcaatcaaatgttcaaacagaactaacaggactaaaacataataactgagattgtaataaccaatgaatggagaataatgggataaggagcctcaagatgtaaatggttatcaatcagtttcagacatttaatgagctgaccttagggatggattatgtaccacatatcatacctcaaactccatgtgatttttttccagtaatgatttgggaaatatgtagtcccctactaaatgcttcattgaacaggatcctcgtctgcatctcctggagtccaggcagccatgacaacacagctactggtgccataacaattactccaaacattatatcatataggcgtgccaaagtaaccacacttctccagaccatctcagacctcctcagataaggcttgaataccagagcaatagatatgattccccagccagtcggaagaaaagccaaaaggctggtaaaggtatcaatgaattggaactttgtgaattctaacaacagaacaatagcagccaccgttgcaccaacaataatagcctggacaagccggtaacgtatgtgcttctttgctgaatatttgtcgcgaaagtaagcaactgtcacaagagccacaaaagccagcaggacacatgcccaggaaagaaggtagacaaggatgcttttgcttgtaccggcaatgtgtagccgataaacaattgcatattgaaagaagaaaaaccgaaggtccaat

SEQ ID NO: 9762 - DNA, 62640 bp, Oryza sativa
gcctctcctcacccactccgctctccgctccattaaacccaagcgagggacctcgatcgcctcccctcctcgcttccctccccgtctctcctctttcgaccgcgttggaagcaagcgcggcggcggcgcggcgagctgccggtggggggttgcggctatggtgggcatcgacctcaacaccgtggaggaggaggaagacgaggaggagggcggcgccaccggcaccgtcacggcgcctgcggaggcgagggcggggggcgcggtgtgcctggagctgtggcacgcctgcgctggccccgtggcgccgctgccgcggaagggcagcgccgtcgtgtacctgccgcagggccacctcgagcacctcggggccgcgcccggctccggccccggcgccgcggtgccgccgcacgtgttctgccgcgtcgtcgacgtcagcctccacgtgagtgcgctcgccgcttgctgctctcgcgcgagcgcaatgtgttcgaggtattgattgagagagagggtctgctcctcccgttgtgctgtttgcaggcggacgccgcgacggacgaggtgtacgcgcaggtctcgttggtcgccgacaacgaggtgcgtttgcgtgcgtgctgatccaaaaatgggatgaatatctttgacattcggtcagtgctagtagctcaaacgaacattatttctgggtggttttttcaggaagtggagaggcggatgcgggagggagaggacggcgcggcctgcgacggcgagggcgaggacgccgtgaagcggccggcccggattccccacatgttctgcaagacgctcacggcctccgacaccagcacgcacggcggcttctccgtgcctcgccgcgccgccgaggactgcttcccgccgctggtacgggacgatatcgattgggacaagctacctcaccgtgatctgtttgattgcttgtgtggtgactctgttcagcttggcgcctgcaggactacagcctgcagaggccattccaggagctcgtggcaaaggatctgcacggcacggaatggaggttcagacatatctatcgaggtgattcgccggtttagcctatcttggtgactgggatatcagccgtactatcactaactaccatatatatgtcatacagcttggttgttaggcttctccctgggaacatgggattaattttcttaatgcgtgagagaacctagtaacctacgggctgtacagtcctacatcttcctatagtacatcacaggctgtttaggttgaactactgtactttgttcaccgaataacgcattagtatatatatgttttttcttttagtaagattatccaggtctcctttttagatacatctatcatgtctaggtattggaagcgagatggctgtccagtttagacgaaacaagcaaaccaaactgtaacttggctggctggatgagataaaaatgagcaaactatgctattttttctcattaggctctgctcacttactctgggagtgttttcaataaattattttaatttatgcatagactacctatttctacagctattgcgacataatctctaatagttaagctaattgcaatttggaggagtcttgagaaaattatggtccatgaatatctcataggtctgcctctaattgttacaggccaaccacggaggcaccttttaaccactggatggagcgggtttatcaacaagaagaagctagtatctggggatgcagtgctattcctcaggtaggcctatagctcatgtgctcatgaaccactaactcgaaatgtactaaagcttctcttttgtaatgatctccagaggtgaagatggagagcttcgattgggagtgcgccgagctgctcagctaaaaaatgcatctccttttcctgcacttcataaccagatctcaaatactagtagtcttagtgaagttgcacatgctgtggccgtgaaaagtatttttcacatctactacaatcccaggtaataaagtactttcctgattttttgaatatttaaatacctgtacctgtagatgttatttgcacaagtaaccatcataaaaataagtacaagtcacagatgcacataatattgcacatactgtacttttccaaccagtcaaataatcaaccatataataagaggatgtcggacagacagacacagcaatagcttgtgatagaacaagttatacataccatatgagctagagaatattaatatttattccttgtttcctcatgtcaagttcaaactccagatcatataagttggtggcatgttttcagtcatccagaaaatttccaatgctgacatttttcaaatgctcattgtttatatcatggaactggacttgtaattttgtattagaattgcaacattgtaaagtttagttccggctttttctaatccaaccttttggtatgtgaatagtagtttcctggctgactttgctgatctcgaccatgtagaatattgtgttgtttttaccacatttaatttgctgaatatatttgttttctcggatatactaaatgatgccacattgccattgcatgtgttcctcgaaagtgttgaggaagtgcacattgaagcagcaatatgatttaagaggatgtatctaattttcttgttttcaaatggtcatgtgtggtttactgctttactttcatgtgtggtttagcaatatagatttcagaggatgtatctaattgtcaccattttgcaataatcgagcaattttaacaatgttttgtgctatttctaagatacatcagataaaaaaaagaaggataattcagttccattgtagtgataatggtctttctttcaaatgatattcatgcatttgcaatgtgcaacttctgactgttcttctgcatgctatgtcctaatgtggatatggttaaaagtcttcagagttacagattttctttttgtctgcttctcttgttggataatgtcttgatgtcagttcctgcctttaataagttgtactcacaggttaagtcagtctgagttcattataccatattggaagtttatgagaagcttcagtcaacccttttctgttggaatgcgattcaaattgagatatgagagtgaggatgcttctgaaagaaggtattatccaacagttatatttcatgttttgcgaaatggcattacaatggtaaagatatttctagctcgtgcttggtttttcataaagaatttgtttttcaggcgtactggaataataattggaagcagagaggcagatccaatgtggcatggttcgaagtggaaatgtttagtggtatgcgctcttatatataatactgctttgcacagatggatgccagtagttctcttatttgatgttttactgcctagtgggtccgtgtctttcaaatagcagagtgcttctctgtattcagcattcaacattttgtgttccatgtcttagctttttatctgttgggaagttatagtttgtacaatccaaaattttgaatagatttaatggctcatacaagggtaaattacggaaacaaaggcatttaacctttttatgtgaaataaactagcttaaagtttatttttgtgaacttatgaaagtattggtcaagatttcagtgtttgcagcgcatatgtaaattcgtgtttgcagcgcatatgtaaattcttggtgtacttcaggttctatatctatgtttttctgaacacacaagtttagaagcatttgatatgatgaaccctgaaaaatagcgccctgcacttctgcttatcagcttataggatagaatatagaggttgaagggcatactttacatgccatagtgggcagggcatcgtctttactttgttaaaattttctccatttatattccaaatctttatcatgttcctgatttctagtattgtattgtgatggtgacaggtgaaatgggatgatgatgtggagtgccgtcggcctaatggggtatctccttgggagattgagcttagtggatcagtttcaggatctcatctgtccactccccattcaaaacggctgaaatcatgcttcccccaagttaatccagatattgtgcttccaagtaggttccatttacaagtcaaaggaatcattttctgtgctgcatgttccctgttgaactcacttttccttttcccattttggcagatggaagtgtttcttcagattttgcggagtctgccagattccacaaggtcttgcaaggtcaagaattgttgggtttaaaaactcgtgatggtactgttaatacagcttctcaggcgactgaggcaagaaattttcagtacactgatgaacgaagttgctctatcaacatgagtaacaatatcttaggggttccgagacttggggtgaaaactccaagtggaaaccctgggttttcctaccattgctcaggctttggggaatctcaaagattccaagaggtcttgcaaggtcaagaagtgtttcgtccttaccgaggagggactttgtccgatgcctgtataagaggttctggcttccgtcaacctgatggcaaccatgcacctggtgcagcatttaaatggcttgcaccacaaggatgtgatcatcatgggataaccacatcagttctgccgcaagcatcctctccatcatctgtcttaatgtttccacaaactagttcaaagatgcctggccttgaatacatatacggatgcctggatagaaatgagaatagccgacattttaagattggacctacacaagatatgacaagaactgatcaaacattacgactctggcctcatcttatttcaggcaaagtgctagatgagtgtacgagaaatgagaagctgcactctccagtcagtggtgctgagcatgaatcaaataacaagtgtcttaatacaaatggctgcaaaatctttggtatatcattgactgaaaaggcccaagcaggcgatgaagtggattgtggcaatgccagttatcattctcggctccagtctttaaaaccacagatgccaaaatcattgggcagcagttgtgccacggtaagtgctcaatgaaatgttcttttggcatcttcttcctgaaattgcttgctaaccgaattatttacaggtccatgaacaaaggcctgttgttggcagggtcgttgatatttcagcagtgaatacgatgatctgatacatttactgtatccagggagtatgcttgcagaaatagggaccaacattagtatcatactcactggtgctgaggacacaacttccattctggctatctcgtccctctacgtgcttgttgcctcaacttcagcatttccacaggctgtgctaccgcatccaggatgatgacaggggaaatgcagatgatacacgaaggatgcttgtcaagtttgttgtaatgcacttctaagttctaagctttgaacctcttaacgttgctcctattttaagctcccgttgtaatcggcatttatgttgcctgacctacttgcatatttttcaatttgtccgttaagacagcccttttagagggcttgcttatgttagcaacccttaatttccaaattccaagtatggcgaccgttcgaggggtttgtttgctcctgggacgacatcggtacatgacatagaatccattggtgacaccagggcacatcagaattaaggtgtagggcgaaacaatagaagctgaaagagcgatgctccggtgctttgatagcagtagaaataatcctaagggtacattagtaatatgatagtgatatggattaggggtaactttgaatattttttttttgtgtgtgtgtctcggtcggtctttaggtctgtcgtctccgtcatcgatcccacggtcgctttgtattgctcgctcgtccatcgaaaaagcgaaaagcaaaaagcgtcgctcgcttgtcgatcgtgactgagtcctcccgccggttgcacgtgtggatcgcgagtcctcccgccgatggcgaaacacttcggcggcccttctctgtgcattctccttcacgttctccattcatagctggcaacccgcttcgccgccgtacgtgcgcgcaggagcgccctcgatccaggcgggggtgccccgttcggaggctgctccgacgactttcggcgttggctgcgacgacccctctccgcgtgcggggcgagattagcgacgacgcccactttggaggattcgatccgttccagcggcgggtcctagtggcccttcccgcgtgctcccaattctatggacggcggccactccgatcctctggagccggccggttgcctgatcccctccgcgtgcgcgtgagacttgtggtggcgcccaattcggaagctacttcgatccattcctatgtcgatttcgcagtactcgtcgtgcgcgcgagacttgcacgaaccaccctcgccatcaccgtctcaggttaccccgccgtcgctgatccttgattcaaggacgttcgtcggctctatcaagtttaggtaaaaaattgtggctttctcttagtttgccttaaccttctccgctattaattacagttttcttcccaaaagcaaaaaaaaaaaattggggctttaatttaagcgatggtagttttatagtatattggtactcccttcattccaaattaatttatcatataaccaaaataaaaacttccaaattgatcataaccatgaccccttcatttgatatgtagcattattgcatctatgcatgtaaattgagtctgcattcatgcatgcaggcatttagggatagttaaaggttcgtttcttgtgcatgtggaaagttaaagtatgcatgtttctttatttttcaccaccacatactcacattaaataaaaaatcaacccccacatactcgtattaaatgaaatatatggtagttaagtctacctttatctcgatgaaaaactcatataatcatccatatggaatggagtgagtatattggtattgacagtctgatcacagcgtgtgggctcgcttgttctgtgcaatgtattctaggagatacattttttctgtctagtgaagcttagagcacacaaagtgatatagtaatatgagagtactaaccgtcacatgtatctagtgctgtgtctatgcatagcaaaattcttcacgttaacgctaaaacactgtatttctgatcaaataatttgcaagatgcctaagctgcataaaagcatcaaaagcagcatacttcagatgacacttgttctaaagttcagaaattggcatcttacaacttacaagctgaaattactgaaaaacacttgcatgttcattctattatcaatctgaacagcaaagtgaaaggacgatatatgaaaccttacagtttgggatgacgcagggcaggaagttggcctcgtcaccgacgtgcatctgcttgtaccctggctcgtactcgcacctgtaccccatgaaccccatcgccgccatgcagttcctattcccacatgccaccgtcttgcatatcaaccctgctctcaaccattccaaccaaggccgtgtttagttgttttggcaaaatttctttgacgtatacggacacacatttgaagtattaaacgtagactaaaaacaaaataaattaaagattccgcctgcaaacagtgagacgaatctattaagcctaattaatccgtcattagtaaatgtttactgtagcaccacattatcaaatcatagcgtaattagactcaaaagattcgtctcgcaatttacatgcaaattgtgcaattggttttttttttctccacattgtgtccaatcatttaatgtgacgaaaaagttgtaagtttgagtgaactaaacacaacccaaatcatcaaaaaacaagacgatggattgaagaaaaataaccccttttccacattaatcgggaaaaaggattttactaatttacatgggcaatgagagagataaggttgtggattcaaagcaccgctcttgcccgacgcagcgtgtgcctctccatggatccatagcaacgccacacaacctaacaaccacaactcgccatcgacttcccaaaccccgaatcgcgtacctcaccaccttgcctagggtttcatgctcacaagggatcgaggaagataatcgagggacgacatgggccgaccctcgaggcttgtcgtgatggagcggccaacagggatgggggtagggcagggcgaccgtcgacggaggaatggtcgagcctgctacgactgaggaggagaggaaacggggctgggcgacaacgcctgctagtgctatgattggtcggtgctagtcgacagtagaggtggcagaagggaggagacgctaagcggggatgagaatagggggagcgacacgttcgtgtttgggcggcggcatcaaacgacttaggtggtgtttttttctcctgaaaataaagatgaagatgaagattaagtttttttttacataaaacgaggtggtattaacgtatgattgattgagttttaattgttacaaacttaaaaaatagattaatatgatattttagagtaactttcatatagaaagtttcgcacgaaaaacaccgtcagtttgaaaagcgtgccataaaaatcttaatcttcatcaaactcttcttagaaaagagttgctaggtttagttgctgataaatgacacttatactccttcactccagctttttctagataaaagtttccatccacgtttctattattgataactatggtggtagtagagataaatctgatcccttcgatcaaataagattaaacagtttaaattgctttctaatacctgtagagatcactgtactatgcctgtttgttgctggaggtttccaagcgaaacagtgtgcatggaaaatagatctatatgatttcttttactacattagttattttttttaaaaaaaatgaatcaatatgattttttaaaaaactttcgtatagaatttttttttaaaaaaatacaccgtttaacagtttggaaagttgcgcgtggaaaacgaggcaaagggagttgggagcgagcagttgcgatttacgaacagagcctaaagctgaaaaggatcttgaaagtactgctctttcaggcagcgctgctctgaaaatacgatagggtgtgagaacccgggtttatttaaccggtatgggaaactggtgagaacactttgtacacgctttcacagcaaagacataatgaggaaatgagtatacacgagtgggttactataaacatattttaaagagataaaaacaagtttaatagtatagccaacccatttatataatagttaagtataaaaatatacatcattaatacctggtctcacctgtcatacacacataacgtcttgtattccgtgttgcaagtagctacaaatatatagccaactttcttctctcttctcttttcttcttgttacgtggttatagctggcttatagcctgctattggacctgctctaaaagaggagagaggagagcagtgggctacagatttatagccgactgcagcacagactctaaaacacagtgtgtgtatgacatgtgagactagatattaataatatagtaagtagctattgtatgaattagctataaatgatttgaagccagtagttgactgtactattaaacttgctctaactcctagccttcttccttttggttgttgacgtcgaagaatcttcaaagtcgaacacccgtgctctgaatgcatccaggttgaccaacagataaagctggtcaagcagctttcagagaccgagtagaatacctgtggacgcaggaaacgagttactccctcgttttttaatagatgacgctgttgattttttctcacatatttgaccattcattttattcaaaaattttattcaaatgtataagatataaatcacacttaaaatattaaaatattatgagtgataaaacaactcatgacaaaataaattataattacataatttttttaataagacgaatggtcaaacatgtgagaaaaggtcaatggcgtcatctattaaaaaattaaaaaaccggaggtagtactatttattatccttcactaatcgaacaaagagcaccgctagtactgctttacgctgctttaatggacgatgaatgccatattacgtgaattaggccccctaacacctttctgtaaggaagttcagaaaacgtttcatatgcatgccattatctcttcttcagggaccaacttatatcgagggcgatgcgctaaaataatccgctacgttgccctggtttgtctgtgcatttttcgtacttacaagaaggctgctttctcttctttatgccaactggcaatggcatcctccaatccgctcagcaccaaaattcacgcgtctgttagacacgaaacaatggaaaattccagaaaagaaaaaaagacactgatatgtgtgcctacatataatatgtcagacacgtacctcacaaaccagccaaaccaccgaaaacaacaggacaggaatcttcgccagtcgagtccaagctatcatccaccgccaaatagatatgtttaaagtatgagaagggaagacttccgtctccagttgcggatcacatggtagcagtagcacagagccaatgatatcaaacaagagagttgtcaaagaaaaacaaaacaatggcaaagtttctctatctgatcatcctttcattcttcctctctcttttggtgttctgcacttctgcttcaccccggctgacattgcacaccggctcatctttctcggtggaagattacaagcatacattcctcacatcaccgaattccaccttctcatgcggcttctacccaattgggacaaacgccttcaccttctccatctggctcaccaacacggcgggcaaaacagtcgtctggtctgcgaatcgccggtcaccagtgaatgggcatggatcgaaggtgttgctgcatgatgatggctacctggtcctgatcgatgtcaatggttccacggtctggacgagcaccatgagtgcaggcgaggggtcgacggctgcgctgctggagagtggaaaccttgtggtcagagattcaagcggcacaatcttgtgggaaagcttcacttccccaacggataccttgctacctgcacagcaattgaccaaagacacgaggttagtatctggataccatagcctttacttcgacaacgacaatagccttcgtcttgtatacaacggacctgagttctcaagcatctactggccaaatgatgattacaccatgttccgggatggcatcaaagtcaagaacaactccaggcttgcagtcctcgatgacaaaggcggtttcttctcaagtgatgctcttacagtacaggcttctgattttggtctcgggatcaagagaagactgactcttgactatgatggcaacctccgtatatacagccttgacgcatcagatgggagttggacagtcacatggcaagccatagtggagatgcattatgtgcacggcatgtgtggaaagaatgggatttgtgagtacttaccagaacttcgttgttcgtgtcctcctggattcgagatggttgatccacagaattggagcaagggttgtagaccgacatttagctataattgtgggaaagagaggtacaagttcattgagattccccaaactgatttctatgactttgatcttggctttaaccagtccatctcatttgaagagtgccaaaatatctgcttgagcacgtgctcttgcattgctttctcttaccggctaactggaactggtgtttgttaccctaaaggcctcctgttcaatggttacaagtctcctgcattcccaggaactttatatcttaaagtgccctacagcacaaatttacaggcctcatcaacacaatcagctctcacatgctcccctggcagtcaggagattgcaacaccttcagatcacccaagatggctatatttctatatattccctggagtattcggagccttggaactaattttcattctaacagcttggtggtttctttccataaggaatgacattcagaattcagcagagggaggttacatgatgataagaaatcaattcagggggtttacttaccaagagctgaaggaagcaacaggaaaattcagggaagagcttggaagaggtagttctggaatcgtatacagaggagtactcaaagataagagggtcattgcagtgaagaagctcatcgatgtcacacgaggcgaagttgaattccaggcagaaatgagtgttatcggtaagataaaccacatgaatttggtcaggatatggggcttctgctcagaaggaaaacataagctactggtttatgaatatgtggagaatgagtcactggacaggtatctgttcaataccatgggtactgaaagattgctcgtgtggaaagatcgtttcaatattgccttgggagcagcaagggcactggcttatctccaccatgactgtcttgagtgggttttccattgtgatgtgaagcctgagaacatactcttgacccgagatttcgaagccaagatagcagacttcggactatcaaaattgtataagagagagggctccagcttcaacttctcacaaatgcgaggaacaatgggctacatggctccggagtgggcaactaatttgccaatcaatgcaaaggtagatgtctacagctatggagtggtgcttctggaaattgtggctggacagagaatttcaagtcatacaaccagggaagggaaagttaccaagttaaagcaatttatcgagaatgtaaaggaagctcttgctactggggatactaagtgcatagtggatggtaggctacatgggcaatttaattctgagcaggcaatggttatgttgatagttgctgtatcatgtcttgaagaagaaagaagcaagaggccgaccatgcatgaagttgtcaaaagtctcctggattgtgaagagtaaattggtcatttttgctaatcaatgaacctgaaagcagtagggacgaaaagcagtaagagaaggagtaagcttggcattgatagcaatgttttgcaaacatatgtactttctgacccatcaaggaaaaggataaggcattacttgtagtcctgtgtcatttagccaataaccatattttgtccttttcctgtgaaaatcaagataatgcagtgtttagttattgacttattttaagatttatcaggaattttatgtaatcttttaaaaaaatgtattttgtttttttcttttgttcttgagacatacaattgtaggtaaatctctcaggttctttaaagacagataagccgaaataaaaggggtatctagtccctgaagcactaacatagttattttcaattaatcagttccatgaaggatttagctggctattattgtaaaacaatgagatacaaaatttccatccaaaattcacaactttgtagcttgttctattagcaatagattataaatttatgtgaactatctttgtcaataattcaatttgatcaacagcacaaatgtaatttggcaaaccaaactgttctttgaggaaatgtcttatgttgtactgagtttttctctaatctttaacacaaatatgcgtacaatgaacaaaaaggtagatgtatgcaagtatgtaactcatgttaacttcccaccgcatgaaccatctagatcaacaacatcttgtacaaatatatgtagttcatgtcagtttcgagtcttcgactaaccataggctgctaatgttacccgctgagttaccaaatgcagcaacgaggcagagcaaaatcacgcatcagactatcagagcattgcataacaacgaagagaagagggaggcgtcacctagacggtgcctgctgggaccacgatggagggggtgtggggggtggggggtccaaacttctcgtcccctgcgcccaagcctctctgcctcttccatcaccggcacggtgtgggggattccgtatcgcctaccaacacctccaccacttgcctcgccggcatgtcgcggaggttggcaggatcgggttcaacgcgggggcctctcgtaggcgtacccgtccgtatctcgctctcgccgccgctcggaagcggtcgccggcgtcattatcggtctctctttttttttatttgacaccgtcattaccggtctcctaacaattgcacagaacaacaacatgccgcacgtgcgtatatatatatatatcagatcgaacggttaaaagacaacgggcctgttcattcatttcgataccattttcaaccataccattttttaccaaaattataaaaaaaaaatggctacgtttagtttgttgccaacttttgtcaatacataaaaaatcctagcaaaattttagtaaaaccagatatcccacgtcctttaactaatcaaaaccggtcacaaaaggtccctcgacggttttgatcccagtttggtcctacgtggctgctgagtcagcgtgggacccacttgggccccacgtgtcagggtaatccacgtcatcaccctccctttttctcctcttctctctttctgggcgaggcaaagcggtgggtgcagagggccagaggctagcaacgcgaggcgggaaagtggagggcggccggcggcgcgacggtggccggtgcccgacggcggctgctatagcgggaaacacggcgacgcggcggccccaacggtgatgtcatcgactgcgtgccgacgcacctgcagccatccggttcgggatgaagcagccacgcgccgccgacatcgtccgccccgactccaccaacgatggctgcaactcctgctcgcgcatgccgaggcggcctctgtgctggcgctcctcctgcgcgcgttcggctgcccttggcgagcggcgcacaccttggcctcagcctctgcttcgcgggggccgcgccgtaggccgtggacgtgccgcggctggtgctccacttcgacagcgctgggtcatggagtagcagagctcgagcacggggcagtgctacagagctcggggattacgtcgtagttgaacccgaacccgagatccacgcaccccttcagctcctctaggtcgtcgttgactcgtcggtcaagctcggcgcgtgccgccgccgccgtcacccccgctcctcgccgtacacgcgccgccgccgaagacgacgacgccgcagggctcctccttggcgaccaccaccggcttcgtcccccgtggtcacgccgcctcccgctgtacaccgcaccacacgtcttcggcctcgacctcggccgccgcttccgctccgctcgtggcctgctaccgtcgtcgccccgctactccgcccgcccttccgcgttccaacacggcgagccatgcccggcggcgagaggaccatcgccgcggccgtgcaaatccggcagctgagcggcgggatccatacggcagcggcggaggaggaggagaccgggagattggccgccgcacgctgctcctctcccgcgagccgccgcgcgccgctcctcttccacaggccgtcgcgcgccgctgcctcctcgtcggtgaagactcggaggaaatagaggtagagaggggagaggtggacgccgccccgctgcacaccgccgccttgccgctcctgctcgcccgccgccatcctcgccgcggtcgtttccccatccgccatgccgcgccgcttccccatccgccaccccactgcgcgtcgccgccccttcgctggccgttgcctgtctcctccccatgccttcgatgccgcccaactccaaggcttcccccaccggccgtgcgaggagctcggccgggctgctgccgccgtcggccgccgtcgtggcgccgccctcctctcccgcctcaccccgccaaccggcctacaggcacagagagagagagaaagaggagtaactgaggaagagaagagagggagagtgacttagcctgacatgtggggcccacgtggggtcccatgctgactcagccgccacgtaggataaaaccggggttaaaaccacttaaggttctattgtgaccggttttgattaattaagggatgccggatatctggtttgcggtttggggacaattttgtaactcgatgacaagttgagggaccttcggtgtactttttctaaacttaataaggtttattttggctataatatgaaccgtctcaacaaatgtggattgctaccattggttgtgattcagttatcgggcagcctgactcatgagtcatgatgggcccagcccacctattgggggtgatcggaaaaacgcttctctctttcgagtagccacggccaccgccccgccggcagcttctcgccgtgtctgttcctccgtgagatagcatcaatggtggtgaccttttggtctccctcctgatgatgtcaagtactttgttggtccttagctgtttggcatggttgatttgatgatttgaggtgtgtttggttgactgtcatgtatgaatgggatatggccatccatatttagttggatatggcgattcaatttttgtttgttttgtagagatatgatgatccaatttcttatttggttggagggatatagtatggatgggaaaaaccaaaagttagtggggtccatttgtcatatatacttttttatcaaaatataatcatccgagatcttgttttaaagatttaaatataacaaatataatggtgtaatcaaatcataaattagataaacggtttaggataaaaaaatcatttggaagttgcttaacagaaaatcaaactaaccacaactaatcagaataggacacatcacccaatccaaaactggatggcttcatcgagccaaatcatccggatgcactcatctaacttattgagggaatattccctattccggaccgctccatttaccttgccctccaatcaaacaccacagaaaatcgagcggccatctcccatctagactcatctacctaaccaaactcaccatgcatcagcggaacggcaggaactctgcctacaatattcaaagagtatgcaaagctatcagctatggcacgtttagaaccaacaaaaaacaactaggacacctgattatcgtgagtaaaggaaagcttgtccaggtttgccgccaatcgtctttctccaaactttgtttcgtgagtcggcggaaagtccaaagtcgaaatcccgcgtccatgtgaatgcatgcatctagataacaggcataccaggtcatagagattccatatttccgtagaccaactcatgtatcgaggataaatgaagtggctgcccggtgttggtttttttgtcctttaattctgaaacaagggaaacttcttaagaatctcacacatcgcagttcagtttctatagaagtcctatgttctgtttagttcacactaaactttctctcaacttccaactttccatcacatcacatctaaaattttcctacacacacataaactcttaacttttttttttcaaactatcaactttccccaaacttcttctcaatttcaggaataaacaccgccctagtaaaagcacaattcttgcatcctattttccgaatggtattgcaataagtcagtttttcttctgtaagtcaacacaatccactaattctgaactaccatactttgactagcttcggtagtcatcagcgaccaaaagaaaggagagaacccaagctttccctttttcaaaataaaactttacgcagggtctcagaaagacattgtcactagtattttttacttaaaactcattccacaccacagtccacacaatcaaaacaaggaccctatgattaacaagaaaggaacaagagaacactacaaagtgatcagtaagaaacaatgcagaaacttttggcgtcatttaccagttttcagaagcgtaaatgtttgtgggggaagactgaatgagcctaacgctcttctagtgctatataaatacagaagaaatgcaccattccattcttccatgattccatcgaagtcacaagccaatcacgtatcttacacacttccgcacctgatcttcttccatcgaagtcacaagccaatgaactattagtaactggaagactgaggaattttgttctgaacaacattcctatgttgcccactcataccgtgccggaggtggttatctttaataccgatttcaaggccaagattctagcttgccattgggccacgtggcagcctcaaaatttagctacacacctcagaaatccttccacgtgtccatctgtatagttctatacctttctccagcttattggcacacatgagccacttgaactttgagataaatcttatagggaaaaagtgtcaagtagaaaaattacagattctagatgcttccaactatctagctgtttgcaacatctaggctccaagaggcattaaactgtttcattgaagataaatcataactgttttggggtaaaaaaacataatccagtaaaaaagaaggtgcagatgaccggctattacaaatacaagtgaggcgacggagagaaaagtggcatcgaggaagacagcataaatatatggtagtgactgaaatttttttactaggagtcggaacggatatatactagcaacttccaatgaaacatactacctccgactccgacttttaataaatgataccgttgactttttatccaacgtttaaccattcgtcttatttaaaaatttatgtaattataatttattttgttgtgagttgttttatcactcaaagtattttaagcaatatttatatcttatacatttgcataaattttttgaataaacaaatggtcaaacatgtgtttaaaagttagtgacaccatctattaaaaaagcggagggagtatatacggatttagtcctctttggatttttgtactataatttcttctttcgaaatttgtatgaaaaaaatatagaatagatttttatcgacaagataattatgaagcaaaagacttaggagtgtttttttcctcttactattatggattatgaagggcatgcttcacaagcttatggtttattatttgatttgttttaaatcagtacatcaactttataatatttaatccattcatttaagctctgaaataattgttatacaccagtttcatctatagtccatcatctatcgaaacttaatgctgcaggagcatcgtcaatcgaaacttaaatactgcaggagattaggctaataggatgatatgcaaaatagaatatttgatgaaaatcgagataactcttaaaaaatcctgtaaaattttcatattctaaacacaccttgaaaaatttacacgtgttatctagcgcgccatactaaaggtgtgctctacgacgtttgacgtgacttttaaaaattataaaaaagaaacctaatgagaccataaactataaaaactacaggatccaatttttaaatgtttcaaggagaataaatataagcatgtagatcggggaagcatataaagaaggtgtgacaaaaaaagtaaggggtagcatctgacgtgatttttaagaatcataaaattaaaacatgaggatgataaggtttggtctttcaaaatcgtaagacaatgaaatagcgatttaacaaattttaagtaaaatcatattaaaaaatagataactctgtattgttgttagccgcgcagctagttacaagtaggagtagaagaaatccgaagagcttgctaaactagccacgaggacacgcttataaccaagaaaaaaaaatacttggcagacctgattaccgtgagtaaaggaaagcttgaacaggttcgctgtcaatcttttttccaaacgttgtcggtgacaaaaatttcaaagtcaaaattccgtgtccatgtgaatgcatgcatctacagacttacggttataccaggtcatagagattccatttttccatagaccaacactgtgtttagttccacgccaaaattgaaagtttgaaaaaattgaaacggtgtgacagaaaaattgaaagtttgtgtgtgtaggaaagttcgatgtgacggaaaagttgaaagttcgaagaaaaaagttagaatcaaaacagggccactcaggtatcttcttttctttaggactacactcaggtatcgagtcctgaattctagaacaagggggaatttttaaaaatctcacacattagagttcagttcctataaaagacaaggaaaaagaacaattcttgcatcacaaatggtattgcaataggaaattatttcttctgtaagagtcaatacaatccactcatccagtaccaccatacttagacgagctttccataatcatcagtaaccagaaaaagaaaagggagaacctaggcttccccttttcaaaataaactttacgcggattcagaaagatattttcgctagtatttagtcctagacaaagctcgttccacaccacagtccacacaatcaaaacaaggaccgttctcattgaaaaaaaggataaagaaaattatcaaatgatcagtaagaaacaaatggataaacttttggccatttaccagtcttcagaagcaaaaatgcttgtggaggaagacttaaatgatccttgaccccagattagaatagcgctcttctagtgctacataaatacagaacaaatgcatcattcccttccttcttccatctctgaagccaatcatatatctcatacacttatgcacctgatgtaatggaaacaattccctgcctcatcctcttttcgtcactacagattctggcattctcttctgcatcaccagagcatacactgggtaccggctcattcttatcggtagaagaatatgagaaaccatttctcatctcacccagcaatactttctcctttggtttctacgaaacaggtgacaacgccttctccctctccatctggttcaccaatacagtcgaaaaaaccgttgtttgggcagcaaactcagaatcaccagtgaatggtcatggctccaagctatcctttactcaggagggtagcttagtcctcagcgatgagaagggcttcgttgtgtgggatagcaagacaatgctaggacaggattctcgagttgctctacttgatacaggcaatcttgtcatcactgattccaagggtagtgttgtgtggcaaagctttgattcacccactgataccttgctacctttgcagctccttaccaaggacaaaaggttggtgtctggttactatagcctctactatgacactgataatgtcctccggctcatatataatggaccagagatttcaagtccctattggccaaacccatctgagtcaatttttgattttggacgaactaactacaacagctccaggattggagtcctcgacaatactggtcatttcacgtcaagtgatggcctaaacatcattgcttctgactcaggtcttggaataaacagaaggctcacaattgatcaagatggcaatctcaagttgtacagcttaaataaagtggaaaaaagctggatagtcacatgggaggccatgccgcagcactgtgacgttcatggactatgtgggagaaatagcatatgtgagtattctcctggtcctcggtgttcctgtcttccaggttatgagatggctgatctagagaattggagcaaaggttgtcagccaatgttcacaaacaactacggccaagccatagggcaagtcatatttgtcgagatgcgtcatgttgaattttatggatatgatacgggatttaatatatccgtttcactggaagattgtgaggaattttgttctcaacaacgttcctgtgttgcctattcataccatgccggaagtggttattgctatactaaaggtatgctctacaacggccggaagactcaatccattactggaagcacatatttcaagctacccaaaacttgcaatatctcagaggtgaaacaacatggcttgacatgcagacattcacattctacatatgaaatgcatcgacaacacggaaagtggttgtatttctatacatgtgctgcaatatttggagggctagagttgttcttcacaacaacagcttgtttatttcttcgaagcaaacagaatattccaaagtcagtgatggatggttatgaattgatgactgagcacttcaggaaattctcatacagagaattgaaggaggctacaggaaattttaaggaagagcttggaagaggtggttctggagttgtttatagaggcgtacttgacagaaagaaagttgtgacagtgaaaagattaacaaatgcaacagaagctgaagaggagtttcaatcagaaataagtgtgattggcaggataaatcatgttaatttggtaaggacttggggctattgctcagaaggcaaacataaactattggtttatgattatgtggagaatgagtcactggacaagcatctctttgagagcatagatgcaaaaaaattacttcgatggaaccagaggttcaccatcgcattgggaacagcaaggggcttggcatacctccaccatgagtgccttgagtgggttgttcattgtgatgtgaagccagaaaacatactcttgacccaggactttgaagttaaaatagcagactttggcctagcgaagctatccaaaagggattgctcttgtttgcaattatcccatatgagaggaacagtaggatacatggctcctgaatgggcgttgaatttgcccattaacgcaaaggttgatgtttttagctatggaattgtgcttcttgaaattgtgatgggagctaggatttctagtcagacaacaacagaaggggagaaactggatttgacacaaattgtggaagcactaaagcaagttgtagcttgtggagatgttacacacatagtggatgctaagctgcatggacaatttaaccatctccaggccatggaaatggtgaagatttccttatcatgcataggagaaaggacaaagaggccaacaatggatgaaattaccaaagctctgatggcatgtggtgatgaagacaagtatgctgactgcacagaatagtatgtaacacataaatgcaaaccagtctcatcgaattaatcaaatgttacttcaaaagtataaaggcgaagcaaaaggaccattcaagagtcagggatgtaaaaagtagcacaagccaacttacaacttgttcatgccaatgaatgctattactacctctgtttcaggtataagactttttagcattgcccacattcatatagatattaatgaatctaggcacacatatatatctagattcattaacatatatatgaatgtgggcaatgctagaaagtcttataatatgaaatggagaaagtagtatttacgaatgatgtatgtttgtagattaagaattctctttaattatctttttccagttagttcccaagttctatataattcacagcctgatggttcctctttctgttaccacaccacttgttttcagaaaaaaaaaagattcatttactatctttgtttcatattataagactttttagcattaaccacattcatatatatatgttaatgaatctaaacatatatgtgtgcatagattcattaacatctacatgaatgtgggcaatgctagaaagtcttataacctgaaacggaagtaagttatagcaaatcagttcttcatgttaccagatttccttgttctcagctatatgaaagtgattgggacagggagatttgctcaaatgtagaacaaaggtaatggtacagagaaaaggataattaactaaaaagagcttccctacacgttcctgtggcttttcaatgaactattaataacctatactcctatagattcaagattactgcattttatctaaaagttctcgtcccgatctcttagagcagggtaaatttgttatttcaatttctagtaaccaaagctgctaatgctgccctctcagtaaccaaatgcagcaatgatccagagcaaaaccacgcgtcggtcagagcattgcataacagcgaagagaaagagggaggcgtcacctcgacgaacaagagccagcgccgtcaacctggccggcgagacggtggccggctgggaccgcgaagggggtccaaactgctcatcccccattccccctgcgcccaagcctcgccggatggccagccccctctccgcctcttccgtcgccggtacagcgtgggggtcccgtctcgcctgccaagccctccaccaccacctgcctcgtcggcatgtcgcggaggtaggcaggggcggggattcacgcggaggcctctcgtagcgtagttggctagcggcagcagcaggccgcttctcgttcgcgcgccgccgctcggcggaggtcgccaccgtcattatcgggcgcagccgataattcgaggggttttatgggaataacaacatcccgcacctacgtttctaaatcaaagctaccaatatcagatcggacagttcaaagttagcaagccttgaaccgctaccattggttgcggaacaaaaaaaattggtggagccgggcccgccgggggtgcaggcgtgcagcgcgcctcctccgtgctccctccgtctcagaaaaaaaaaggacttaattcttaggttttttatccaatgtttgaccgttcatcttatataaatttattttatgattagtatttttttttgttagatgataaaacataaataatacattatgtatgacttatcttcctgaacagagaacagtgaaggcggattagtgaggacgacgctttgtcaagtaggtgctacaaggtaatcaatatcaacatattagatatagtattttttttatttgtcatatcatataatcgagatacaatcataaaatcaggatactatcaaatttataaataacacattttatatataatcggtcgtggctgttctgatccaattgatgaatttcaagatgacttggtggtcacgaccgatcggagtggttcttttctggctgctcttctggttggaggcagtcatgttcttttctggctgctcttctggttggaggcagtcatcagttgcacctgttgtacccagtgagctttctttgatcatggaagaatgtatggaattcttggcaattaatgatatcacccggaggggggggggggtaaagtcatgtattatttttttgaaaaataataatgtcggtatttgtttgtcgattcttttctatggtgtcgcgtcttagagttgtctttgaagggaagtctagaattgactttttagcatggcttgagcgacattggtagacaaatgattattccttcttgaattcgatgttttggagggtgttatattcctagcgttctcctgattgtagttgaacacactgtcacagaaacaaatgatatgttaatttatgtgttcttttcttccttagttagtgtaagtggataggtcggatgatttcgttgttcagtttcattactaagaaaatattatgaaggtaaatatatttgtagttgcaaagccaggtagtttagtagtaattaactagtattgttaactaactcgtactcactggcacgtgcaattcacgtgtaggcgttgaccatataaaggaaaagggttgcgatattgtgggtggaagtatatccaatcaagataactaaggttacgtttagttctctttaaacttttaattttttcgtcacatcaaatgttttggacacatgtatggagtataaagctggacgaaaaaacaattgcacagtttgcatgtaaattacgagacgaatcttttgagcctaattacgccatgatttgacaatgtggtgctacagtaaatatttgctaatgatagattaattaggcttaatagatttgtaacgcagtttacagacataatctgtaatttattttgttattagtctacatttaatacttcaaatgtgtatccgtatacttaaaaaaaattaaaatggaactaacacggcctaacgctttgttctgctcattctcttccaagacttcacagttcacacccccacccgtagaaaaatgacttcctaccctccaacttgtcacgctagctgttgaaaaagacctccattgctgcgattggtgatacttctgcttctcttatgctacctccgttctaaattaaattaagtgtaaccatgggttttcgtatttagcatttaaccatccgtcttatttaaaagttttataaaaaaactattttaaaaattagtcacacataaaatattatttatattttatcatctaataataataaaaatattaatcataaaaaaatttcaattaaaatggacggtcaaacgttgaatataaacagtgcaaaactgtatttattttggacagaaggtagtatctctttggctacataaaataaaaaaaatagtttgaatttcaatttggacggagttcattaatcatccttgacgacataccctcgtttattctaacctgtcaaatataaatcaaatgcttaaaaaaaatctgaaatttttttttgctaagattgatacgacagtcgtttattattcctccaaaaagataattttgagctcaactgatctacaaattgataaacaaaataacaaactaacctttaagtttcacgagcactatccacggttagatttgtttcttcttaacttaatcgaattcaaacttccatgtatgtaaagtgatacatactccatctgtctcaaaaaaaaagacaaaacggggtttccgtgtctaacatttgactgtccgtcttatatgaaattttttttataattagtattttcattgttgttagatgataaaacatgattaataatttatgtgtaacttatctttttaattttttttatacttttcaaataagacgaacggtcaaacgttggacacggaaacctagggtttgccttttttgggacggagggagtatataccacaaagatctatgctgtgatatttcctaagattctttttactgtccaaatgattgcaaataatgaggagatattctcttaagaggcagaattgttttttttttttttgaaaggaatcagcacagactgtgctatatcattgaatagagaggtaaaaaagtactacccctatgggtgaaaggagaaaaaagaaactgtacaaggcgaaattaatctttgcactggccattgtccaagctcgtgcctcttcttttatttttgccattaggcttggggccgtcatctctttgtgttcaaagattctcctgttacgctccttccgaccgcaggtcttttttgggcacttccttcttgttggctatcatttcccaccaatcctgaacaccctgattggggcagaattgtttttccattttgaacccaattttcacatcgatgtttcgtattagacccacttttagtttatactttcactttaattcattttcttcttttttatgttttaacaaaactgatataaaaatatttggtgattgataaatactgctagcaaaagtcgtttattgattaaaacaaagagagcaattcacttcgcccctaatgcagctcgagtttggctcgatactccctcgcacgattttagatgtactctgacgtcttctgtggaccaaaaccgtacgttctatcatcacgcaactctattttaaggctccttagaacaacagatttttaaacaaattatagaggaatttattcttatagaaactttttgtttgatcatttggattaaagaaatagctatccaaaaatcctatgaaatttctttgaattagctcaaaacagagaaattttgtaggaattttgacgtgagtttcaacctcttgaaaaaaaaatcctttgcatctatctttattttgattcctacttttttctctccatccaaacacatttgttaaatagtcccacattggttgtggaagggcaaatgacctaaaatataagtgggggagcccctcacctcaatggagcttttggggtgggaaaggccctttacgatcctacaattggtatcagagcctggctaggttaacatctctggcccgatggacacgtgtgaaggcctgatggaccgtgggtacctgcggggcccgtatacctgatggaccgtgggccggtggggtctatacacggtgaaggggcggtgaagggctgagggacaccaatgtgtgaagggggagattgttgaatagtcccacattagttgtggaagggcaaatgacctaagatataagtgggggagcccctcacctcaatgtctagcttttggggtgggaaaggccctttacgatcctacaccatttctacaatgttgtcgtgttttcaaaatcatactcccttcgtccaaagaaagatgaatttagaactggatatgacatattacattataatacaatgtatctggacaaagatatgtccagatttgtattactaagatgtgtcacatccaatattatatcggttttaaatttgacggagagagtaagattgaaggtgttagtctgtttaaattcgtagtactaaaatgtagacagattcgtagtatttgattatgtgtcttatcatctaaaatcgaaagtatgacttatcgatccttatgtactttggaaatccactaccacggactcttgctgtcactatcggacagaagatatcaaaacagtttattttaaagtaataataaaaaaagcaagtggttatcagaaaggcgattcaacgcatccatctaattcatagtctacgtacgcatgcgttgcaggacccccttgctgtaccaaataattgcaagcaagtgacagtcagaaccctcgagcgtcatcaatttctcatgtgcgatatgattatctaaactctatcgaacgtgccaacttccatgcttttttttttttgaaggaatacaacttccatgcttaattgaggagtagttttgtccggctaatttgctagtctcggccaacccacatacagctagccaccatattttaagagctttatcatgcatatatgcgatttgccaaccaattgattcgagtccaactcaagactcgtagacgaaatcgatcatgtacacaggaagtacccagctaaaagtgaaatcaaaaccagcgtgtgctctgggtcttgccaatggacaaatgttccttttgtgattattactcaagaggaatttcccttcacgaacgaaaacggtcatatcaaatcggcatagcactagtgacggccacgactagttgaggactgaagaccagcaataatgacaatcgtaaactgatgaaatatcaaagtgattgtcagacaaagcgccattatcctgtcgcttacggctgcgtatgtccaaatcaagaatactacccgtactttgatttgcataatgattgcgttgaacgttggttgcttgatcatcttttatacactttgtcccataattttctttgcctttgtagaccgtagttcaaccaatgaaccaaacagcgagctgaaacgatggctggattggtcatcggctgcctggccgtgcagctctcgctggcgtctctgctgctgtgctcgtccgcgtcgacggcgcagcacacgctcggcaccggctcctccctgtcggtggcggaccggtcgcggccgttcctggtgtcgccggacggcaccttctcctgcggcttcattcaggccggcgacgacggcgacaacgccttctccttctccgtatggttcaccgccgccagggacggcgccgtcgtctggacggccaaccccgacgcccccgtgaacggcaggggctcgacgatctcgttccgccacgacggcgagctggccctcgccgacaccaacgggaccacggtgtgggcgagccggacgggcggcggcgggcggggcctgaccgtctccctccgcgacaccgggaacctcgtcatcgaggacccgtcgaccggccgcgccgtgtggcagagcttcgactggccgacggacacgctgctcccgtcgcagcggttcaccaaggacaccaagctcgtcgccggctacttcagcctctactacgacaacgacaacgtgctgcgcatgctctacgatggcccggagatcgccagcatctactggccgttgccgggggtgagcattttcgacttcggccggacaaactacaacagctcgaggatcgccatcctcgacgacgccggcgtcttccgctcctccgacaggctgcaagcccaggcctccgacatgggcgtcggcgtcaagaggcggctcaccatcgagcaggacggcaacctgagaatatacagcctgaacgcgtccaccggaggttgggcggtgacatgggcggcgctcagccagccgtgccaagctcacgggctgtgcggcaagaacggcctctgcgtgtacctgccgagcctccggtgctcgtgcccgccagggtacgagatgatcgaccgccgggactggaggaaaggctgccagccgatgttctccgtcggcaactgcagccagccggcggcgcctgagcggttcaagtctgtggtggtgccccaaaccgatttctacggctacgacctgatgttcaacgggtcctcgataacattcgagctatgcaggaaccagtgcctgagcgattgccagtgcgtcgccttctcctacaggttcgacggcgtcggcagatgcttcacgaaaggcaggcttttcaacggctacacgtcggcgaatttcccggggaacatctacctcaaggtgtccatcgacttcgacgaatcgtcgccattggtcagcgcgcggagcgccgccggcctcacgtgcaatcccaacgtctccatcgtgacagtgcccgctgccgtgtacgggatggctccaagaaacagcgggaagtggacctacctgtttgtgttcgccggtgtgctcggtgtcctggacctcctcttcatcgcgacagggtggtggttcctgtccagcaagcagagcatccccagctcgctggaggcagggtacaggagggtgatgacgagccagttcaggcggttcacgtaccgggagctcaaggacgtgacggccaacttcaaggaggagctcggccgcggcggctccggcgtggtgtaccgcggcgtgctcgacggcggtaaggtggtggccgtgaagaggctggcggtcgacgtgacgatgcagggggacgaggagttctgggccgagatgacggtgctcgggcggatcaaccatatgaaccttgtgaggatttggggattctgctccgagcgcaagcacaagctgctggtgtacgagtacgtggagaaccagtcgctggaccggcacctgttcgacacggccgaaggcggcggcggcatgtcgacgacgacgctggcgtggaaagatcggtacaagatcgcgctgggcacggcgaggggcctcgcctacctccaccacgagtgcctcgagtgggtcatccactgcgacatgaagccggagaacatcctcctgacgagggacttcgacgccaagatcgccgacttcgggctggccaagctgtcgaagcgggaccgcggcgccggcgtggagctcacccacatgagggggacgtcggggtacatggcgccggagtgggcgctgaacgtgcccatcaacgccaaggtggacgtgtacagcttcggcattgtgctgctggagatcgtggtcgggagccgggtggcggaccagaggacggaagccggcgagcggctgcagctgccgcagatcgcgcaggcgctgaggcatgtgctggacagtggcgatgtgaggtctctagttgatgccaggctgcaggggcagttcaaccctcgtcaggccatggagatggtgaggatttctctggcgtgtatggaggacaggaacagcaggccgaccatggacgacatcgccaaggctctcacggcgttcgatgacgaggacgaacaccccgcttaccggtcatgatcatcaccaggctaaccgttagcatagttcagcttagagcagcagtcagctgtgagtttaattcagcacttgaatttcaaatttaaggattatgaaattccgaaaaattgtagttaagacttcaaatcgagtatactcagtagaagtactatagtcagtattgagctcctccccaaatattaagcaatcagttgactgaaaaaaaaaagaaaaaaaaaagaaaagcactcccagaattctttgaaacaaaggtcccatcggttgcatacggctgattaaaaaccattacggcttattagtgataaaaaagatttatgagtaaaacttttatatatgtgtacttagcgtgtcggtgatatggctcggggtatgcgaagtgcgggggagttacctcctgatccagccacgtggccctacagcttggccctccccccgcgcctcggaagacccagaggcagccagggagcctcgggtgccacgtcacacccctcgggccctcgcgctgcctcgccctgaggccctcgctcaactgccatgtggcgaggggagcgagcggggaggagactcagactgaaccaccatcaatgcgcgccgccccaactgtccctcaccgcatttaatgcggtaagggcggacgtgcggtggggcccgtttgactcacgtcaatcaggcgtgaccaaactgtgactggcctgtcgccggtcacgtccgatcggacgggcggccgtgcccccacactcgcccctgtacccagcggagtggaggcaggtatgccccgtcccatcgaagtatcatccggagctccctccacgtgagaaggaccgccacaagtcttcatccatttaagacggaatgacacggctgtcccccgtgtcaggtggggggcggcgctgtgtcccactcaaggacggactgccgcttagcttccgggcgaagacacggatcgtggtccggtcaaggtaaagtggatccccctcccgtgaaagagtaggtagaagcggtgcatgtggtatccccttgaactataaaaggaggaccttgcccaccgagaaaagggacgacgctcagtaggcctgaactctaggaggagaagagcgagagtactctccggagtttaggaacctttgtaacactcaaccataaatcccacacacaggagtagggtattacgctccacaacggcccgaacctgtataatcttggcgcccgtacgcgatctagaaaccctcagggcggatacacgatctcgacaagcgagccttttcccccggccgaactcacaaaaggggatctcacgatctcccgctagagaggatcactcctcgacatagcgacttaaaagctaaagctaaaaaagaaaatctttgaaaaaacatcaaaatcaaatattaaaattcaaattttagcattggcttataactttatatgctataaggcaaacgatgaggctcaaacatcatcatataccttagcagaactgaattacaaatagtgtttttattccttcaaatttcagaacggtatggcatcccagcgcgctcacgctgccgatcgcgcccgtcgtgcctctctccatctctcatgcgcttcctcggtgcacgctaagccaattttgttatatatttgttgataagtgtttttctaaaaatttaacaaatgaaattatagtataatcgtaatataattacattggaacttgcatataaccgtaatataacctacacgtaactttcatataattttaaactattagatttgtttcaagattcatgtaagtgaggaaggaaaaaaatcacagcacacacatatgtgagaggattcagggtgtgttcggttgggcttttcaacttgcttttgcttttgtaaaagccaaaagccaaccaaatggtccaaaagtcacagctacttttgcccaaagtcagcttttggtatagtacaaatcaaaagcacctctactccctcattcatctgcttttgggggaaaaattagccacctcggccattacacaaaaaacgcttcacttcttctttcttttttctcccatccttccccccgtgcgtccctcctcctcacttcaccttcgccgtcgccgccgctcctcctccccccccggcgccgccgctcctccttgccgtcgaggccgactccatcaccgttgaggccgactccgccgccgcctgcgtctacctcccctccgccgccgttgcacgttctgcctccccgccgccgccgtcgaggccagctccgacgccgccgaggtcgactcccgcgtctgcctcctgcgcgttcgattccgccgccgacaccgtcgaggcctcctccgccgccacgcgcgtttgccgccgccgaggcctcctccgcgaccgccgccaccgccgctgaggtctccttcgccgccgcgcgtgtctgtcgccgccaccgccgctaaggccgacgccgcgcacgtttgtgttttttctttcctcttttttttccttcattttcccctcttttccaatgggtgtatgacatgtggagcccgcttgtaagtgggactagttatttcaaaagtcacaactgttgaaccaaacgagcttttccaaaagccacaccaatattccacagctacttttcgaaaagccacagcccacagctattttttcaaaagccacagctcaaccaaacacacctcagtccccacaaccttcatttcatagaaataacatgttttggagaaaattttttaaagttgaagatacatttacattgtaattacataaaaattacaatctaattgtattgtgattgtactataattacacaataaaggtacaggcaatccccgttgagctagttggcctgatagactggagggtggggagcgtggggctgggtgctgaggattcaattggaccgataatgagaggagatatatcctaatgggctgcacactgattggatcagcccaatagatgcatatctttcatgatcgtttatattagaaataagttcactttaactcccttaaagtgacccgaatctaatccgtaaccctgaaccgtaaaaccagaaatcttgacccctaaactattaaaaccggtgcaattttgactccccgggtggtttggagggcggtttcgctgacatggcggtgttgacttagtctccgtccgacgtggtgttgacgtggcgtttgtatggcattagaattaaaaaaaatgcaggacccatttgttattcgccaaaagaaatattgtgggacccacatgtcagcatctctctttgaccccttcttcctccctctctcccccttttctctctccctctctcctcgacaggggcgcgccgttgcagccgcgggcggtgaaggcagccgtggactcggcgttggtgctcacggcaaggggacaattgaggcaaagccgcgccatcctactgcggcgccagcgggatgacgacagggagcggcactgaggagactacaggcgacgagcttcatggttggtgagttatgaggaggaaggagagcccggagcagggggcggcatcctcctcgcccgccgctccgccccacttcggtcgatgggacaggagtcggagacggcgacgtcggcagagaggtcaacaccgacgccgcagccttgggagcaacaggtgcaccagcctgcccacgtcaccgtggtccccatcatagccagccctgcgccctagagctccctcgccgagctccgtaccgctggcgcctctctctctcaccatccctccatctcttcccccgatcctcaaccctgccccaccccaatcgaaaatggcagcatcggcggctcacatctagggcagcgttgccggtggctcacaggaggggaggagccaactggaggaggatgataaggcggcggcgtacgtagcaggtgggctcgttgttggtcattggaggcgaaggtgccagcctcgcgcgcgtgaggccggccaaacggtaggtcccatgtcgcctccgccctctcgccctccgccgccactccggcccccgcccgccgctgtcactggccctgctggccgaagggagagagagaaagagagagagataagggggagagagggaggaggaagaagggatagattgacatgtgggccccacatgtcagtgtgccccttttatttttcttgtgtgaatgacgaaggggtcctacgtgtatgtcttcaattctaatgccacctatgcaccatgtcaacggcagaccaggtcaacgctaccacgtggatgccacgtcagcgaaaccgctctccaaaaccatcgaggaagttaaattgcaccggttttaatagtttagggtgaagatatctggttttgcggttcaggatcacagattaaagtgaatcaaagtgaacttattccttcatattaggagaagtccattgtaggtcccttaaatatgggtcaacttaccacgtagcacctgccacgtcacaacgtccagccacggagggtccatgccattatgttgtccatgcggcggcgtggcatcaactggttcatgacaatttggatcgtcacaaatgttatgacgatgcctgttatcatgaacatctgtatcggacgactcgttttttttgtcacaataggtacggagcttccacagttctacgacgatgtttttttttatcacaagatcgttacagaacatgatttgtgatggaatcccgccggttcttgccaaaagtgccacttcaggaaagaccataactactagtagtgaatgatggccagattctgttgatatatggaacatatgagtaaggagggagggggggggggggggtttatgtgtatatcctaggtctatcttctattattgtcgaggatttcgacgagatggtggtcagatgtccgccggaggttgaactcctcatgctgttcgcagatattattagggctcgtttagtttttttttttcagttgcttatctttcgtttcgttgttcccctttctcctcttaattttagccctctcttggagtcgtgtactacccataggactcattgtattctaggagaccttgcatagagatattcttggtagtctctaatttaatcctagtcgagttcgagtatgtctcctacagtattttcaaagtagttctttattccttacgtgattggaatgtgatttctaagggaaaccatcccataaatatgtaggtattctatacggtattatttctaatgctataggtgtatgtcatgctttatacaccgacatcggtaataaaaattatatttgatatttgaaaaccaaacatgttcaaacttttgacattttgaccaataattttgtggttgattgatatagttgtattaccatcaaaaatttataaaattgtgatgcccagtaagtaattggagaaaaaaaagaaagaaagagagagagggaaaaaaaaaagcaaagctagcaacctattaacttaaggagcaaacagcagcagcagcaaaaaagcagcccagtactgtgctgtaagtgtaacatcgtgagtaaccgtagtaaaatttagtcccaatcgtccagccatgagagattgtgggcatcaccaatgtatatttaccaactactccctccgtcccataatataagagattttgagtttttcttgcactgtttgaccactcatcttattcaaaaaatttgtgcaaatataaaaaacgaaaagctgtacttaaagtactttgaataataaagtaagtaacaaaaaacataattacaaattttttttgaataagacaagtggttaaatagtgcaaacaaaaactcaaaatcccttatattatgagacggatggagtagtaaataaggtgtgacctagtaaaagtaggtatttattgttaaaagttccacaatgtataaccagtaataaggtaggttccaagataatgtaaagtttatcaccagccaatcgcatgaaggaagagggatgaggatcaatacatgccaaaagaataaatgttttttttactccttactacttggttgtagtgctcttacttgatagtagctatttactggttacacaatgcttactacttggtatgaagattaaaatattgcctattacctggtttgggagcacattgtggatgccgattaatgcccggtgactatttacttcagtttgaattgtctgtgtgaagcgagaacgaaaacgtaagagagttaaaagcgtatgtatgattcaactagatgagttggatccaaaaaccaatttcaggtcctaggcattacaaaaatctaataagctcatcatattatgctaccatttctaatgcatattacacatgcctatcaaagcttatgatattatgataccatttttattgcatacctacatatgctgtgtagaaccaagcatttgaggtattgatgatcaaagttccttttttttttataaattctatcatagacatcaaatactataagatttcgggtgtagttcacaccaaaattggaagtttggttgaaattagaacgatgtgatggaaaagttggaagtttgtgtgtgtaggaaagttttgatgtgatggaaaagttggaagtttgaagaaaaagtttggaactaaactcggggtgtgtttagttcacgccaaaattagaaatttggttgaaattgaaacgatgtacggaaaagttgtaagtttgtatgtgtagaaaagttttgatgtgatggaaaagttgaaagtttgaagaaaaagttgggaagtaaactcggagtcggccttacaaacagatgtaatatatccaatcaagaaaatagaaattaggttgttctgttcattctcgtccaagaatcgacgcctccgcccgttgttatgctcatcgtcttccaaaacttcacatctccaacttgtcacgctagctgttgaaaaagacctctattgtggcgattggtgatgcttcttcttctcttttactccctccgtttcactatgtaagtcattctagcatttctcacattcatattaatattaatgaatctagacatatgtatctatctagattcattaacatcaatatgaatatgggaaatgctagaatggcttacattgtgaaacatatgaaatatctctttggctggattgtataaagagagagagagaggaaggcatctatttggtgaggcattttatctgaaaaaaacatttatatgtgtcagggttatggataccacatacctaacagtagtcaactacatcttggcaggacccaccacatatcatgtcttatacggaaactgacctcggatatggagggagatccggataaggaaagacagccagagttctacatggaaacgatatggactactcggattgtatccatattggtttccctagttctacttagacaagaggacacctatgggtataaatacaaggccccctagcaggagagggggagacaatcaacacccaccacaatcgacagacacggaacaatagatcaaaacagaagccacattatacaagctaacatacgctaagacaagacgccggatatcgacttcagagataggcatggctagtcccctacggtgtctccggatactatcaggagagatgaaagcgctatctctgatctcgtcgagcccggattcgaggaggaagactaccctgttgtcgactacgagtcagagcttcagaccaccatgtcgacaacagttagataggctaccccaaatattgtactggtgtgattatgatgaataagagcaacgatcggcttcggccaacagaatgtagggttattacctaacaattcaggggcccgaacctgtataaaaatcctcgtctccgtctcttttacctaagtctcgcgtatatcctatgtcggtgacatgggatcgggagtatcatgactagaggtttgaggcagacacaatcgcccacgtggcctggcaccctcgggggacgtcgggcccgaaggtggtgtgttcgccctcctcttagtcccccgagggggtcgggctgcacccccctcggccccgagggccgaggcgccccgacccctcgtgggttttcgctccgcgtgtatggggtaggtgagcacagtggggctcacctaaccacatttattgcggtttggctgagcgtgtcacgacgcatgtaacgtagtgcattgcactcatttatccggtctgtgaccagtcacagaccggtcagatcgcgggattaggtggcgacaggcggtctgacgcacgcctcgccccatcccgtcaggacgagggcttctaggcgctcgtccccagctggagctagcgtgttacctcccagagatgacacgttagtcctgatcagatatatgccaggcttcatcctaaccattacaggcaaaatgtagtgtgaaggagggccaacgtgcagattgctaagctgacacgtggtggacaagaatgatcgatttgtgaccattctgacaccggtcatgtcgccagcagacagccatgattctacgtcgcacctgctcccggcgaaagtggaggtaggtgcgggccgtcccatcagaaggtgactcgaacggcaaccatgcagatctccgtccatttgtgaaaaggtagggtaagtccccataaaaaagggggggatggtgcatgtggtatccccttaagatataaaaggaggaccttgcccacggagagaaggggatagattttagagagagctttttcttggactggacctttccagattaggggcccagaacaagggagaggctggctgatactttgtagctctttcatacacagatctcccaaaaacacaggaatagggtattacgcttctcagcggcccgaacctgtatacatcgccggtgtcttctgtgcttcctgtctcgcgaaccttccacatacagattgggagtttagagtctcacccagggtccccggccgaatctgcaaaggggggccagcgcggtctcccggtgaggagccccacgctccgtcatcctagtaccaacgatcctcatactatacaaacaccggaatcgcgacatcaaacatcgacatcatgaatttttaatttttatttttacagggatacatgaatttttaatttgggatgtatacttacgaggagggttagagtctcatacatggataagtctaaattttgcgttatattaaataatgagaaaatggggattataccatcctcaaaacagggcttcgctgaaatgccatcctacaattgggattcgcccaaataccactttcaactgagcccaacccgctgaaatgccatcccaaatcattttcatcaaaaataaaagattttactctacttttcacatgagttgacgaaattacccctcagtcaatttcatccttagaaatcaatcggctgggagagcgagacgcatagggttagggttttgtccgcggcgccgatctgggcgccgccgcacgacctccctaccgccgccgcgccgccttgcccttccctccagccgccgctccgtcgtgccctcccctcgcgacgacgcggcgcgcctcccctcgcgccgccgctccgtgtcgtcgtccttcaccagcgccaccgcgccgcgttgcggccgtcccgtggcgccgacgaggtcgccgccctcccctcacgccgcggctctcccctggcgccgacgaggtctcccctcgcgccgcggctcggccggcgccctcccctcgcgccgacgcttggccggcgcgccctcccctcgcaccgcggctcggccggcgccctcccctagcgtcgcggctcggctggcagcctcccctcacgccgccctgcgctcggttgtactgcggcccctctccacgccggtctgtcgccgtctcagatctacttgcaggagtgatgcagatggattccaatgtttatgatatatgaactcagtttgagtgattatgcattttgtggttgggagtgatctgcgaatgatctgggaagcatgctcttaatgatgcttaactggtgttgtttgaatgctgttaatgatgcttaatgagtgattcttacgtggtgttgtttaaggcacgctcggtgtggtagttcctaggatgtaaaggtccttttttcatatgttcatcacatcctgtgtatatggtactctatatcctctaaatcgaatgaaccaggggtattttggtcatcaaagttgtgagaaaagagagaaaatgattttgatttactacaaatgaagagaatggcatttcagcgggttgggctcagttgaaagtggtatttgggcgaatcccaattgtaggatggcatttcagcgaagccctgttttgaggatggtataatccccattttctcattaaataatatagggtagaattggctcaaagttttgcaaatccgaacataaaatgcaactcaatacaaagacttacttgcatgctagtaattataagagcaagtttattagtatagtcaattgctagctctaaaatcatttacaaccaatctaatagtctactccatatacaatattgtcggtgacatgggaccgggagtatcatgactagaggcttgaggcagacacaatcgcccacgtggcctggcaccctcgggggacgtcgggcccgagggtgatgtgtgcgcccacctcttggtctccccgaggggggtcggaccactcctgcctcgcccccgagggccgaggcgccccgacccctcgcgggttctactccgcgtgtatgggttaggtgagcacagcggggctcaccgaaccgcatttattgcggctcgcctaaacgtgtcacgccgcacgaaatgcagtgcagtgcactcgtttatccggtctgtgaccagtcacagaccggtcagatcgcgggttaggtggcaacaggcggtctgacgcgcgcttcgccccatcccgtcaagacgagagcttctaggcactcgtccccagctggagctagcgtgttacctcccagagatggcacgttagccccggtcggatatatgccaggcttcatcctaaccattacaagcaagatgttgtgtgaagaagggcaaacatgcacgttgctaagctgacgcgtggtggacaagaatgaccgatttgtgaccggtctgacactgatcatgccgtcagcagacagccacgttcccacgacgcgcctgcctccggcagaagtggaggtaggtatgtgccgtcccgtcagaaggatgttcggagggcaaccgtgcaaatctccgtccatttatgaagagaagaaaagtccagtttggaaaggggggggtgcatgtggtatccccttgaaatataaaaggaggaccttgcccattgagaagaggggatttttctccagattcggaacctagaacaagggagaggttggctcacactttgtagctccttcatacacagatccaccaaaacacaggagtagggtattacgcttctcagcggcccgaacctgtatacatcgcctgtgcctcatgctctttcgataggtcgcgatctttccacatacagagagagcttgggatttcaccctgagcccccgaccgaaccggcaaagggggggcctgtgcggtctcccggtgaggagccccacgctccgtcatctggcgcgccaggtagggggcctcagcgtgtgtcttctgagctctcgcactctgccctgtgcaccaagcttttcctgttcagcctgatggccgagcaagcaaaggcgcacgacctctctccgagtgtgagtggcgacgacggggagccgaacccacgccgtcgagctcgtactccaccgccccctccacgccaaagtcctaagcggggggaggcgctcgagagggtcgaaagatccgcgacttcaccgatcgcgggcgatggaaaagaacggcgagatggggagcgtcgcctcctcgtctacggcgacggcagcacgccccagggcgcgctccaagctgcgggcgcgctcttacgccacccgcctgtcgtccctgacccggagtctccagcccaacgatggctggacgacgtggccaaattggtcatgacggcgcggcagtgtcacgcccggaaattcactagtaatttccgaacttatttgtgcataaaatcctcgtccaggaatcagccgaggtacacaaactgacaatttaatatacagattcatcaaattaactaaaacgataaatacttacttaagaggcactaagtcctcaccaagaagaaaactgcagcggaaaataaaatctagcgaagctccagctccactcccacaggcagctcaactggggtataagccaaacgtcttctccttcgcaacttgtcttcaactgaggttgattgattattgcaaggtgagcatatgacatactcagcaagccacacagcaaatatgcaagtgcacaaggataccaaaggatggcataatattggctcatttgcaaaagcagcatttagcaaaacatttaagagaagtaaaacagtggagtaattaatcaggaattttaatcaacattgaacagcacacccatgctgcacaggcccaaccatcctgaacaaccatacccggctgtacagatctaatctccaaaccaagagctaagcaaattattatcaggtataacatccataattattgtgagaggtgtgggactaatcacgaaaaacattgctcaactcgcccataaccgcgggcacggctattcgaatagttttactctggccagaggtgtaccactgtacccacaagacacagcctcaacatcatgtctaccatgcgtcgcgatactggaaagtacccgaatagaggctgtgacaataccctctgcataacacaactcaccacagtgcaccattcctggatcataatcacccccttataaaacaaggcatggactccccagcgacccccgtgggcttatctccgccacttctcagtctggtgccccgcaatgaaccatgctatacaaaaggtaaagccgttgcccacgctggcttgtggttggcacggttaatgtttcacaacagtagctcgcgaaccggtccttaattgccatgagcacgactctcaaaaccatgtgctcacaacccaccattatcaagttttagttggcaagaaattaattaaccaatcacgattgaccatcgtgagctaccattaaaccatcattaaataataatgaatcataagttatcccaatagtgtgctaatgtttctaagcatggctaagcaatcacatctaatatctagctgaaccaatatataaagctcaactagtcaaattataataacccaaggtatcaaggattaaagtaatcaatgcaaacaggccataacaaaggaataggttcacaccacccagtgacattcgaaaataaatgcacagttgaaataaatagagaatttaaatataggatcaacatgctcaaaggattgtgtttaggatctgtgtgacttgccttgcaataatcggtcttcaattaatcttcttgaacactcccgacgcactcacgaaccttcgcaacgacggaaacgacaagctaacacgcaaaacgaagaaaaagactaataaaaaccaaataaacagtacataaaaagtaaacaaacatgtagatcatatttttagatgaattatgagacttgaacggcctcattctgacttcaaatgaatttattaagaattttacaagattaaatctaattaaagcccatttaaaaagaattaaataaatttaattcaatttatggacaattttaatatgtagatctttattttatacaacttttgcaacttgaaccacattaaactgagttaagatgaattagttatgaatttttaaagattaaatcggattaaaacctttatatggattttaattgaattatgacgcaataatgaattatttttgaaaaggaaaagaaggattattgcgtcagcggctagggtttcggtggaccgggcgcacgggcgacggttcacgggaacggacggccgagatcaaccctatccaaaacggacggctgagatcgatcggtccacgaccggctcacgggaaaagggacgatgacgccagcgatgacgtcaccgacagcggcggcagctcggcggagcggatagctcgggcggcgcacgctcgccggcgaacggcggcacttcggcacaaacggagggcaccagcacgtagaggacgacgcggcgaactcaccggtgaccaaaacggcggcggaagaccaacggacggcggcggcgacgaggaggaagcggcgaagctcttcgggtcgacgacggcgatggcgctccgacggtcttcggcggcggcgaagcggtggacggggacggcgacgacttggcgaacccgatggtggcgacggcgaccgacgacggcgactgcaacggcggcgcggcgcggctgaaccgacggcaacgacggcggcgactagggctacgcggaggcggcgctagacgcgacggcaggctaaggcaaaggaggcgacgggtagaggggagctcgggggtccttatataggtgcaaggaggcggcggcaaaggcccacggcggccggcgacgagaaggaaagctcgcggcttgaaggaaagaggccgatccgaatcgaactctattccacgaacttccaaaacgatttagccgatgtttccaaaggagaaaaggtagaggagatcccggagattgtttcccctcaatcaattcggccggagaaggaaaggagcggccggatttggaaggaaacggcgacggcggcgcgctagggtttcgggcggcagcggcggctcgaggaagacgaacctgacacgtgggacccacctgtcagcgacaccgagagagagaagagtggcggctcggcggactgggccggctgggccgagggaaagagagagaagggttttgggccggctttcggcccaaagccaaaagaagactttttaaaacctttttcaattaaattatttcttaaatgcaattccatttattaaaaatacttccttagctcaaataaatcccagaaaaatctaggaattatagaattaagcaaagtatttaatgaaattttatctggcccctttttatattgagatttagcaaattaaaattagatcttctcttttaggcttttaaaatcatttctaataattccttttaaacaaccatttataagttaaggatttttaaacaagaaaagatcttaacaattatacttagatcattaatgatcaaataattactgaactattctttgtattatttaagaattgagctctgaaaaatccgagaaaatttcagagagttgacttaaccatggagaatttaacaaaaattaaatccatccatgctttagatttagaaaattttatttcccacattttacttcacttgaaagttaaagatcatttaatataaattctattaataatttattaaataatttataaatcctgaaacgaaaatcaggatgtgacaggcagcgcctagatgctggtggacggtcctccgccaccaaggcctctggtgctgctaccaccggctccgcgtcgtcaagacggagggcacgacgagcggcagccgctgttcgccgttcggctgccactccttcgtcgactccttcgacccgggaagatctgcgtggggagcaggacgcccacaccagcatcgagcgccggcgtaatgaccgaagtgctgcccacgcaacggagggcgcttcctcgtccagagtgtcacctcgacacggacgtgggaatcagccctccgtgcccccggttggtggtgtcggctgtagagcctttgtggcgagtcttcggaatgtccgttggcccccaaggttccggcccaccatcgctgaaaaatatgatggcagcatcaaccccgccgagtttctccaggtctacacgaccgggattgaggccgccgggggtgatgacagggtcatggcgaatttctttcccatggccctgaaggggcaagcgcggggttggctaatgaacttgccacccgcgtctgtccactcctgggaggatttgtgccagcagttcactatgaactttcagggcacatatccgcgcccaggtgaagaagcggacttacacgcagtacagcgaagggatgatgagtcgcttcgctcgtacattcagcggttctgtcaagtccgcaacaccataccgtgcatccctgcacacgcggtaatttacgcgttcaggggggggcgtgcggcacaaccgcatgctcgaaaagatcgcctccaaggagccccagactaccgcggagctttttcagctcgcggaccgagtggctcgcaaggaggaggcctggacttggaacccctccggttccggtgtggcagcttcggccgcccccggatccgctgctcaaacagggcggcgtgacaggaggaggaaaaagaggtcagtccattccgacgacgagggtcatgtcctcgccgtcgagggcgcttcgtgggccacccgaaaggggaggcctgcgagcgacaaaaagaaggaggccagcgctcccagcagggagcgccccaccggcaagtggtgcaccgtccacaacacctccctccatgaccttgcggactgtcgcgcagtcaaaagcttggctgagcggacaaggaagtgggaggaggagaggaggcaggggcgccgggaaggcaagtccccggcggttccttccggcaatcggcgaagtgaggccaagcagagggcccccgccgaggacatcgatgatggcgatgatgacctaggtttccaagagcctggggccaccattgccaccgtcgatgggggagcgtgtgctcacgtttctcgccggagcttcaaggctatgaagcgagagcttctggccgcggcccctactcatgaggcgacgcgtcgggcgcggtggtcggaggttgccctcacctttgaccagaccgaccacccaccgtgcgttgcccggggagggcagattgcgatggtggtttcccccaccgtttgcaatgtgaagttggggcgagtcctcattgatggaggagcagccctcaacatcctttcccccgcgacctttgacgccatcaaggccccggggatggtgctccggccgtcccagccgattatcggtgtgacgtcgggacacacttggccgctaggtcatatcgacctcccggtcaccttcggtggatccgccaatttccgtacggagcgggtgaacttcgatgtggcggacctcagtctgccctacaacgcggtcctggggaggcccgcgttggtgaagttcatggcggcggtccactacgcctacctacagatgaagatgccgggccccggtggccccatctctgtccatggtgacctcaaagtcgcgcttgcttgcatggagcagcgcgtagaccatctcgccgccgcgtccaagcccgagggtggcgatgagaggcttggcgcctccgcccccgctaccccgaggcagcggatgatcacatgcgacgaggtcccggtcaaggaggttgccctgggcgacggcccgtccaagaccacgcggatcggtggtcttctgaacggcaaataggaagacgcgctcgtctccttcctgcgggcaaatgctgacgtcttcgcatggagaccggcggatatgcccggggtccccagggaagtgattgagcaccgtctcgccgtacggccgggcgcaaggccggtccggcagaaagtgcggcgacaggccccggaacgtcaagccttcatccgcgaggaggtggcgcgacttctggaggccggattcatccgagaggtcatccatccggactggctggcgaacccggtggtcgttcccaaggtgaacggcaagcttcggatgtgcatcgactacaccgaccttaacaaggcatgtcctaaggatccttaccccctgcctcgcatagatcagattgtcgactccactgcggggtgcgaccttttgtgttttctagatgcatactctggttaccatcagattcgcatggctagggaggatgaggaaaaaactgcgttcattacccccataggaacctattgttatacgacaatgcccttcgggttaaagaatgcaggtcctacttttcagcgtactactcgaatttctttgggtagccaattaggacgtaatgttgaggcttatgtcgatgacttggttgtaaagacgcgcaaccaagaaacgttactctcagatctagcggaaacctttgagggtctccgctccgcccgcataaaactgaaccccgataagtgtgtgttcggtgtacctgcgggcaagcttctcgggttcttggtctctgcccgaggcattgaggctaaccccgagaagatacgagctatagagcggatgcgcccccccagcaaacttagggatgtgcaatgcgtcaccggttgcatggccgccctaagtcggttcatatcgaggctgggagagaaggcgctacccttatttaagctcctcaaacgctccgggccgtttacttggacggaggaagctgaacgtgccctcactcagttgaaggcgtatctcagctctcccccagttctagtcgccccggagccaaatgagcccttgctactctacttagcggcgaccccgcaagtagttagtgcagcattggttgtggagcgcgatgaggacaatcctcactccacgcatcccaaccctgtgctgactcagcccgggagagggcagggaggagaggcccccgagccgaacggtggcccaaggcccccgacgaccggagttggctctctgcccgcttgtcagatggtgctaggagcccccgacccacaggaaggccctgaggccactatgggaaggccgcacctatcaccctttgaccccgaggctcaccctgtgctgactcaacccgggaaagagcagggagaagaggcccccgagccgaacggaggcctaaggcccctgacgaccggagttggccctttgcccgcttgtccgacgacaacaggagcccccgacccccaggatggccccgaagccactgaggtaaggccgcccctgttatcctccgaccccgaggtcatcagcaccgaagacaagtgtgccccgcgaggctgcttggacgaagagtgccccagggatgcggcccctagcgaagaggatcggccccaccgaaaggtgcagcggcccgtctactttgttagtgaggccctccgggacgccaaaacccgataccctcaggcccagaagatgctttacgctattctgactttgtggcagagtggaccccggctcccgagcccgtctcgatccctgaggccagcacggacccctcgcagttgcctcacaccgcccattgggtgatgcagttcgatggctccctgtctcttcagggcgccggtgcgggggtcacattgacctctccgagcagagacgtcctcagatacttggtccgcctcgactttcgagcgaccaataatatggcagagtacgagggactccttgccggactcagagtggcagctggactggggatccgccgcctcctggtattaggcgactcccagctggtcgttaaccaagtctgtaaggagtaccggtgctctgatccgcagatggacgcctacgtgcgccaagtacggcgcatggagcgccattttgacgggatagagcttcggcacgtgcccagacgggataatatgatagccgacgaactctcacgactcgcgtcctcgcgagcccagaccccaccgggcgtctttgaagaaaggcttgcccagccgtcggcgcgacccgaccccttaggggagatggacgcgcctgatcggcccccgaggcccgtcggagcccaggcctcgggacccgaggggagcgctcctagctcccttagattgattgcttggatcgctgagattcaagcatacctcacagataagactctacccgaggaccgcgaagggagtgaacgcgtccaacgtatctccaaacgctatgtgctggtagaagggaccctctatcggcgcgcggctaatggagttctcctgaagtgcattcctcgggaacaaggcgttgtgcttcttgccgatatccatgaaggcgaatgcggagcacactccgcctcgcgcaccttggttggtaaagcttttcgccagggtttctattggccgacagctctcagtgatgcggtcgacctggtccggcgatgtagagcgtgtcaattccacgccaagcaaatccatcagccggcccaggctctgcagaccataccactttcgtggccatttgctgtctgggggctcgatatcctgggaccgtttaggcgggccccgggcgggtttgagtatctgtatgtcgcgatcgacaagttcactaagtggcccgaggcttatccggtcatcaagatcgataagtactccgcacttaaattcattaagggcatcacggcccggtttggagtgcccaaccgtattattacagataatggcacctaattcactagtgaactcttcggcgactactgcgaagacatgggcatcaagctctgcttcgcctcacctgcccaccccagaagcaatggccaagtggagcgcgccaatttggaaatcctcaaaggccttaaaaccaagacttacaacatactcaagaagcacggcgattcatgggtcgaggagttgccagcggtgctctgggcaaaccgaactacaccaagccgagcgactggagaaacgcctttcttcctcgtctacggcgcggaagcagttctcccatccgagctcaccctgaggtctcctcgggccaccatgtactgcgaggctgatcaagatcagcttcgtagagatgacctcgactacttggaagaacgaaggcggcgcgcggccctccgagccgcgcgttaccagcagagcctgcggcgctaccatcagcgccaagtccgggcccgatcactctgcgtcgacgaccttgtcctacgccgcgtccaaacgcgtgctggattgagcaagctctcaccaatgtgggagggtccgtatcgagtgatcggtgtcccccggccgggttccgtgcggctggccacgggcgacggcacagagctgcctaacccgtggaacatcgaacaccttcgtcgcttctacccctgagagggggggtcgggtgtcaggtttcgggctcgggccaaccccgcacccccttgggcgtgcagggttggccgggggctgccacacatgcacattcttatttctcttgtttcagtatttcaataaaagaagtttcattctcctaaaggccgtatctgtgctattttttccttttgaagaatcttgacttgaaataggtcacttgtgctcaatcctgccctcgggggctcgggtcggctaaaaccgccaaacggggcccagaaccgagccgtgccccggggcgtggtgaactccgggggggaatcggcaaaaacccacaatcgggtcacccataaccctcggtcaccacgtttccgccctggccagtctcgacatgtggatctccccaggcactagccccgacccgcgccttttgaggattgggacttggacacgagcccttaatcaagctaagacacaaaaggaccatggcacagatcgtcctcatctcatgcacatagcaaaatgaaattaacacaaaaaatttctgcatttttgattacagattaagttggtctatacaaaaaagaggcccgaaggccttagaagaaggaaaaaaaaggaaaaactaaagactgggggcgccctgggggctcagtccgatgctcccgggtcgccggcctcgtcgtcactatcgtctgcacctccggcatcgtcctcctcgtcggagttgggggcaaacgcgagccgaggggccgagccctcgaagctgtggacgatatgttcggcggcatcccgaacccgcgcgcgcgcgtcgtcctcggtcccgggagggaactcatccagcgccatccatggggagaagttggggtccctggcctggtaactcgctagtacgagttccaccgctccttgggcgaggtccctcgaggatgacttgatggtcttctcgagctcctcggggagctgctggagagccccggccatcttcgagaggtgctgagcgaggcctccctggttggtggagtacttcattgtctggcctttccagaggcccacttgccgaccggcgcgatccagacgggagactgcatcccaaagcatgccgggccctatctcgctcgccaagcggagggcctcggcttccccggcggatgagtctagcgcgcgctgcatgtcggcgatggtgagttcggtagctgcgaggcgggtggctaagtcactttcgcccgcagccgccccgccgctgcgtgccctcgagtccagctccttttcccgcgcctcgaggtcagcggcccgctggtccagtgcggccctctcggcgcggacacattctagattgcggcgtgcctgctccgccagcgctgcctcacggagggacaggctgtcatccaaccgttgcgccgcggcctcggcctcttcgagagctcgctcccgctcggtaagcgcgtcctcgcggaggcggagtgcggactcctcttcggcgcaggcagactcgtgcgccgccagcgttgcctcccggatggcgacggcggcctcgcggtccgccaggtccttctccacgacgcaggcgcgctcttccagcgccatggcgcgcgcctcaagggtctcttcgcgctgtcgggacgccgcttcggtctccgccgcccgctgctcttgggcagcggcagtgtcaagcaccctttgggcggcgtcgagctttttccctagtgtcacgtcctgataaattcatcccgaaataaaaatcattcgctaaaaggaataatagaattaattaaaattcgaaaagaaattggcaaacactaaaatacgtgcaagaaaaattcaaatgtggcccagagaatttttgttaaattctccttggtctaaaaggagccctcaaattttacttgaattttcagagcaccggaaataattattaagcaacaaaaacaattaacaaagtttattaaaaagaaaatctaaaaataattctcctcctcctttgggccaagcccagcccgaagtccttctctcctccctctctttctctccctccccttctctccctctctctcccgggcctctcttcccctcccgggcagcccactccctcctctcctcctccttctgggccgcccctccctcctctccttcccggcccaccttctccccctcctctcctcctgggccgtgtcccggcccagctgagccgccccccccctcccgcgcacgtgcgctgaccgcgcgccgcgcgcgcgctgacgccgcccgaccgcgtggggcccacgcgtcaggccgccgtcgcccccaacctccagccgcccggccccttcctctctctccctcccgtgcgaaccctactcccttcctccctcaaatccgcgcgaatcaagcatgggattcccaaattgattgaggggaattaatcccctttcccttctctctatttcccccttaatttccccttgaatggtgcccccaatcgccgggaacggccgcgccaagtccggccgccttcctttgccgccggccaccattcccgtcgccgttccgccctctcccgtgctcggctcgcttccctcagctataaaatgcaacccactcgctccgttctatcgctttagccccctcccgcggtctcccgtggtctctagccacctccccaccgtcgccctctctctcccacgttgccggccgcctccagccgcctgtgccgcctcgaccgtgcgccggccggccgcgccgtcgcctcctccagcgtcgccgccacctcctccaccccggcctgccctccgtttcgcgcggtgaccgccggaggcgcactcccgccgtcgcccttctcattcctccttgccggccacctccagccgcacctcccgcctcgcccgtgcaccctccggccgcgccgccacctctcccggcgtcgcagccgcctcctctttcccggcttcgcctccgtttcgcggggaaatcaccggagacgcgtcctcgccggcgtccagtggcgtcgccaccacttctccgcctccggccgcctctgccgcgtccccggtgcaccggccgacgtcgccaccacctctcccggcaccggagtgccgtcctctctcccggccaggccacggcgtcgcccgaatttcgccggaacgccgtcatctccgcgccggcctctccttcctcctcgtcggctcgtcgccccgctgcaccaccaccttcaccaacatcgcagcggcgtgttccacgccgtcccctcctccactcagccgctgctgcctgccatcatcgtttcatcgtcgtctccgatcgttctcgtcgtcgacgtcccgtcggtcgcccggctcgtcgtctcgcggcgccgcctccgtcatcgtcatcgtagcggcgtgttccacgtcatcctcgtccccgtgcagccgctgccggctgtcctcgtcgcctcctcgccggtcccggtcgtcgtcgtcgtcgtcgtcctctcgtcgttcccggtcgtcgtggcgttcgtccctccgtcgagccgttctcgtccgtcgtccgcattcgtcaagcgcgccgctgcagccccgtcctcgtcttcgtcctcggctccgcgtcgtcaagccccgtgccggccgcgtctcgccttcgtccaaggatcgccgccgaagccgtcccctcgccgttcgtctccgttgtgcccgtctgtctccgccgcgcccgttcgtcgttgtcgttcctacgcctcgtcgcgtggtggtaaggatccgtcctctcgctgccccgttctcgtcctttcggtgtcgcccgtgcccgttgtgcggttgacgaccccggtacccgtgtaccggtgtcggtagtcgttcacgcgtgcgggtggtgaccgtgtagtgtccgcgttagtgtgcccgctcggtagccgcgtggtttccacgtgtgcaggccgtgtggtgtctagtggagtccgtttgtcggccactcgcctcggttgacacacgggatccgcttccgtcgacccgtggaccgactctgtgtactcggtctaccgcggtcctttaggttgacatgtggggtccgcatgtcaacggcgcagccttcctgtcttttccaggctagcgcttgcacatgttttataattgcaaagcttgattataataatccgcaaatctccatataacagcattaaacctcggatgatcatatcttggtcatacgaactccgaatcgacccgttcaagtctcttaatgtttgttataacctaaagaaccctgtgctttctttttatgtattgttattgcttctttataggcttgtagctttgcttgtgtgcttcgcgtagcttctgtcgttccggaggttcccgaagcgtggttcgtggtcgtcgccgaaggttcggaaggccgttctctctgagcaaggcaagtcacatcatccttgagcatattgaatcccagtttacaaaattatttttaatttaaattaatgcattatcgctttatttaaattcccgcgttatcactgttttatttagccatgcctatttacctttgttatgaccttaatattattgttattgatattattaccttgttcaccctagattaaacaaaaccccaactagtgggtactctatttatggttccactagtatgaacttaggtagatgcttcgctggttaattaggcaacattaggtgattttataactttagactttgggaactctcatatcatttggacactatggaatggttggcttatgttggaattggacacacacctccccctcttttcaaaacccccaaaatggtttaggctgggctcgaggtgcgtggttgggttttgttagtcgtacctcgggtactataaggattaagcttgggcctctgttgcaaagcactaccgtacttccacatgtctagtgggtaaggcttagtttgtggctcagcctggttataaacaaaagtacacggattggagatggatgaagtcgggggtcgatggacattctccagggcaaatgaaggctacacgagctgcggcccggtagtcgagatgtcatggcagagggttggtgccctgctgctagggggctcagtcctgcctgcctgtcccgggtgtcccggccgtagggggattgggtcggtactcttgtttatggctaggatgggttgggaactatgtcacgtcttccgtccgtataccgtggtggtatgtggcacgtggttgcacgtgaggaagatgtgtcttgtgggtaaagatgtacgcctctgatcagagtataatctattcgaatagccgcgccctcggttatgggcaagccgagcaatgtacccaagtcagtgttttaattcttaaaatttgctcaacaactaaaatgtggaatggttggcctgggttggcttgggacgagctgggacccagggtcgggttgccagttcggtctgaatcatcgtaggccttgggttaaggcaggttcgtgagggttcacggccttgtttaataatactgtgtagctctaggatcgtctttataaaatggctttgggcaactaagtgacttttaaaggctgttactgcaaaacttaacccctatattattatccccttgtactcccttgcattaattatgcatctccggtgtggcttgctgagtactgtggttgtactcattcttgctctatctttctccccccttcagtaagagaagctttggagaagaagtcttaggtggagtcctggcttataccccagttgagcgcctgtgaagatggagctgtaggcccgctagtccgctgctgtttatttttgattgtcaggccttaagtgcctttgtaataatgtaaatattatcgatataataaagatgtgtcttttatatcatgtttgtgtggtgtaccccggcttttcctgggacggggattaatacactagcgttcgggaaaaggcaattttcccggtcgcgacaagctggtatcagagccatctcgactgtaggataagccaagtggataaaacctaaggacatattttataaataaaactatttgcgaaagttcctctttttctccttcccctaatgctatttgcaaagggtttacccttttcttccttcttcaaatttcaactagtactagatggtcagctttgcgaagaagaagatgtcgtcagttgtttgccgaagctccggaagaatgcaggatccgctagcgaagtggaggaagcagtgaagccagctgtgaagcaggagtgaagatcttagaaaacccgtcgcagaacctaagccgccctatagggtagtgttgttagtcgtgtgttccttgcttgtgtgtgtagcgcgtggtttgcatcggtgggtggtgatgtaaccatgctaggttgtttgcttaatcaacttgcagaataagcaaaacaaacaacacatcaacaaaaagagttagttcctttaaggtcctgtccctagctctggtctattctttccttgtatgcttcctctctcaacccctaccttgtgacagatggataacactggtaacaaaggctatgggaatgatggatccgatgactcaagaacccaagccaatgggaatgagaaaagcatcaacgaaacctcaccagagctaatccaaattgtggttaaccaaaccaacatgttggcaacagcctttcaactattacagaatcggaacaacccagcaggggcaaccaacgttcaagtacctacagtccagcaacagtgcaagttatcagaatttctcaaaacggggcctccaacctttgccatggccgtcgatcctatggaagccagtgattggttgcgcacaatcgagaagaagctagggttgattcagtgcaccgaccaggagcgggttggcttcgcaactcatcagctggttggaccggcttcagagtggtgggatagctacgaagcatcacggccagaaggacataccatcacctggaacgagttttcatctgtattcaagagatcacatgttcccgcaggaatgatcacactaagaaaacgagagttccgctacctgaagcaaggagatttgaccgtcacagagtacctgcacgagttctatcgtttggctcactatgcaccagaagatgtggaaacggatgaagacaaacaagagaagtttctccaggggttaaaagatgagcttgcagtgcaactacttctagaggattatgaagattttgagaaacttgtggacaaagccatgcaactcgaaagtgagcataatcggatgacgaactgcaagagaaggattgtcaacatcccagtatttccaggtggtaaccaaagacagcgcactgagccacttcagatcaccggatcttctgttgcgcatcaagagtttccgccccaagaagatggacgcaatacagacaacaacactagcaatactaatgatgatgataccaccaacaaccatggttcttgccccattagtgaccactcgaataaagcgtgcaatgtcagtagcattcaccaagatgtcaacgatagtatcaatgttggaacccagaatgacaaccttagcaatttcgacactgagaaagactccaatggtgatagcaactatggtaccactgatgccaatgttagcaaggattcccaaccaccaattccaactccaagtcaaaatgatcgtccccagatggacagctcagtaaagaagacgttgatttgttacaactgcaaagaaccagggcattactcgagggactgcctgcaaccaaggcaaagtcgacctccacattaccgccaatttacacgaagcagacatcccaatcgtattgtggtcactggagcaaacgccgtacccgtaaggcctcgggttaatcagaacccatagcagaaacaatgtaccaatgccaatcacctttccttttaggcagtgcttagtattcatgtaatgagggagaaatgtgtaatacagacaagttctgagaggattctattggaagatgcggatatgtgatcatgtgtataattgtttactgaaaaaggagacctagggtctcgtgccagaggaactatattctaccctcgagctaataacccacctgaggatggaaaagaaaatcaagtgattaaccaaagagacatttgtttggactaagagtttcagatgtgtctttttcggatcaaaggcaatgacagtcagtatagcttttggcgaaacacttcaaggtttcactgaaaggtagcagaccaaaggacctcatcgccaccagaagcatccacaactctcggagtgaagagtacttagtgacaaaggtcaaaagatgactgatagaagatatcgaaaaagatgtttattaccaggcaaagaagtaggtcgaaaggtgattgataagagaaatcgggaaagaacacatcaaggtcaaagggtaaaggaatacgttgaatgctaactgaggacaacatgaagtgaatagtggtaagttagaagtaaatgacaagcatgatattctcatgataacaagcatggtatcctagtaatgacaagctgatatcgacgcataacgtgaagtgggtaacttgtatgaggttgacgccaaagatatgaattatgagaagtctggaactgaagtcccatcttcaagtgccacaatccagtcgaagtcagctagaggtgcaaccagggaaaagtcaggtgaagagaagattccatctgcaacaggagattgagccaagcagtccagagtggagaagttttgctaggcaagtttgttataaaagatgcgacggaagaagtcggacaagaagagaagaccgcccaacctatcttcttgctagcctcctcgaatctcggggacgagattcttgtaaggggggtggatttgtcacgtcctgataaattcatcccgaaataaaaatcattcgctaaaaggaataatagaattaattaaaattcgaaaagaaattggcaaacactaaaatacgtgcaagaaaaattcaaatgtggcccagagaatttttgttaaattctccttggtctaaaaggagccctcaaattttacttgaattttcagagcaccggaaataattattaagcaacaaaaacaattaacaaagtttattaaaaagaaaatctaaaaataattctcctcctcctttgggccaagcccagcccgaagtccttctctcctccctctctttctctccctccccttctctccctctctctcccgggcctctcttcccctcccgggcagcccactccctcctctcctcctccttctgggccgcccctccctcctctccttcccggcccaccttctccccctcctctcctcctgggccgtgtcccggcccagctgagccgccccccccctcccgcgcacgtgcgctgaccgcgcgccgcgcgcgcgctgacgccgcccgaccgcgtggggcccacgcgtcaggccgccgtcgcccccaacctccagccgcccggcccttcctctctctccctcccgtgcgaaccctactcccttcctccctcaaatccgcgcgaatcaagcatgggattcccaaattgattgaggggaattaatcccctttcccttctctctatttcccccttaatttccccttgaatggtgcccccaatcgccgggaacggccgcgccaagtccggccgccttcctttgccgccggccaccattcccgtcgccgttccgccctctcccgtgctcggctcgcttccctccgctataa

SEQ ID NO: 9763 - DNA, 14706 bp, Oryza sativa
tcatctagatccctcgcggtgatggattgcaggtgttggagacacaacccaaactcctcgattccaacttcaccaccaacatgtcatcctctccgacatgggaggagatggctaaggaaggctggcctgtggattttgctgccaccaactggcaagaggggtaggtcactgcaatggagcggcgggtgtcgacgaccccccctccccctcctcaaacattagaaatccaacaacaggattaggacggtatcaccctttggcctttgctagcagtgggcagaggcggagaagaggagggtcgtgaggagggagctagagttggtggtagagagaactcgatatggtgctggaacattgaagattgtggcgcggtgaccaagaagccctgggaggtagctcgacgaaaggctaggcgtcacatccccattgtcgccacacccaccattaggtgatgacattaagaggcgtcggagtagaaaaaggaggtggcgaggaggcttgcatatctgcattggttttgatcttctcctaagagaaagccatggtgtgttttcctttctcctgttccctggtttgtcaactagtagatcaagaagatagataatgatgtgcgttctaacccgcgcatgcaaggcacaagcgagttcctagcgaaggcatgctcacgcaacataccatccgtcttatccaaaccagcttctactgtcgtttgttcggcgcattacgttaagcacttcgtgcgcatggcacaagagcggctagagaagtcacaaggggagaagtggagacgaggaggtgagtggggggggagggattgaggagttggagcataagtgtgcccatggcctctgcattagcctaccacacttatgggtacaataacattttcattttggacatggtaagtttaccaaatattttagtttgaacgctttcttctctagccttccctttctcttcccctcccctctctctcgctcttcaagtttgatgtgttaatgagaaaggcttggctaagttccgagcacgaggccctaggtagagatcaagcatgagcttgagtatatggctcatggtgccgatagagcgatagagatcgagcttagatggccagagcatgaggatgaaatggtgctgataaaggtcaagcttagatagtcggagcatggggacaaaaaggaaggcaagaccagtcctcaaggactatgacaatgggtgacgctccaaggtcattgtagtgggagttgtgcatggcgaggctgcttagggataagatggaggcgggcggtggtgctccatggctgcaacataaggagccgcttttgaacaatacagtgggagttatctgagaatggtggtgatgaggcgatgcttcagggctacgacaatggagtgggtcatagatgtggtagcaggagacactacaaaaagatcgcgagctcaacaccagctcaccagcatgacaatctagagtattgatacgggaggatggagaataagggtccaaattgaaaccttttgcaaacttatatatagtccaagctaaaaataatgccttacccctagtccaaactatcacatcgataaaaacatatagttcactgtgcaatttactatcgaaaaggtaatgatatttcattcctaatgaccgtggaagagtgacgagtacacctcatgagattaaaaccttgggaggctagggaggaaacatgtcaacaggattcatgcctttcaccatgatactatacatacatactaacaccattgataaccgatccacctttttctcacaaaacttggttgagcccgttcttctcttttatcttctccaattcagcacacaactgatgtggcaacttatatagtccgtttacatcatctttttatacttactctaaggtggtgttcttttcttctgaagatgaagaataagttttttacgcaaaacgaggtggtattaacgtatgattgattgagttttaactattacaaacttgaaaaaaaattaatatgatattttagagcaccttttatatagaaagttttcgcacgaaacgcaccgtttagcagtttaaaaagtgtgccacaaaattcttaatcttcatccatctcatacaactcatgcgtgcgagccaccctctacacatgtaaccaaatgtagcctacatacatttctatgacctttgtatcaatatgttccatctaacttctttgcacaaaatgattgaatagatttactgatgaaatccaataaaagttttcaataaaggtttaatatctggtgttaaaaaaatatatctaggtggtgatttggcgctaggtaaggggttgatgccccattttgcctactagtagtgagctaggcggttggattacctcggtggtcaactttaacacttagagggtgtttgggaactagggactaaatttagtccctctcacaaaaggataagtccctatggtagggacttatacttttgtgagagggactaaagtttagccctactttagtccctccaaccaaacaccaccttagtaggcctagtcacacgatggcacgaaagtgacgaggcaagtgccgaggtgactagacggggtgcgaaatagtagtttacaaggtgacaaactctatctttcccaaattagagtgggcgggaaaaacctgagagccctacccagagatggctagggattaggaggacgaattgggttcccaactcactgctactggccaacgcaatttgtccatatcctcaattcatcgattcccccaagtccagttgttgtgcccctatgcgtcaaggctctcgatgctcgaattagtgacacccttgttggtggctttgctttgaacgtgccatctccatgctactagtcgccattaatcatctatacaccgccggctactcaactccaccaccatcctgaactagtaaacaccactttttgttgaatgctatgctccgttgatgcttgagcctatggattttactttttttttctattcttgctctgtttatttactctagtttctgttctacatctctatcttcagttggaactaggggccgctgtgttgaacactactaatattcataatagtattctctccgccccaaaatataagggtgtgtttggtttgtggtcaaagttgtataggatatggccatccatatttataaggatatggctctctatccaacttcgtagtattaggatatatctcatctatccaaaatgtcttatatttttggatgaagggagtatccaactttgtagtattaggatatatctcatctatctaaaatgccttatatttttggatgaagggagtattattttttaagttgctattgtatagcataggtattgaagaaaactctccctttcacgtgtgataccataattcttatttcctccgctttaagacatagggcatgtttggtttaaaaccctaccgagatgtaagtttaggtactaccaattttttttgttaggcaagagtatatcaactctattgattttggcataagttagcatcaatctaaatggctagtactccctccgtcccaaaataagtgtagttttacactgttcatgtccaatgtttgaccgttcgtcttattaaaaaaaatgattagtatttatattgttattagattataaatatgaatagtactttatgtgtgactattttttaaaaaaagtaataaattttacatatgagacggacggtacacggatatacgactgtacttattttagaacggaggtagtatatacaattaaagttgtcaaatgattggtaggcaaaatttaacaccaaactaataacataaagttaatctaataatatattctaatactataaatttggataatacattcgatcatagattcgttcttcatgtgacggagttactatgcattttgaattgatggagtattcatgttgacagcggaaattttctcttggagctactgctcacagttaacagttgacacacacataaattcaccaacaccatcatgactcgcgaccaagtctcactcacccatccactcaagttgatatccccccgttaaatccactgtctgaactcatcactgcccttgtcacacaccaggaaacaaaaaccctgttcagtacgccaagcacatcagcccggacactgacaggcctcacagtcccctgtcacgtgcacacgcccggtgccacaagtccatccgccgcagaagatcccgcgcgagttctaatctagcccccacgcttcgtccaacgaacgcctccctccctccgtccctcgtactgcacgagagagtcgatcgatcgatcgatcgacgaacacgcgcggtcgcgcaccaacaccaacaaacccgtcaccctccatacggcgccaatttccccccaccagaaaacgtccccgcgctcgtcaaaagcacaaaagcaacccccaaagatcaaacccccaagaaatccaagcactccaccactaattattctgcccatccaaatattcctctcgtcagaactcgtaccggtgctaaggagaaaaaaagtcacgcaaaagaaaataaaataaaaagggaagttggattgaggagaggaggccaaaaagaaaaagaaaagggtttggttttattataggagcgaggggagtgtgtgtgttaagcgcggccgcatagaatggaagcgttccaaatcggaacccaatcccggaggcgcatgaataatcatccaccagttcgagtagtggtggcagtagtagtagtggtagcagccgctctcctcctccttctccctgttgccgtgctgttcctgctgtttccccaatctcctcctcattatatccctatctatctactactactcgcctcagcggctgctgtggctgccgcctttttggccttgttcgtggtgttcaagttggaattattaccgctgtttttgctgcgatcggtgttggtggtagcggagatccagccgcacatcggatcgccttttactgggctggcgtgtatattagcgggcgcggcatttcattgttgtcgcgagcgagccctggaggaggaggaaaagtgtgggagtttttccgtgcttttgtttggcggtggcctcgggaggaggagtttggatctaggtttgcggggaggtagtctccgatcgccgcggcggccatggacgacggggacggtgcggcgcccggagacggctctgctgcgtacacagccccgccggcgcctcccgctgcggccgcggcggcggcggcggctgtgtcagcgggtagcacgggcgcgtctggttccggggagaagacggtgaagcgcatgatgaagagcccctaccagcttgaggtactcgagaagacgtatgcaggtgcgtggattctgatggttttgcgaggctttggaagtttggagaattttttttggaggatttttgggtggggaattgaggttttggtgtttggggatgtgattttggtttggtgcagtggagcagtacccgtcggagaccttgcgggcggagctgtccgcgaagataggcttgtcagacaggcagctgcaaatgtggttctgtcaccggcggctgaaggatcggaagccccccacaaagcggcaacggagggaggaagaagctgcagcggtgccattgatggcacctccgccagtgttgccgccaccagcactgccgctgtcaagtggcgagctactgatcggtgctagtagcccgtatgatgagccgccgctgcccccagttcactcgcgaaggggtgcagggcggtcctcagcagtgcccaggttatctgcgccagatattgggcggaggtattatgaacctctaccagtaatgctgccgccaccaccggtggcatcgatgcagctcatgccatctgagctccgggtgattcattctgtggagtcgcagcttggggagccactgagggatgacgggccggtgctcggaattgactttgatccacttccccctggctccttcggtgcaccaataggtatgcatcccaaaaccctgcacttcgtaggattaagctaaaacttcaaacttgaatgctagtgatatatattttgcaggctgtcacctttttatagtactgttaagccaactgtgttttgctctgcagttgttgaaatcaaataattttgtttacttaattgcttgttgttcctgcaagtagggaaatcgcaataggatgttatgggatggacactgtttagttaaataaagaaaatcaactggacttgttacgaagatgcacaaaaatgattgattgataaataatgtttcaaaagcaaaggtgaattttgagtatttggccagttgccaagtttctatgttagcaagaccatgttataaagtgttaatattcccaatgactaatttagcaaaaaggacatattgcaggaatttttaaataaactgaaaagctaccatgctgtttaacaaaactagctgaaactttgtgtgaaattttggagagctagacagttcatgcatctgcagcgatcaatgtacactgttattaatgaacccaccatgatcaatggtataaatctttctctttgcctatgattaacatggttaattctgtacctctaaagtgagcctgatggctccttttagcctttattgaatagtatatactagtaaatatacattagttctatccctgattataacactatccaccctaactcattgtcatcaattgtctcttaccttttattttatcatcttccctgtgcattgctacacttctctattgccatcgttgcacagcctcctaataactacttactttgcacattgtagtacatgaaaatagacattttgtgcatttgcttttctactgctcattcttgtagtagttagtcatgaaaaattaccttttttctgtattctagctatcttctttttaatttacattgtgtgaatcttccacattgttttgtctctgcattcatggtgaggttaccacaagcagggaggggaggactgggagggagaggggatgactgaggcaggttgtagtctcttaaatgagttagtgagaggcatagtggtggttcggccaggagagcatatagaggagggcaagggtgacgtcaagtgcatggggccgtttgtacaaggttgtcaggactaaggggagagggtggaagaaggggcaatttagtcttggcccattgtggtttatcttgaaacagaggaacacgttgatggtatatttcagaaagaagaacttcgtagcggtttcaaattatttaaaaaggtctatatatattaaaaaaaggagcagattcaaatttgaatctacaactggcaggggtatattgactatttctaatttgtttttggtgctcatgctccatctaatatgaacccaaaatgctatcatgggaactcagaatgcatacagttagatgagacttggatgggttacatttaaggagtcttgaacactgcatggatgataattttcatccaacagcatcgagaaatttacttatggggatcccaccacatgaagcttctttaagttcaatctattgtaatctcatccaatggccagtgtgtttttgcaagatgggcctagagccccaaagagggttttacactcgattctcagcctagggttatactaggaaacaatagatgagcctggcttaaaggcagtctaatttttgtattgctgagcttatctattggtgaatagaagtattatgtagactctgttcatagcatttacatagtaaccggtttattcatataattttaattgctgacattcctttccttatgtattatgaacagttccagagcaacaaaagcagcatgtgcgatcttatgatacaaagatatattctaggcatgattcaaagctgttaaaggtatatttttaggaaatttccaaaagtaagtttgtgacttgaagtgtgttgtgttttttccattgaataaacccgctctggttttatgtgcttaccttttggagtagcattgcttcagtttaaaatgtcatggcagtgaattgacaatgtaatcttacccagaatgttttggcagttttaatatgtcatggcagtgaaatgacatgtgtcttacccagaatgttttgccatgacaatgtaatcttacccaaaacttttaaaatgtcttggcagttttaaaatgataagaatgttttggagatttggccatatgatgaaccgctttacccagtttgtatgtaaaccccctttcatggcttcacccccatccagggccagtcctaacattttagaggtcctgagcgagacaagaatggatgccctttattcaaagaaaaaacacatacaattactttccatttagctgcaaaataaaattgcatacatgcatagaaacaggctcataatcaatactcttttgggactataactgtaacatgcttgtcgagaactcatcccccacccaggacctgcagcgagccatgactatggaatggagaatacaggaagcaattgctacattgaaaatagcaataataacacatgatcctaaacactttctgaaaattagcggaaggtcgcttagtacttaaattttagtaaagtaggggaaaatgtgccataattgggcagtcctaaaaaaatagcagtgctaatccatacccttttcaaccctatcgcagatgtttgaaaccaaaaaccaaatccacaacaaaaatgagatattcccttatagtgctgatgtcgtgttccagacttccagtggaagtgtggaacagtagtatataataggtaaccgaagaagaagaattgggaaaagataccatgtatcggattctggtagtgtcattgcaaatgaaaagaattgtactatcgtagacaagttggttggaaatcgttaacatgccaccccctcacccaccaccaccaccaaaaaaagaaacttaattgagaagaacatcatctgtaaaagaactcggcccccaggggaaagacttcccctgaggtatttcaattaagaagaagcacccgaaacctgggccgagaaaagccacgaaagcatgtcccctgtagatggggagctgccccttatggatcaggccttaacctgtgctttgaggcccctgccccatacacgaggaacaaaggaaatccatcatctatcacctgcagggagccatgaatatggaaaacgcaggaagtaatttctacattcaaaacagtagtaacgacacatgatcctaaacagttagaaaattaatgggaagttgcttagtagttagattgcagtcaagtaggggaaagcgtgatattattgggcagtgctaatctatacccttttcaaccctaatggagatgtttgaagctaaaatcacaaaaaagttcaggatattgtcttatagtgctggttccgtgttcctggggtatttaattggtaatcaaggaagaagaatcgagagaggtaccgtatatgcaatgactgtgtgggactccggtagtgtcattgcgaattgaaagaatcgtactatcatagacaacttggttgaaaatccttaaaatctggctctcatcctttagtcatctgttttgggataaagagggtagaacgagaaggctcttatcagcacataggctagcctactaggttggcatcttgctttggggcttggccgactgggtcttccttgcttgtcaatatgagcatgtaggctatgccgtagtccttgtgagttgcggcggcatcccacatgaactagacactggttttagtgcatgggtaggcccaaattttggggggccctgcacggttgccgtgggcctgtggctgccctgccctgctgcgagactagactgcacggaacacgtgttttaaggccattaggtgtgagttggtgccaaactgccaacacattggcatggcacaattatcttgtagtgtttcatgtcctgttaacgccatatattcgccttataaaaagggaaataacaccacgtttgtgtgcatgcattagttctgctcatctggcattacctggattctcctttcgtggttccagtggccttttataacggaaatgctagctgtctattccattcacacttgcctattgattttttgccttatttatatttggcccttttatatcgtcttcttggtgagcccccgtgctactatcttcataattagcttgtcgctgcagagatctgtatttgagaattgagattgagcgtactcttggtatcgttgttttcttataagttttgagtttcgcctcttgatttcttcatacctcgtttaatattttgttgttcctctttttcccttaggcctcggctttcttccccagcgtggaacacccttttgttccaaattcgatcgctgggaaaaaaaagtcaatggttggtaatctgcccccagttcaccctcatgctggatcacgggcagtccatgagtatcaatttcttcctgaacagccaagtgataggtatgagggtgcaagcagatctcatgagggagcaagcagatctcattattatgacactccagttgaagcatcgaattcgaggatgtcatcgcataccccgggatcacatcttctccgtggatctgatgaggcagcacctggttatgctttccaaggtcaaatgtctggttctggccatttgcctcaatcaggcaggcgtgaggtgcttccagcagtaccaacagattacgagatgattcagtccaatagcgaccttaattctgttccagtcgaaggccagtatggtatttctcaggttgctggaattgaaaactcacttctaccgtctgaaagaagagcctatcatgatgaagacggctctcgagtggatagaaagcgaaaagtatgttttcctctgaccccatatagtcatatttgcatctttcttcatatccttaaatcttagttatagacatattgaatttgtttaccatctgccatagcacaatgaggaagcaaaaattgcaaaggaagttgaagctcatgaaagacgaattaggaaggagcttgaaaaacaagacatgatgaagagaaaggtatggcttattattagtgcagatcattagatcttaatgtatttcgattagaagtcatttacagtttatgcttgcagagagaggaacagatgcgcaaggagatggagagacatgatcgtgagagaagaaaagaagaggagagattgctgcgtgagaggcagagagaacaagagaggttcctaagagagcaaaggcgtgaacatgagcgtatggagaagtttatgcagaagcaatctagacgagttagttttcaaattcatattatgtaaactgcaatgcagtgtagtatctatgccagtaccactgtttagtaatataatgttatgcctatatttgtgcaggcagagaagcaaaggcaaaaggaggagctccgaaaggagaaagaggctgcaaggcaaaaggctgccaatgaaagagccacagcacgcagaattgcacgggaatacatggaacttgtggaagatgagtgcttagaactaatggaattggctgcacagagcaaagggttgccatccatgcttagtcttgatagtgacacattgcagcagcttgattcctttagaggtattctgaccaaatttagactttcttagtactacaatgtgccaaaagtaaaagttcactgctagtggctttgtgagaattgtttcagtttcttgtgcatccctaatagagtaaatataaccagactgaaatgaaaaacaatgtattagtatttatatggaacagatctgtagaaatacatgcacaatcaaaatagaatactgtgttatgtaataggtgacactattaggccatgcttggatcttgatgttttgggtaaagtaatctaaaatttgttgccttaacagctgcttcaaattaaatgatgcctagctagtagtgattggaggaatagctcagccatttctacttttgcctaacatttgcttggtagtgaaaattctgttgtaaacagtttcgaatatctgaagtttaaccaaataatgtggtactttgtgattattgattgattattcccttcatccaggcatgttgactccattcccccctgaaccggtgagactgaaggagccattttcgataaagccttggacagtatctgaggataatgttgggaaccttctgatggtaaacctgtgatatattcctttcttgtagtattttgtgatattcagtgaaagagatctgagttcttaaaagttgtgtgagttgacagtgtaaccacaagaagccataacgttgatttgcacattttattttccactagatgctaaattacaaaaaaaattgaccttactgcttttatttgcttggaatcataaatgtaactatcttgcttgtagactcatattctgtccatgcagatggataaacaaatagacctttttgatacattagcatcacttcatcaggtctataggagaggtgttgcttcactttatacagatgcacattgcagcaatccatcttcttaaaaaatttcaaactagtcttttatggccttattagttctttcttgttgagaagacatttgctctgatgacacttgagagtagagacgtttccttatggttttctagtgctaattgaaaatttagtttcatttcatgcactaaatctggtaacagatttacatgatctgttctatttatatttcagtacatctttacagatggtaaatgctgcatcctattctgagttgcataattccattctagtgtgtttttcaatgttctttttaatggaaactgacaaactgttgctaaatgctaactgcattacaggtgtggaaattctcgattacttttgctgatgttctcgggctttcttcagttacatttgatgaatttgttcagtctcttcatgattatgtaagtttttaatttggggaggaattatgtatctatttgtcctttactattatcataatggtaaaaggtgagaatatctttgttggatgtgattaagagctggataactaggttgtttgattgattttaatgttatgcttgtctccacgaatcaagagaataagtaccatggtggatacatatgaatatgagtttacacaatctcttctatttgttggattatttcgtgtcgaatttgtttactagtcaatttacacattctttttccaaataatatgtaagttatacacttgtactatgaaggactttcatgcagtttatgtgttatgtatgtttgtatctcttgggttgttaagttgtttaagtccaattccataagacactggatgttatcttaccaacgttcttggactatgtacattctagttttttgttgttaccttggactatctgtagttagcatttagctttagtcttgaaagatgtcatctttggactgctaatgttgaattatgtaaatttttagcagttaactatgcttatcctgattgatcttctcatctctttactaggattcaaggttgttgggggaactgcacattgctctgctgaaatccatcataaaggatattgaggatgtctcccgaacaccatcagttgcattagcggtgaatccagcaggtggtcatccacaaattgttgaaggggtgcgcatgcatttgtctttttttcaaaacctctagctttttatcttttagtttccttttgttctgtgtgctactatgcttaaaagcttcagtatgttttcataggcatacgcttgggggttcaatatacgaagctggcaacgccacctgaatgttcttacttggcctgagatattacgacaatttgctttatctgctggttttgggcctcagttaaagaaaaggaacgctgaagatgtttattatcgagatgataatgaggtattacactatctcatactatatacatctattcgctctataagataattccatattgaaaattttcatgatatttggtttatctcagtgatccaaaaatatcatgtgagtactctgcatctaatactttgtatgatgctcggttttctgagattcaaaagggccaccgggatatagtcagcagtactaaggttgcgtcctattgtatagtgtgattcttgaaatttagtgtactgaatgtagggcgatgagtgatatcggtcaaatattggtgagtttattttttttcaaataattaattaatgaaggtgcttttattagcagataaggattattttattttttaaaaaaattggtatattctttttgtctggtgtgcttcaaagttctttagatttacccggatctactccttcagacctcggttctagtttctgcctagagatcctcctatcagattttttctgatggatccatggattctttgttaatggagtttccaacttctggattgcggacaagcctagtcagagttcacttgtttattacaaagatggtccaataatatcattcgtgaagttacttttttttatgttgaagtcaggtaattatataacctggtttgaaaacaagcccaaagttgttcaagttcatacaaaaacaaaagagaaaagaccactgggatcaccagctttccaacaaaggcatcacacatctgcctcagtgctggggactaactagtatctgggttggaaactaactagtatctggcaagtgaacttgacagcttcct

SEQ ID NO: 9764 - DNA, 26799 bp, Oryza sativa
aaaaattcatccgttgttcttaaaaaaaatccaccgcctccacctcgccaccgccgctacagagccgtgccgcagcctccatcgtggcccgtgcgccagatctgagagagagagtgtgtggtggtggcagagagagacctgggaggtgcgccgcctcgatccgtgtgctcctccgctccggatctggtcccgtcgccggatccgccgcgagccgcctcgggcaccgccgccgtgagctgcacgagcgccgccgcatcgcgacgcacgggcgccgcctcgatccgcgtgctgctgctgctgggctcgtcgccgctgctagtggggagtgaagggggaggagagggagaggtgggtggagagaagaggagagggagaggtgggtggagaggactgttgcgcccgttccgtcttggcgcctagcgggaaaattatctcttaaaaaccctaattgcgaaatttgtttctttgcttgttgtctagtgtccgtgccatctcaagatctcaatccccgatctatcgtcgagttcaattccgaatccaatccctccaaatcaaattcctccgcaaaagtccattttgcctcccccagggtcgatgggccgattttccctcggcccatcttcccctctctctcccggctctctctctcgctttccccggcgcgcccccgctctctccctctctccctccgctccgccccgcgccgcgcgcgcgagcgcgtgtcgccgcgccgagcgcccctccctcgcgcgccgcgcgcgagcgcgagagccgcgccctgcgcccctccgctcggccccgcgagccagcacgcgtaagccgcccgcgccgagccaagtcctccctcaccgctccctcgctgccgcttcccgcgcgccgtgttcgcgtgcgcgcgcccgcgcggacgccgcccgttgcaagccgcgcgcgcgtgccgaatggtcgaccgcccggtcgccgccgccgtcagcctctgcacgcgcctgtcgccaatgtcgccgctccgctccaagccgccccccgtcatcgtcgtcgtcatcgcccggcccccgccactccgcgcgcaagccgccaagggacggagccgcgcccctcctccctctgccgcgacgctcccgctccccttcccctttttcccgaatcggcaaaggggcaagcccctttctccccctcctttttccctttttcctcctcgccggcgtcatcctcctgccgccgctttggctgcaagcgccgagcgccagctcgcgccttgaccgttcaatgtcggtttccctcgcccaaaccgacattgccgcccatttaagcccaagccctccccctccaaactctctcattttcgcctccgcgccattgccgccctctgtttcgccgtcgccgatcgtcgttgcgcgtgtcggaggagccggcacgagcaaggacgcggaagaggactccggccgcgccctctccttcctcttccccggcccgaggccggagagattactcccgcgccgtcggcctctcgtcacagcgccccgtcccgcacggtagtgcctccctccgttcttcctcctcgctccatctcctccccttagatttcggtagtagctcgagtagcctccccgtagttagccggcgccgccccgactgttgccgtcgctcgccgtgtgctcgccgccgtcgccgcccgagctccgtagcacccgctcgtcgccggcctcgctcggcgtagttccgcccaatccgacgctagcgtcgagttcccgacgccgcgtagatgctctcaccgccgggaatcgacctctcgtgacctcgtcgccgtttccctcttctcccgccgccggttgccgccgccgcaatccgccgccgtcgagcaacctccgacgaatccgagccgttggctcgtctccccttgtcacgtgcagccgcccggtgtgctcgcttttgcctgtatcaccgtggttcgctccgctgctcgccgccgccacccgccgtccattcgcggccgggtcgtcgtctacctcccgccggcccgcgtggcagccacgtaggcgccacgtcggcgccagctcagcctagaccgggtcgagcccaccccggtcggtccctccccgtgcgcgcgttccaccgcgagccgtgaggctgcgcgtgggcccgccgcatccgcgtccaccgcgagccgcgcgcgtgcaccgcgtcccaaccccgcccgcgcgcgtgcgccgtgcgcaccctccgcacggtgagccgagccgctgacaagcgggtcccacccgggaccacgcgtggtgagcccggtccaccggctccctctctctcctccctcccgcgcgcgcgcgcttgggccgtcttgggccggccggtccgttaagctcggccgagctgccccaaatctcttgggccgcaccctagccacccgagaaaagtctatattccctccctcctttcttttctttttcttttccaaaaaggatttaattaaatcctttttccgttagaccaaaaatccaataatcttagaaattcaatatcttcccacccgtaaatccgtttgactccgttcaacttccaaaattcctcaaatctcgagatctatctaatggcacgcttagaggtcattaatagggctttattttcgccgtttgttgagttgttccgtttcgcgtgtagttccggagcccgaagacccgcagtgcgaggatttcgaggatcaagctccagatctcgagcaaggcaagccacctttgaacatcttgagcctatatttgaaatctaattatattgcttgcaaaatattatgcattgataggatcgcacttaatctattgttccgtctgcaaggcagattggcggacctacctaaattgttgcatttgatcctttccttgttaattgttacagcatgtccccttgtaaccacctagttgcgtcttgatattcgtgcatcctgtgcgagtatcgacggacgccttcaaacttataatctgaataacaacttgggtaaaacttgggttttacgaaagatttggaaaacccgacacctgggtcggtgcttgcgaactaaatgaatttccagaaccgcggaccggggaacgtaccgggtgtacggtttcccgctctcgcacttaaggaccgatttccttggaatttcatccaaacataagataagtacgaccacatgggtggaatgggacacccctggctgagtaactagcttatcaggggagccttgatgccgagagacatgtggattcgccggggtggtgtcggggaggacccctgggcttcctggcacagtatggtctgggacctaacctgttgttggtctgggacccctctcgttggcatatggtaaacctgtatcggctttcaaaatgccttgtcatgaaagcttggaggtctcccgacgtggctgatccccacgggctgggtgatccgggttagtaatgtcgtgtgggtaaagtgtaccccctctgcagaggttaacaaactgttcgaacagccgtgcccacggtcatgggcggatgtgaggtgattcctagcgtagttttgtttgactactgcttgtgaaattgctgttgtgaaaaggggttcgatgtttgaaaaatcagcagctgacgggatcagctaggcccgggtggccgtttgaaaagttgttggcccgggtggccgtttgaaaagttgttggcccgggtggccgtttgaaaagctgttggccgggtgccaaccttgttgcaatcctaaagagtgacacattgcacatactccgaccggacgagacgcactgtctcatccgagtcgtttgagaagcactcacctaatcattttagaaaagagttcaaataaaataaattgcaaaaataacagcctttccttgaagcctgcattaaacacttatttcccctggcttgctgagtactcccgtactcacccttgctctatataaataatccccccccagttgctgaagaagatgaagtggatcctgctgacgaggagttcttccaggagcaagtcggctacgatgagttttagggtttcggcctagttcccaagtcgtgcctgtgatgattggtccaagtcctggcttccgctttccttttgtaatgcagttgtgagctcgggatctgtccgcagcccaacatgactatacttctactctttaataaagagacctctgttgctgtgatactctgtctccctgtgataccagcactgtttcctgggactggtatcgattaacaggttaatttggagcgtcacgggctagttccggtcgggactagttcggggcgtgacaaggacagaggagacgcagtgggtggagataagacacgatttttctggcggaggtgttagtagccgctagtgaaaacacgatttttcttggcggacgcttaagtgctccgcctcgaaaaatagagtttttttatggcggatctcttagcgtggccgccagggaaaatatacttttgctggcggtccgtagccccccatcactcgttacatttttgctggcggttttcgcgtacggccaccagcgaaaattatagggcgacgccatgaaaaatcgtttttctagtagtatacgtttggttttcaagtttttgcacctaatcgtacccacctgccaagtttttgtaccgccaacgcaatttactcttttgatatatttggtggtccacttgtcatcgaaggctggatcaagtttagcgccgtgttcaagacgtgggagcgagaggcagatacggcaggggatgttgtgtcaatggcctgcaaacgtgtctagcccatgtgccggcctcacttcaagcctattaggcccacaacgggttacaagagtgcgtacgcagagttctgagctcatttgacatttagcccagctaaaaattaaaaaacttggtacatgaaacttcttaatagcaacattcagtatacaataggaactttatacataaaagttggcatagaaattttatacataaaaacctttttcatagaaactagtgttgcttgaggaggatgcaaaataaatgcttgaggatgcaaatgcaatataagtacaaagtaataatgatttactggggagggttctacatggtcaccataaaatctactccctccattctaaaatataacaacttttagccctcttctccaccatcattctattcccaaccaatcacaacactcttctatattcacttttctcacctacctccactactcaaccaatcacaaccctccaccattcaattctatatatttttttaataaccgtgtctaactctaaaatgcttattatattctaatatggagggaacagaacacgacgatggcacgatacctcatttattccaagaaactttgctcccacagcttacggaacaagaggaagataacctggtcctctagctaagtcaggggacggaaactagcgatcgaaacgatgactctgacagtgagggcgatgttgttggtacaaacgagaaagacgatgagaccgattgcaacacactcccacagtgactactctgatcatgagcctagctcacctgggctcacttggctggtgggaaatgttggttttaactgtcaggtggaagaatgtggatctttttatcgtcttgaatttgtgggttaatttgtttcttaataaactagatactaaaatattacttcctatacctatacatagattgtcaaactaagaaaaaaattcaatagagaattattgtttgggctgggatattcttactagttgtctagctaaataataagaaaaatgatactttacacatgcataacattttttttatatttatgaaaaagcaagtccttatatttaagcgatcaatgtacaatattgaattccaacattatttttgtatagaacaacatatatatatatatatatatatatcattaaacaaaaaaattgagaatgtcaagttatatatgtgtacacatgtaacaataatgaacactgtaagaatatcgacccccctacgcttcaacatctgtgcagcaactcactcgacacactccttattgtccagtaatacgtacgtagacggtttagtaaactccttttttttcactcgatgcaaattacaccatgctagcatgcatgatgcacatttgccatcatatacctgccctgccctctccatctaacctatatatatcatcagtcaaatatgtttaatttgctttgttttcttccatccatcaggggccaaagcctgcacctcctgtgtgcacctcaaagttaggcatcgtcaaatgagcagaagcagccgccctgttgttaggagccgcctggctgtagccgattagcgccgccgctgggttgtagaaatctacaatgcctgcagcttccttcagcatgctgctgttgttgccaccgtggccgccgccgccgacgccgtcgttatggtggtgttcagcagcagcattgctagccttgatgttgttaccggcgacgaggtcgacggagaggtccttggccgtcgctgccgagccgccgccgcactgcctcggctgcgtctggtagaacaccttggacacgacgagctcgccgtccttctcctcctcgtcggagcccaggtggtactggtgcatcacccagttggtcttctccggcttgcgctgcttgccgtagttggtgtagagcaccaggatcttcttgtaccccttcagcttgccgccggtgaacaccggccgcgtcttgccggtcttgtgccaccgcgtctcgccgccctgctcgtcggtgtgcaccttccgccgcttccgcgtccccgtcgtgtacgccttcgacgggcggtggaagaagtgccggatcaggccgtccttgccgactcctgaaattaacagcggcagaaagagaacagtacggttaatatggtagagtgccacactgccactgctctcacgaatgagttaagagatgcaaatgtaatcaattatattacgtgcatgcatgcaacagcaggtcagcaacacaacaagagtggcttcgtaatcgtagtatccagttgaccagttccaatgtcctgacggctgacggctgacgcagcataagaccattcagtcaaactatatgacgaatgggcccagttaatgatggttttgggccgactccagcaattctctgattctatctctctccccctgaactgttattgtttagttattttttgcgtcctttccatcataagaaaaatacttgctcggtgtttcaatacatattctctctgttccaaaaataaatttattttacactcatcccatatgtaccaatataaaacaaaaagacataccctcactttatcaaatcttaatgcaattattcctcattttacctacattccagtgcatctattatttactttcacaaactctagtgcaatgagtgttcaaaaataaatttattttaaaataaatgggagagacaaaaataaacttattctgaggtagggagtattacactaccaactttattcgttcgtatagctttgactattttttttctattagtataacaataatgtgtaacaaaaatttagtattgtaaaagtacttaaaaaaactgctcttttgatttttattttcaaattaaatacatatttgagagatgttgatggttaaactttaaagtttcaccgaataaaattatatttaaagaggaggtgggggcgtatttgtgttttgcatctcttaacatagaaatgaaatttcccaggttgtaaaaaaaggaaaagattatgcatgttaactacaaccttaaacttttataaaagtgtgatagacaatcctagaatcttcatacattatttaaccataaactatcaaaaatagattactttttatacaacggactgaatttaaagtggtttagtggagatatggcgctgaagggtgaaactatctttgaatttaaagaattactcaccgataaacttcagaaaatccttatccacattatggagtacttataatataatgtagatagtagtggagccatgctgtgaccctgtaaggtcaattaaccccgatagaatttttgcaatcaagtactattagtaaaaaaaatatttgcatttcgcgcgaggtggatcttgatcttggctcagccactgaatctaggtaaatttggtgtaatataaataaaatgtatatatggcctgaaaatagtgtgcggaactaaataacacatttttatttgtcggcttaattattttcttacagatagaattaatttaggtcagctgtaatctatgaaatgtaaagaaaattactttgtaccatggaaggagcatcccctgcatgcacattgttttccagctcaacacgcatatgtctaacagactaccacaccaatattcccatgagaataccccacgaacggccgctagctccagcaccaacaaagaaaaaaaatgtttgcgttgtaaacgacataaagagccacttgcattggttttttaatcataattaattcttgctagataaaagtatttgtaatatatcattttctactggattaatatatagtacaatggtgacacgtggtttattattgataactgcttatatgaaaatagagttccatgaaaataatatgatcagtgcactataatgtctcttggtgcaatatttctatcactatggtagaaaatagtacaagttatcctgtggaatggaatgcaacccccctgaagaatataatattatatttccaaaagcaggaaaggcactcataataatttaaagtatctgtcagttattcttaggccatgtttagattcaaaaatttttctttaaacttccaacttttccgtcacatcaaatgtttagacacatccatgtagcattaaatgtggatgaaaaaaaaccaattcacagtttgcatgtaaataacgagacgaatcttttgagcctaattatgccatgatttaacaatgtgatgctacagtaaacatttgctaataatgaattaattaggcttaataaaattgtctcgcagtttatagacggaatctgtaatttgttttgttattagtcttcgttaatacttcaaatgtaatttgttttgttattagtcttcgttaatactttaaatgtgtgtccgtatagttcaaaaaaaatttggcacacaaactaaacatagccttattgcacaaatatacaatgactatcctacccatgcaaatacaccattatatataggcaaattaaatactaggaatataaaaggataagggaaaaaccagttcatattgcaacaagtcttttcaaagtttattctccctttgatctgatgttgcgtgtatcctgcatgacgtggacctttgatgcactgtgctgtcacaatcactcgttttcaatgtgaaataaacttttatgcaagtaggagaagcaattacttcaaaggcaaactttagcaatatttatacggtatcgtgctcaaatgcaacaacacacgatcggacatacacgaaattaatgaaaaacgcaaggacgatcgacatgtatataccctagtgtggatgttacaaatactaagcggctacgcatgattgacatatatgaagcaaggtcatcaaattggaaacgaccagtaaaactttatatcaaaatagggaattttaaactgagaatcaaccaagcaagaaaatgttttgtcaggagtacttccgtgacggacagcacctatagtttccacgtcccgtccagatctgatcatctttgcaattgctatagctgatggcacaatgtaattaagcatgcaagctagctgatcgagacaaatgcacttatgtagatcatgaactgatgaaactaaaactgattcgatatatgtcgatgagtcgtaggaaaagcatgcatgtaagtatattatacgtgcctggaagcctctcgggatgggtgtagcagatgccgttctcgccctcgatggtggggatgaactcgtcgatgagggggtggagcttccgcgcgtcaggcctcgccttcccttccaggtgctccagcagctcctggtccgtcgggtcgaacttcaccccggccggcagccccggcaggtcctggatcgtcgccgccgccgctgcctgcaactgactctacaccatgctcaatgccatccaacatgtacacaggagaccgatcgatcgatcgagcagggaggaagctctagctagctacctgctcatactgcgcgcggtggccgcaggaggggcaggtcttgatgaggttgacgtgctgggagacctgctgctgctgctgctgcttcttggccgcggccacggcggcggcggtggccaggttgttctccacggcgcgcacgtcgttgaagctgttgcaccatgtcatggctgtataatccaacaagacgagagatcgtgcagagagagcgagccagaaagcctctctctctctctctccctgtccctccctccggcctacgctttgctcgtcgcccccatatgcggcaaacgttaaggcgagaccccgcgcgcgggaggagggagagagaaaggaggagaggagggaacaaagcggcctgatcgacgagagggagaacaaagagaaaagagaggggagctataggaagcttgtccctgttaaaagctactcctactagctgctaatcgcctaatcctccctgcctgccttcccggcccagctgctgcgcgcggctactgattttctatctccatctggtacagaccaaggaggagaatgaaggtggattctaaacactaatcagagtttgatttgttatttttgttacaacttatagaagttgaatttgaacttgcatatttgtggggtgatatattacatatgaatctatcttgtcaaatttttttgaatttttttcatacacatttagttgacatacaacaaatgggtgtatctacctaggtgattaaaagtgtttccggaggagaatacatcaattctcacaccaacttttcggttggcgcttcccaggaagatcgccacgagctgatctctctctctctctctctctctctctctctctctctctctctctctctctctctggcgaggcaggcagaggcagaaccggcagtgcatcagctgtgtagtgcaggcaacaactacagaaagaacactccacaaaaggagcaagagactaggattagagagagatcgagctagctataggggacgtacgtgcaacagctagctaggagatcaaaatgaaaggctaaagcgatcgattaacaggctgaacaatgagcgtttgacagctatgggcatggacggatatgtgtcatgtgtgtcgtcgtcgcgaggtgtgcggcaacacgcgcggatgataaactgacaataaatcaatcaatcaaactccatagctaattaagctaggcgaacagcgagagcgaatcatagaacgcaggggatcgatccgggcgaatgatgcggtgttgcttggccctcaagtctgggcttgctaatgcaaaccgtatacgtgagccgcaaaccaggcgccggattctctgcgcgcgagttgctgcgtgtacatctcccgatcgagatatggacgtccggccaccacacgtacacaccacaccaatttgacggttaacatttacacgtcagaaatgacaccggccggtgttaatatagcttagctgctgctatagcgctggtcgtacgtactactactatagtatagtccatggccaaaggcttgcgttgcaagaaagcacctacacttgcgattaaccggaagacccgtacaccaaacgcatatgaaatgcatgacgaagcgattggtcgaggagaaggttgcgcgaaatgcgtgtactttggctggggtttaaattaaaggcggcaggatgacctacattctcctccgcgcgcgcgagaccccggctggtacggtgcgcgcagggtgtgcgtgcgtgcatgtacgtgcaggtagccgctgcgaaatacgtatacgcacacatatactaaccactgttcatcgtttcaacacggttagctagctctatagctatccaatcagttggtaaacaaactatacacgtacactttgattaatattattccattcgatctgtgatttatggtgtgtatgacgttcgatcgatataactctatcaaactgggggattgcgaataccctaagctatttcgcaatagaatacagatgagagaggagagggttgggggaaaaggcaaaggagggacagagaggaggtagctagatgcatgagagagagggaattagaccggctggccaaaagcgtacgtgtggaggagggggaggaggaggaggagggtggagtggagatggggcaacctgattcgatcgcgaggacgtcccaccacaccacaccacaccacaccgccccacctgcaacacgcacaacaccctactacttggcagcacgattgatcgcctgtcagtcagtcgtctctcgcggatggatcgagtcgcggggggtggcggctgggctggctgcggtgtgcgcgcgcgtgcgtgaccgcgtgagatggggatggatttgggagagagagggacttttagatatgaggtcaccgtagagtgtcttggaagagagaaatgatgatagtagtgtatagagcccagcccccagcgacaaaaggactcctgaacgaccgagccgggggggcgcgcgcgtacgtcgtcgatccaccggtcgagacgaggcgcgtccgcgcgtgtattgatccgtcccgtacgttgatcgatctgggcgtttgggggccatgtgcagatgcgtcgtggcgtgcgtgaacatgcgcacctgcgggatttggaccggtcgatctaagtttgagggcgtggatttgggaccattgatcttcggcgtatcggtccggccggtcgcgatgagctaagcgatacgtcatgcccctggatcagattgacaggaatcagagattagttaattaagtataatactccctccatactcgtaaagacagtgacacggtttccaaaatacaactttgacttcttatttctataaaaatatttattgaaaagtgatatatgtatacttttatgaaagtatttttcaagacaaatctatatatataatttttacatttttaaactcaacaacttaagagttattcataatttatattttcaaggtttgacttaaacattgttctaaaagacttcctttatgagtatggagggagtataagtagtactaggcactactccctccgtttccaattaatcatcgtattataggagcgcaccaagatcaaaaaaaaaaagaaaaatccataactctcatatacttatatttactttggtaacaaactcgatgcatgtggacaattctcactattttctaactaataacaaaccaagacatcactttggttgtaaaatattatgtgcagggatacatgcaccaatattcatttactcccatacacagataacgaatagacttatgtaatgataataatatgatgatcacttgggaataaccccaaaaaagttagatgatgatcaattgggaatagagggagtatattataagacgttttggcatttccatcgctcgtttagatccactaacatctatacgaatttggacacatatatgaagcacatatatggatccatgcataactatattcaaaatccaaacatcttataatgtgaaacaaatgaagtaggtgagaattaacaagggtatttaaggtatagcattatactcccaaacattgccacacctccttacaaaacctagccaaaggtgtggtcataaattgatggccacacctcttagacaaggtttggctaaaagatgggtgtaagacatgtgggcctttgaattgaaaaactatggtatgccataactttgatagtgaaacaaatatactccatatgtaccatatatggcaattttgtactggatgagacatcctaaaactacgaatctggacaggggcatgtccagattcgtagttataagatgtgtcacatccagcacgcccctatccaaattcatagttatagaatgcgtcatatctgacactagattgctatattaattatgggacggaagtggtatatcctagaaagggtggtgaagtttggcaaaataagggagtgacccaaacaaccacaagcataacttcaggctgattacaacgtgttagtcgccaacccttgaggatattatatggactataattactggtattttaagattgaaattcaaatattatgttaaatgtatgatcactcagatttaaatgtcttttaaaggatgtttctactttaaaagtttctatatatataccttgtgtatataaacttaattaagaaaaaaataaaaccgtgtgagcggaaaaaaatagaagtagggtgtttgcgaggggtcattagacttctctctcaaagtgtctaattagtaaagaatagatagatagatagatagatagatagatagatagatgtagatgagtacatggttaggctaccttttagcatagtcgacatgtgtcaaattagtacaccagatggggcaatagatgggagaatgtatattttattttgaaagtttaatgttgtatggtttgatcaataattagccagattcgtgcatttagtgtattaaaaagtaccttgaattgctttagtttcagaaaaagtaccttgaatatgttttacttaatggtcaaagtttaaactttaatactttttagaaaataatatacagcctacgaaaaaataatttaacaccctttcctcaacccccccaaaaaaaaccaaaaaaaagaacagttgaggtatattattcgttttcttcaacgagatttgcaacctatttctacacaccaataatattatttttcacatgtattttctccatgcatatttggttgaagaaaaaaaagtttaatctgagtatataatctcattgtgcttctcaggagggcatataaaaagcacaaagtgtgcacgtatctgcttctccctcgaagagttaaaaataactggtccatatgtatcttgacatgcaagcgtctccctattgttcgactgtgacaatctttgcgttagactacaacaaatatacgcgtcgtcgattagttggagaggtatatgcgtcgttggtaagtagtgtaatctaatcaggtactccactgctactaatactatttaatttaacttgtagggcaagtctcaccatctatagctagctccgtcatgttgaaaaacggaggcagtacttcgatccgagagaatcggaattatgttggagtttgacattttaccacactttttcaacagatgggtatgaaaatgcacaaagacttcaaggatgcaatcacttctccaacttgctctctgactctaccatgcgccttaaattttcgcagaaagctagaaaaaggcacgtttttttttctcatttctcttgatatttcagagtacttttctcaacatcaaggaatgaatgaacgatcggtatgaaatgaacattggcagtcaaagatattactagtaatttctcagtgacagtctctcatattttattcgagagaattttaacccccaaaaaaaatctagagagcagttaattactacgaatacagggattgcttttgtaggactttcatgtgatttggtacatgatggacaacgacatatatcgaccattggcgattagatgttgcttcgtgtgacactgacactggacttgcttctgatgcattccatatatcgcacgatagagtacatgtacctaactgaacctgatgtatccatgtgagtgataccacctctagctaagctaccacgaagaactgaactcgcctagtgaagccaagagacaagacaaatgttacttacactgaagctttttcagaggataaaaacagttaattaaggggcgtcacacgcacaccaaggcaattcggtatgcagatatacaaagctctgacctttactagatcattggctacaactaaagctccgggcatgatcatgccatgatatgtgcaaatttaaagggatggaaagaaggaatcacatgattaaagccgtatgctgtcgcctctgatgatcggcagcttttaatttacaatgttccccagactcctggtagcagtagcacactgtcgcctcatgtcttgagaattgcagatgcagcttggttatcactcagagatcagctaggaggaccactgcatacatgcaggaggatttgtctcaaggaaagtgttttacttggaggagcctaaactgttttgttccaatggtctttatgtggtcgcctaggtgaggcaagcatgcatgcaggtttgtctctactctcaaatgctgttgttctgttctcaaaaaagaaaaaagaagtgctgttgttctgaagattgtcgaggatgatcgatgttctctttgcaggctttgcagccttatattgggctgggctttgcatctatgagtttggatcagcccatttttgcctctgacatatgcatggctcggtggatccacatctatgagcaaggcattgtagttcttcataccagatgaaaagaatcaaaccaaatgcataatccagttaagcacggctaggagggaacatctatttacgtgtatatataactgccacagaacaattttagacccaaaaaactgttctttccgttaccaatgtgcgtctacaactgttggagctcaaaaaagagaaactggaacaccaaacattctcgcatttcttgccagcagaactcccagttcatttaatttttgcatctttcttgcaagaaggcatccataaacggacaacaaacagaaacagagtaacagaccattaccttccttcccttcaaatcccttccttttccattgataaaatccctagttgcgtctcctctaacaaaagatcaccaacgctaaatagaacgaactggacgaagaggacagctactatgtctgctccacaccaccgtcaccacaacatggaattgctggcaggatcagaggaatcctcttttgttgaatatatttgatcgtaccagcaacatgagcccatgcagaaaacaatcgcccagacataagaacatcaaatttcttccttcagacactgtccctgtcttccaattcctggctccaaccttggcaacggcagcacaaggcccctgcagtgacaatgttacattcatcaaatggtaacatgatggttctttgtgcgttgccctgctttgttctcagtttcacagatagcttcagggataaggaagggaatgcgcgctataggtttgtcgcattcaagggattgtggggtcatcgacaatcaagcacctcttgatccacacgttgtagttgaatgaatacaatttctagactttgtccattgaactgtttcagcaatgacttttgtttctatagcgctgttagaccaaaatgtggtgtcttgcttcaatccaataccgtaagagtaagcaaagaaagttctcataatattgctgactattatagtggttattggcagaatgcagtttgtcagcttcccagccacccaccatgacattggctttccactctccacaacagtctggtaatcaaagatcttgctcgctcaaattcatgttgattgatcaaacaggtgtaatcccctcaacatagacagaaaaacatacagtagcatgtatctcaatacttgatattttggctgttgactttttctcatggttatactcctagccaatagaatgaagatccataattccatattttgcgatgctgtttagcctgttccattaagtgaattcatagattaagcatgttagacatgtcataagcagaggattcactatgacaattaagcagcataaactctaaagaaagctatcagaacaaaagtacagtgaatttcttttggaaaacaaggttattatatgcaagtggaaagtaataaacatatttgatttaatctttatggagggaaccgatggaaaacatcactagaaactgtgcatttccagggaggttcacattgtagagattttcttttgccgtgcaataaacctgaacaattgatatgctactcagcagtccataagaaaatgaaagaaaaatgaatagaataaaatcgacatatgaaaatatgaaacagtgcaataacctagctaacatttcactttcccaataaatctacctaacattggttgtacaatatgtcaataattacatttgacttaactgcctagcttgctatgcaatagtttgagctacaggttttgatcatttatcaccaaactccacatatatgaacaattaaagttaatgcttagtatatttacgtatgtactccctccggtttcattttaattgacgctttggacaatgacacgctctacaagatatacctttgaccttatttttctattataatatatacaataaataaatgcatgtttacttttattatagtgttttgaaagacaaatctatatatgtttttctagtttctttaaactaaatatttttaaagttattgatggtcaaagttataaaaatttaacctcaaccatgtccaaaacatcaattaatatagaaccggagggagtaatgaacaagatgtatgggactatggaaaacaacatcgcaccatacctgaacactgccaactgctcgtaacttcaaaaaaaaacagatatcattacataacctggaaaagtgaacaccaaaatgtaagatctatcgacaacaaatctcccacttgtgtaacagcatagaaagagtaagaagtatatgacctctgagcacaatgtttgcttggcaacagctcgcgcatacgatgtatcagtggagtgtagtctgtacctttatttcaatttgaaacggttaactggctccacatttcctcagcttcttgtcttacctttttcttactccaatatgcacgtacaatcgtatcccatgtttccctctcagggatgcatctctctgataacatgtcacgcacaacatgagcagctttctctaaattgttctttttcgataagcactcgacaaggagatggaaagttgttggcttggtagaaattccacgggtacgcatgctctggtacacctgaaaagcccttacaacttcacccttagaacacagtgctgtcaccactgcatcatttatcctgccatgcaggctccaagtcaagcggtttggtcggatgccagcaaaattcatctcatcgaggtaatttgaagcctccaaagcccttcctgcatcacatagcccaacaattagcttaccgaacaacccagcatcaggcttcctcccctggagacgcatccggtctaaaatctccatggcctgacccagacagccctccttacagagcccatcaataacagaactgtatgtgattgtatttggaagcttcctctccttaaccatcctgtccagcagctccactgctgaggcggcacgcccacccttgcacaatccatcgatcagtgaactgtatgttaccacattcggcatgatccctctcctagccatttcatcgaacagtttcagagcatcatcaaagcaagcctcccgcgcgagccagtggataagagtggtgtaagtaaccaccgttggtgcagtgccattcgcaatcatctccgcgaacaggtcgcgggcctccggcagccggccgcggcggcagagcccatcgatcacagtattgtaggagcacgcgtcgggtttggggatgttccgaaaaacgcgaacggcgtcgtcgatggggacggcggcgtcggagcagtgggccttgacgaggacattgtaggtggcggtggtgggggcaaagccggcggcgcgcatgtcggcgaggagggagcgggccagggagaggtgggagtgagcgacgagggcggcgaggaccgcggtgtaggagcgggcggagtgcgggaggccgagggcggagggcgcggagcggaagaggtggagcgcggcgaggggctggtgggcgcgggagtaggcgcggaggagggagaggaacgggggctcgagctcgccgggcgaggggaagagctcgcgcgagcgggagaggagggaggatgcgagcgggaggaggctggcggaggcgaggcgggacgtgaggagggagacggtgtcgcgcgacgggaggacgggcgcggcggcggcggccgtggaatcgtcgggcggggacgcggacgagggcctggcggtggccgcgtcgaagagcgccagggcccggcgcgggtcacgctccgcgcggaccaggcggtggaggtggtcggcggtgagggtcttgggccatctggtcgccgagggggtggccggcggcattgggctgcggcggcggcggcgggatgggcaaagcctgcgtgtacgaggcgggacagaggtgttcggcggaatgctgccctgccctggcaacacgaggacctctagcaagtgcgcgcagttgcgtgaccgaacatttgtcgggccggccaaatgtcaaagaaaaggatgggcctatttcggccatagctgaaaattaattagggcctgcttgggaattaaggacctttctcgaccggaataagttcaccagaggtccctcaacttaacagcgagacttttgagatcccctaaccacaaaaccagaaatttccacccctaaactttacgaaaccgtgtaaaaaaggtcccagggcagtatggatctctagtttcgctgatgtggcatcctagttagcaaaaaaaaataaaaaaaattatagggccacatgtaagtgagaagaaaaaaatgtgggacccacacttctttttggttttcttttctcttttctttctcctcttctcttctcttctccggaagccgccggcggtagagggagcctgggagagagggggcaggggtgggcgaagtggccactggcgagcgcggcagtgggcggctggagaggggggaagaggtggccggtgagcctgcgagggaggagaggggggcggcggtgggtggagcagcagcgggagagaagagagagggggtcgcgccggccgagcttcacttgcgagctcgtcggcggcaatggcgtccctccgcgcgctcccccttctcgtcctgggcatggcgttgtgcgcactcgcgttgttccccttcgtcgcctctgcgtcccgtgacctccgccaccatcccgcgggcttcgtcatcggcgggagagggtagagagggggtcgagccacccgagcttcactcatcggcgacaatggcgtccctctagccaactgttgttggtgttgctgatgctaatgcggcttcctccgccgcctccccgcctgcaccaccatctcgggcagctccacgccgtggtcccgcacccacagcgacgtcgtccgcagcgccctcgctgcgcactgccccagctcctctcccttcccttccccgtctttcccgccgtcaaagcagcacaagaggcacccaaggcggcgacgtcgcctccctccgagcggcagcggcgaccttgtctccctccgttcttgcccgtcgccaccctgcccgccggcctctcaggctcgggggaagaagagaagaggagaagagagaacaaagaaaagagaagaagaaaaaaaaagaaaaagaaaagaggagaaaagggcgctgatatgtgggttccaccatatgccacgtcagctaaacgggggaaaattagatcagtactgtttagggacttttttttgcacggttttgtatagtttaggaatggagatttctgattttgtggttaagggatctcaaaaatctcgctgttaagttgataaaccttcggtgaacttattccttctcgacctggtaaaagaaataaaagcccgtaactttcggccacctaaagtaccggagaatatattcaatacccttcctgttcgggagaaaaaattggtagaaataacttatcggagcaatttgggacttcgaagtagacaaatagatagataaaaaaactatgatgaataatcaaaaataacatcaaactcaccaacagatgttcatgtaatgttccacatgttttcacgtaaatcttcattgtagttcgtaaagcaatgtctcggtgcttcttcgtttgtacttatatttcaccggtaattaggaatgcagtttttataggcgatatataccgagaacaaaatggatatccttaaaaaaacaaatggaactgatagatctcgatataaaaagtcacctaataaatctatctattatattattaaaacagctttaaaaggagacatcacgttcgctgtgggagctagaaattctcatattaatcggagaaaaagaaaaaaagaaaagaagagtccaagtagaaatacaatctaaaaatagctgaaattcggaattaaaaataagcaatattgaaagaagtttctatataacaacccaatacgagattaatacaaattcgaaataaaaataaaataaaatccaaaattataaaataaaaggaagtccaagtaggaatacaatttaaaaatagctgaaattcagaattaaaaataaggaatattgagagaagagtccatataataacccaatacgagattagttaatattcggaataaaaataaaaaaaattcgaaattagcaaaaagaaaaaaagttaaaataggaatacaatttaaaatcaactgaaatacgaaattaaaaataagtaatagtgaaagaagaatcaatataagaaaccaatatgagattaattaaaattcagaataaaaaataaaaaatatccaaaattaataaaaaaataaaagagagttcaactgaaattcaaaaaataaaaaaaaataaaagtattaaaaacactatacggtattaattaaaaaaatttaaattagaaaaagaaaaaaagatttcaattaggaatagtggtggcagttgatacaatatataaaaactgttagtaaaacaccaaatagaatcctaatgatgattaaaaggagggacgagcaagacggttgccgggacttctagaaagtaaaaaaaaaacccaattgataaacatattcgatttttaaaatctcaatgagaataaaggagaagcagcatgcggggtgtataggagtatagttgcagagccgccaacggttagcgggacttttagaaaagaaaaaataaattccaacgatagttatgttcgattttagaatcctgatgaaaataaagaataggcggcggatgggccgtagaggtgtatagtggcatcgtttgacgggacttctgaaactataaaaaatgaaacccaacaagacaataaactctaaaaactacaaggtccaatttttaaaggttcggaacttctaaaaagtaaaaataaaacaatgataatcatgatgcattttaaaatctcaagggaggcagcgggcgagccataaaggagtacaatggcaaacccgctgacggtttggcgggacttatagaaagtaaaaaaaataaacccgaacgataattatgttcgatttgtaaaatcccaatgataataaagagaaaagagagtggacgggccttagaggagtataatggcagcgtttgacgggacttctagaaattataaaaacgaaacccaacgagataataaactcaaaaagctataagatccaattttaagaggtttcaaggagaatgaatagaaatagtggtagaccgaggaaacaaaagaaggatatgacagaagtaaggggtagcagctggtgtgacttttcaaaactatataattagaaatacgaggataactatttaataaatcttaagtaaaatcatactgaaaaatatatgattttgtttgggtgctagccgcgcaattgcgcgggccaaaaggaggcactacgttcgttgtgggggttagaaattcccacattaatcagagaaaaagaaaaaaaagaaaaggagagtcatacaatttaaaaaaaagctgaaactcagaattaaaaataagcaatattgaaagaagtttccatataagaacccaatacgagattaatcaaaattcaaaataaaaataaaataaaatccaaaattagaaaaggaaaggagagtccaaataggaatacaatttaaaaatagctgaaattcggaattaaaaataagaaatattaaaagaagagtccatataagaacctaatacgtgattaattaaaattcggaataaaaataaaaataaatccgaaattagcaaaagaaaataaaagaagaactcaagtaggaatacaatttaaaattacctgaaattcggaattaaaaattagcaatattgaaagaagaatatatataagaacccaatacgagataaaaaaaataaaataatatcaaaaattagaaaaatcaaaataataaaataatatcaaaaattaaaaaaaaatcaaaagagagttcaagtagaaatacaattttgaaacaactgaaattgaaaataaaaaattaaaacattaaaagaacacaatacggtattaactattttttaaaaaaaaataaattctgaaattagaaaaagaaaaataagatttcaattaggaatacaatttataaataactaaaatttgtaataaaaataaagattattgaaagaaaagaccatctaaaacgtataacgagataaattaagtaacatgcctataaaggagtagagtggtggcggttgatacgacatataaaagttgttaataaaacaccaaatagaatcctaatgacgattaaaaggagggactttaggcagaccgtgaagcaaacaagtaaggcggttgctgggacttctacaaagtaaaaaaaaacaccattgataatcatattcgatttttaaaatctcaatgacaataaaaaggagaagcagcgggcggggtgtataagagtatagttgtagagccgccggcggttgacgggacttctagaaaattaaaaatgaattccaacgatagttatgttcgatttttagaatcacaatgacaataaagagtaggtgacggatgggctgtagaggggcaaataaagagtaggtgacggatggactgtagaggggcatagtggcatcatttgatggcacttctaaaaattataaaaaatgaaactataagtccaatttttaaaggttcagaacttctaaaaagtaaaaaaaaacaatgataatcatggttgattttaaaaatctcaatgataataaagaagggaggcagcgggcgagccgtagaggagtacaatggcaaagccactgatggtttggcaggacttctagaaagtaaaaatgaacccaaacgataattatgttcgattttttaaatctcaatgacaataaagagaagagacagtggacgggccgtagaggagtataatggcaacgtttgatggggggcatctagaaattataaaaagaaacccaacatgacaataaactctaaaaactataaaatccaatttttaaaggttccaagaagaataaataaaaatagtgatagatcgagcaagcaaataaataacgagataacataaggggtagcaactggtgtgattttaaaactatataattaggaacaataggatgataaggtttggtctttcaaaatcttaagacaatgagatagctatttaataaattttaagtaaaatcgtactaaaagatatgattttgtttgggtgctagccgcgcaattgcgcgagccacccagctagttactcctaaatgaaagaggaaaataaatgcgggagggataataagaaacatgaaactgacaagaaccaagaagtagcgtatataaaacattaaaaaagcacgaaaaatagttctcatcttgctgtcaatgacttaagaaaaagggaaatatttgaattgtccttttttttaataatggaagttttattcagactcagttaattacaccaagatgatacaacgaagcccatacctagcctatgcatataatgcacaaatcccaaagaaaagatagaaacaaccaaacctcttacaagcacaaaagtttaacaaaaacataggtcttagtggctatcaattcgtagactatacctcttaaactaatgaggtagtctaatttatctctgtcatggttatggataagacatacctcctgtcctacgacttgcggtataccttcgtgcatacgatgtactttcttatgtgataaggaaatctacaagatatcatggaaaatatcctcatgggcaagtgattactagagtcctactcggagaggattgggtttattcgttgtctcagagttctacttggagactgaggtaattcacggtataaaaggcacaccccctaaggggtttagatcatcgaatcatagcgccaacacatccaccatagtctacggagctggaggacgcaaaacctactcacccgagatctcgtcgaatcatctcgacaaggatctcgctggtaacaccgaattcatctgttctctttgtactctgtggttttccatatcaatctcatataaactagattggggctattacattacgaggggcctgaaccagcataatctctatattcttgtttgcttgacgtcgtatcgtgtagatcctcgtaccaacgtaccccaataccctatttatccggtctaggggtatcccacgtcgacaatcccctcaattcaaataccaaagattttgtgcctcaaaatctttcaaacccgatgagttacacccctcaacctaagaggggttttggtcctagctggtgtacatgtggcattaatctgattatgtggcaatctagtcaataatattattaaaaatataaaaaaataattattcacccaa

SEQ ID NO: 9765 - DNA, 19612 bp, Oryza sativa
aggcggcgggcgcctggggcagcgtggtgcggctagcccgggcgcggaggcggcgggcaggcgcagcctgcccagcgcggcagcagcggtgcggcggcttcgcgacggccgctcggcccggcaacccaagacgcggcgacgtctcctgggatgcgcgggacggcgcgagggccgcgcgtaggcggcggcaacggcgcgttggccatgcggaggtggcgggttggaggcgcgaccagcgacgctgggcggcctgggtcgccgttggtgggcggcgaggtggcggcggagcattggcttcggcgaggccgccgttgggcttggcggcggtgtggagcgcgctggcggcggggtcgtctttcccgtggttggccaggcggtcgctgtgttcgaagagctcctccccttctttgtggggagcttctaggcacggtgaaggcgttggccggtctaccagaaagactcaggttgccaaggcgaggttgttcccggtccggtcccataggtcggattcgacgtggaggctgaagggcggcgtggcggaggtggcctgggtcagcgtgctagggcgtggcggcggggtcgtcttccttgttgtcgaccaggctaaccctgtttggcgagctcctcccctctctgcggggagcttcttgacaggctggtggcggtggtcagttgacaaggaaaactcaggttgccgaggcaatgttgttccatgtccggactcccttaagttggattcaacggggaagccggcgggcggcgtggcagaggcggcttgggtcagctacctggcggaggtggttggtgctgtggcagtcttgtcgttggcaagactggaagccggccggcggtggggcgtcggttgggtgtggtggaagccatgtgccgccgatgtttagatggtggtttcggattgggcaacggaccatggcggtagggggtaccgagcgaaagcttagcccaacctttgggccaacagtgactacgctttcgggtcgctttcgggtgtggtaaccctcctgagggcatggttgaggtacccctcctcccttggcaaggagctctgggtgaaaaccttgttccgtttttgggacggatgacgacggcgtcttttggcgtcgcgaccttcctgagggcgtcgttttagagtcttcgcgtcgtggtggtgttgttggcccggtggcgatcggtctcgcatagcgacggccggttcggtgctcggctcccctctctgtagcgtgtgtttgcggttggcacttggttcggggcgtgtgctctagtgcacatccttcctcgacaaccagctatcgatgtaaaaccttttcttgtaaccttttcttccaatcttaattgaatgacctccttcggtctttccggcgaaaaaaaagtggccaacacgacaagttagcaacacccagcacctgaccgccgagagtttccgcactccgctcgcctgcgcggtgcaccggtgacactgtaccgaaccctgcgcaacccaatcacgtaagctcaactaaatttggcccaaccaaatgctcgctgctagtactagtacaagcgataggggggtctagaatgctcgctgtccatatattagatagataaactggtgagattttacagtcgacggcttgctgctcagcacttgcgctatatagaaagagaagtaatcaacattacagagaaaaaaacgtgcagattggtggcaggacacatattagttcatccagcaaaactttagactgtcacagacaacaaacgctatgtcacacaatgtatgtatagctccctctttgggatgtggacagcggacgtacagggttactatcagatactgcccaatgcaaaaactacaccagtacagaaaaattacagtggaacgcatacatctgcatatgaaaaaaatcgtcacactgaaaagaatcgaatccgacagatttatatagcaggaaaggtggtgctggtgatggctgtgttgaagatggcttatctgctgattcggtagaaggtgcaccattgtaacggtgatattagaatcaagatcacttgtcgcgtccgtcatcaccggtgctgctattttctcggcattgtctgctgcttctagctataccctctaagtgtttcagcaggagcaccttcaaatgtaggagctccagaggttccttgagtcagggagtgccctgcattatcgggtgccttgaatcataggagtgccatgggccattggagaaccttagcttctacctatccatcattgacccatcgatcagtcctcagcttcaggggtactatattgctaggcaggccaagttttcgcaccagatcttttaattgcaacaggaggtgcagatagaggaggccgaaaaacactgcagcagcatcagttccttaacagttggtgcgtgatccagctccttctgtagcatcttattccgcgttatgactaaattcctcaatgatagacgaccatgggctgaaaagtgaaagatcctttgtaagtgcttgataatacatatatttgagcacatttagtcaaataacaaatgaattctttagggcaacaacaacaacgaacagattgaataaaaaacacttaatggtttggctaaactcatgagagaggattggaaaatatgcaaatccttctctctctctctctctctctctctctctctctctctctctctctctctcttaaagaaatcaatgcacatcctctgtatttctaacaggttcatggttcattggtctgctcaagccatacgccctaaaataagtctaagcacatattcctattgacattttactgatcatgctatagcttgcttaaacatacataatcgaaatatgaataaagacagtgtatagcacataacttatgagatgcaaacaaggaaacataaggttttatcatgtgcatgcatgaacaatttgccactccatattccacaaaatgtgatcaaactggagaaggaaattacagacacttgtgtgtggtacaactctctaataatgacacttttgcagacgagatcatgtgggtgagaacttaatttctttatcacaaaaacagtcattgacaagaaccaaaattcttaatggaaacatccaaatcttttgaggaagtagcaacgctaattaaggaagacctagacttacggacttttgccttcaagcctccctaatttcctttctttctttccctccgatgtatccttaagttgtattctccccctgatctaagcccctttaaaacgttgtaacaactcttttttgccctttttccttctaatataaccggcagccctcctgtcctctaccgtttcaaaaaataatagaaacttactactgataaattttggtcaaagtaacataccgacagcctagtaagttcatggtttccaacatggagtgccagacctcgtagaatttctccatgtaaaagcacgctttatagaagtcgcagcagccaatctcagcaatgctagcctgtctggtggactctgtggcatcgataaagtctgaaaattcgttgacaaacttcaagatcgatcccttgcatgccatctgccatactttcttgcttagctactggtaaattaagggtgtgtttagttgggaaaaaggaaatttttaggtgtcacatcggacgtttgaccggatgtccgaaggggttttcggacacgaatgaaaaaactaatttcaaaacttgcctggaaaccgcgagacgaatcttttgagactaattaagccgttattagcacatgtgggttactgtagtatttatggctaatcacggactaattaggcttaaaagattcgtctcacgatttcccctatgactgtgcaattagtttttctttttatctatatttaatgcttcatgtatatgtccaaagattcgatgtgatgtttttggaaaaaaaatttagggaactaaacgggcccttaagaaagtgtgtaacatcggtagcagtagtttcttgtcccacatcctggcaatggtcattgtcaaaagcatgcaagtgtccttttcaagtcatttagtactttgcagggtgagattgaactccaacctgaggaatatcagcagaagtttgaattcatgaagaaacacagaatagtttctgtcaatatcaaccagtacacgtaatttcacaatacagtttaaatagaagcatatcaacataaagcaactgagaaataatatgcacctggggatgaaaacggagcggatacggacggataatgctcataccatattcgttttcatattttttttaccggatacaaaaacgaatacggataactcgaatacggatagctcgaatacggaaacaaatacggattatctcgaatacaaataagaatcgaatatgatcggacacgaatacggaaacaaatttttctcggaacacgaaaaccaactcaacttctaatagaaacaaatatcaacatatataattagctcattttatataaaataaggtataatttataaatattttttaaaatttaaataatattaatagtatggactagtgttaagagataaactactattaaaatctataaaggtatattgaaggttatagagttagaaagaaatggggtatatctcatgggtcctgcggatattcgaatagcactgttcaccggatatccgaattattatccgtatccgacggaaaccctgataccatattcgtattcgtatccgagagaaaatatccatattcgtatccgtatccgaaatatccgagaattatccgatccgaaaggtatccgtatccgtttttgtccggagcggacggaaactatccgctccgttttcatccctatatgcacctcttggatattccaggtaaatgatgaaatgcttcaacagcatatccattcccagcataaacttagttaggtcatcggtgctcacgaccaagtctagtggccctgcataattagttttgggagtattacatatttacgtctcgcactaaaaaatgtcaacaagatgcaatgttctaagaataaacatataccattcgcgacactaactggattgacatatcctgcaaggcaccgacatcctataccaggatggctgaggataaggcatgtgcgcacatatacctacaaaaagggagtgtcaacagttacaacccgatgtaattcaagataaccataagaaaaaggtaacacccctttttcttctttgcaaactttattccataagaattcgttcatgaaatgagataattaaaagttacacacttacctgtcaacaagtcagagaactccatctctgacactgacaccaatcacaacaagggatacaattggtcatttcagctcaaggggaggtggcttactgtaacagatacccctcctccagcagcagcaactctagcatatcttctatcatccatttattttctgaaacacgcccggcgattcttttttttcttgaaacactggatctccgcaatctgaaacattgccaatgaggtggtctaagatgaaagtttggtaaaaataacttacccaatgtgcaatttaatataccaaagagagaatgggttaaccagcttgattttgactaataagtaaataatgacataaaagctataatagaatttttgcaaaagggcgatatgagactacaggtcacataagtaatattgcacaacaagaccacatcgatcacattgcatcaaccaacaaaaaaatcaaagatattcaggaagcacgaagcccttacatggatatctcaaaggcaacaaacacacctatacatgtataactggaaattctaagatgacctttatttggaggaaaatggatcatctgaagcaaatgatgacccacttcccccaaaacctgataaaggatatagctgttgtgaactgattctacaagatttagggtgtgtgctaagcaaagcacgtccaatgcaatctaattatctgcacgatcacaaccataaataccattttattgaagcaaagcagtactgagtaccgacaatagcatgcttaactagttaactggagaagataatattctactgctgaacaagctgaaaaattaggtctccaacacactgatcaaccaactaaatgctcaaaggtgaaagcaaagaacaacttatccgtacctgttggagccgtcgcaagaatccgtgcgccacttcagtgatctccgatttctgccgccgcgttcttgatccagccgtattcgccaagaaccccgcttctatctccgacttcggcggggtgattcttcatctccgatcttcggaaccgccttcttggcctctggtcgcgttcttgaggttgccccgccaggacctcgtgcgctccgaaacttctcgccgttcttgttgtactcgtgcattcttggattccggccgccttcttgccgccgatatgaacccttggacgccttctttgtcgtcgtggtcccgtcgatgctggggccgccgccgtcgaagaagccgtcgccgtggacgttgggggcgccgccgtcaccgtggacgctggggccgccgccgccgtggacgctggggccgccaccgtcgccaagaagcagtcgccgtggacgctggggccgccgccgtcgccaagaagccctcgccgtggacgctgcggccgccgccgtcgccaagaagccatcgccgtggacgctggggccgccgtcgtcgccaagaagccgtcgcggtggctgcctctccccgaaccggctggtcaccatcttcgcctcttgggtcggcagttcgacccgcgttgttgacgcatatgctatctcacggcctcaacacgtaaaaggaagtacagaattgggttcacatagtccgacccatcaaacgacacaatgttcaagcgtccaaccacgaaccaagaaacacaagaaaattccacggcaccgacgatcggcgctcagcgctgacactcattgagcgaaatgtgaacatgtaggtcctcgctgagcagggaacctgttaccgcaattgcggcaaacgaatggcaagatcagacgatggtgctctaaacgatagtggcgccacatgtcatccctcgtgaggcgtggtactgtcaccgtctcatcgtcgtcagaaagaacacacaccctgcacaagaatcggtgaccacgagcccacagagaaagcaccggtggtgctggtgccccagcctggatttttcacattttggtccttttaaaaaacttatttcgcaaatagacccctagaaaaacttatcctaaaaatggtcctttttggggcgccagagtggctggcgccgtcgtccaacaggacagtgccagcctctctggcgccgtccccctgccgacgtggcggggcgatgctgaggtggctagggagtgcgccagagtggctggcgcccccccccccgaaattttttatttttgttttatttgtttgatatttttttcacgcttagggacacataaaaaccaaccatagaaaaattgaactcaaatggacgtaatatgtgacctgtagaatttttcctctcctctcctctctctccgaactagtgcaaaggagagatgtgcaacttttttatttttattttattttttgatatttttttcacacttaggaactcacaggaatcaaccatgtaaaaaataaactcaaacggacgaaatatgtggtatgtggaattttccaaagttctaccgaaaaacttctctcctcgaaaacacaatcttgcaagcggaatttggaggttttaatatcgccgaacccggcaaagctagagagaatcggatgtaacattttctatagatgtccgtgcatatattatttgcctgattccgagtccgtatgagaaagttacgcctattttattagatgacatattttgtccgtttcggtagagttttggaaaattctacaagtcacatattttgtccgtttaagtttattttttatacggttggttcctatgttctcctaagtgtgaaaaaaatatcaaaaaaatgaaataaaaataaaaaaaattacatctctatgtactgtttaacttatatatgtcatttcatgtggttatattttgaattagattaagtaatttcatatagtggtagagtgcattatgtttaacatgctgatcaaagggttttactaaaggaattatggtctaattttagtgaaggtgcaaagtagactgagtggtatgctagctattttcagacttagttaagtggtagttcgagtttaaattttttttgtggttggttgtatcgtgatcctaagtgtgaaaaaacatccgaaaaaataaaataaaaatgacaccgttgcaacttcatacagagaaacaggaatggaggcggcggcgccagcatggctggcgccctcctcctgccacgtcggttcgcgtgcgccactgtggcaggaggacggcgccagcctctctggcgccgtcccgttggatgacggcgccagccactctggcgcccaaaaaaggaccatttctaggataagttttttcaggggtctatttgcgaaataagtttttcaaaaggaccaaaatgtgaaaaatccagctgccccagccccctgcccgttctccatgtcttcgatgtgatcacacgtgggggagaggaggcgttgacgtgggatgaccagtgggagagagaggaggggttaatgtggggatgacaagtgggggagaggagaggatcgtgttgcctaattccccttttataataggtgagcagataactatgtgcgtcaagccgtcgattaatgtaccgttgatgtacagttgcttcccgtgtactttaacgtgacagaaaaaactacaacaccagttagctcgattggatccaaacaaaatatttataataacaaaaataacttacatatttggactccatctttagcacatgacaaataattttagtaccgaaagataaaaagatacgggggctgttcagattgatgtcattttcagccatactattttttttaaagttgtcaaaaaaatatctacgtttagtttgttgccaaatttggtaaatatataaaaaatcttaccaaaattttgacaatattaccattttggctacaatctgaacaggcccataaaatatcgagagagcgaggtcaagtaactcaattgattagtttctgtctacttaagtcatacatttggtctacttaagtcatacatttggtacatatatgcttgtatttacgattcatttatgtgattttttcggtccgatttttatccggcgtacgtcgccacctccgtcactccgattttgctgcgcaatgcggcccacaaagtctggagtctgtgcgccaccagcctgcagatcgctcctatcgctacaaatcagacgggggagttgggactcctctctgtctcgcgtcggcgagccgttgacacagtggttccagggcgcaccgtacagcatggatggagcaatggagagtagtatcaggcgcagcagattcttttttcacctgaagatgtacttcagcacttaagtctttacggatgtgtataaggcaagcgattaaataaacaatggtcacagctgatcataatagtgattattttttaaaagtatacatatatatggttatcaaattcatatactctgtatttatatgtttttcaataatgaaattttattttggcctttatttcaaacataaatctatatccatatatctttatctatacctaattagaaaataggtaaggcttccgggtcgcttggttccggcgtacgattacgaggatgacggcctggatctcgggaatcctgtcgtcgtcttccgctgttgtctcggcgccgatctccatcgtcgtcgtcgatacggcggcggccatgaccagtattgtctggcacccgtcgttcgcgatcgttgtgatcgtgatggttgtcgtggtcccggtcctcgtttgagcggtctcctcgatttatgttatcatggcaccgtgaagagacatgacgccgagagcgattcacgttgtctcgtgtgcgtcgtgcttctcggcggccgttgatttgatctcggagatcgccagtgccgcgaggtggaggggtagctcgttgaggtgattccctccgttccggatcttcaccattggcctcgccagttggtggctgctcctggtgtgctgcggtagtggcttcttcaaacgcgttgctgaggttagtcaccgattcccgtagtcgttctgtccaacgctcgaggtcaacgttcagaacgggatcgtaaggagttttcctcagtatcgcttgaacagccctgatatgctgggctagagtagttgattgattccccacttctgcgttggcgtgcgctgacgtgccaacgtcatcgatagccaatacctcccacggcgcgctcgttgtcgatgacccatagtcctcaaggagatgtaagaccgatggttcatgaggatcgatatcgattaccccaacgaatcgatctgaagttagagtcgctccttgttccttgctgttatccctgatggggacatatgacttaggagacggagctttcatggcgccgagaaagactttgcagctcgagaggtcatgattctttgtcttgtgaataggacaatagacatcctgagttggagaagtacgttgaattccatgttctttgcaggcgcgaatttcaacacggacgttgaggaaaacccagcaatcttgcagagtgtgtttcttggttttgtggataggacaccaagaccttgtggcttcggaagtcatctttgtcgactcgtggttcatgtcggaaggacaaggtttgaccgtatcagaatccttctcgagcttagatgtcatcgatattccgttcttcgtctcgatgggaggatttttcgacatggaatcgccttggttcgtagccactgcgttctcgtctccagtcattggaggactggttgagatcggcgtcgtggtgtaaaccgggaagacgatttcgccgacttgagtccataccagcattgttgaagcagggagtactgaggctagtgctgacgttgttgtcgacgaagctggatgacatagtagtagaaccttgagtaccaaggccccctacctggcgcgccactgtcgacgggtgatacccgtagaccagatatagagggtattggggtacgttggtacaaggacctacgtagtacgacatcaagcaaacaaaagacaagaattatactggttcaggccccttgataggtaataaccctaatccagttgatgtgggattatatggtagaaaacacagattacaaagggaacaagggaacttgtcggatccggcgagattgtagtcgagttgtttcgactagccctcgacgatttggctcctcgtaggctccggcttcataggctgtgtaggttgtgttggctctgagattcgatatcttaaaccctccctagggggtcccttttatatcgcagatctagaggtctccacgtagaactcggacgtatcagaccctatacgatacgccaacgacccagttctgcccgagtaggattcttcccgtctataaattccgtgaaaggtttccttacaatatacaggaaatattcgcatgcgcgtggatatgacatatcgatatgtaacgtatatcgaagggcaaagggtatgcctaacccgtaaccctgacaagcatcattttaattgcttatgactgtttattaatttaattctagataaactaaaccaactagaaatttgcctacatatttctcatgatgtgtatttattttatgaccaacgttgattataaattcatataggttttatttatattcatgtttataaattatttatgcctgacagtgacgtaattcatgaattatttctgtttaactttgtaattaattgagccaacacaaattaattattttcatttatccacgtgtttcgtgttttacgtgtcgcataaaagatttttaaacacttgattaacaacactaacccacacgccctccgtccccatactcactaggtgttcatcgcgtacgcaggtcaaaggaaaaaaaaaatcagggatcagagatcgaatcaaatcctaatcacatacagcgggcaaaccacaaaatcgaatgtcgattaaaaacccaagcgacaaatatcattcaaagtctatatcaaataacacaaaaaaattaaaccaaagtaaggaaaaagtataatatatagcgatccaaaacgtttttacccgttgcaacgcacgggccattttttttagtaatgataaaattataatcggatagtagcgcacacaggtgcatcaataactttttccacattattaatttgatttagagaaaagaaatcatagcatcgaaggagtaacccaaatttgtgggggccaacttttcatgtgtactcctggtaaaggcatcggcttcatcaccttagccttcaagtcaaaaactccaatatcacgtggcatttgtttacggtcccaaaaaaaacttaaattgtcttcagtgaagtagatgcaatctgcacctaatccggggatcctatcactcaaaaagaatgttgccgagttgctaccaatgaagattgacgcgccaccaaaatcatgcacctctctccactcgcttcctctaggacgctcgtcaagaataaatgcttggaattttactgttggatcgggtttaagctcaggctccggctccggatcatagcggtagttgtggacttgtgggctgcattgtaattgtccttgtcattttcctcctcaatagcagtgacatcgtcatcgctttcagagtcacatcgatcggtactatgctccctcaaaatgagcatcaggtttccgttcggtgactcggctaggtacttcctaatgtagaggggcaggccgtcttcgtctcgggacataaactgtggagcaacgtttcttgggttaaatggtgttgtgacgtcatcatgttcccaggtttggactacgccatctaaggcccctcacagtgctcctagctgtagcgtggcttagtactgccacgtaggtttttttcacccgtgtcgctcggccacgcttctctgcttggacgctcgtgagtaaactaggatgcgcaaaaccaagcctggaaaagggaccgcgcagaggaatcgaggggaggcgctagcgctgtgggcgtcattccctcgccgcccggtgctctcgcgcgggattcggccggcgaaatcccctattcaccctcccaaaatcccctcccgccacaacattatttctcccgccacagataggattggaagagaaaaagcaagaaaatcttgaagattggaagagaaaaacagatcggattcacggcaaaatcatcacagaaaaatcatcacagaaggcggtgccggcgaattccaccacaaaccaccactcaagtcaactcaaatcaccccaaaccacgctgaaatcaactcaaatcaccccaaaccaacagatctggacagtgcaagaaaagaacagcagcgacggctcatgctcctcttcctcgcggcggcggcggctgccgggctcgccgcggcggcctgtgccgcgcggctccgccgctccccggggtccggcggcgctgctcgaggtcccccttcggcaaggtcgttgcggtggaggcttgccccgctcgagcctttcccctcctcctctgccgccacacgaggccagcgccgcgcttttgcccgccatcagccgcttgtctgctcccgtctccggccgcccgtcggcgacgcatcgtccactcccgccgctcccaccgctcccgagtccgcgcgggaggagaagcgagcggcgcggtcgacggcgaggcgcacggcggcggcgtcctcggcgcggtcgccggattcgcctcggccaccggagggaggggaaggaggcgcaggggagaagcggagcggcggcacgggaggagaagcgaagcggcgcgggaggagaagaaggcgatggcgatggagtggaggaggagaaagtcgctaggggtaggtggggaataaatttcgtcccgtaccccgtgtctacacgcttgggtaacgctgcactgtgggttcggttttcttcacttgtggctccatccaattaagccacacatagtatgggtgcttgcactgtggggtgggtgtctttgggccaacttttttggcgagagctacgggccccatagctcgcactgtgagaggcctaaggtgaccatgtagaattgtcctcggtaaacgatcacatcttcatacatgtgtcgcgtttgcaagggcatccattttgcatcacgcccacgagcaagcacaaccctgttccttggacaatgcatcatcatgataaagtattcaccagaactagggtcccacaacgggacggctttaaggagacgagatgaccggatttcctccgcagaaatctcaatgtcggagcaccatccgacaaacctggtgtggccctccggccagtaggtttccacgaatgaggctactttaaacaagaacctagcttcatcaccgtcagttcttggaagggcatcaaagtaaccggtagtggtgatggatggcagcgagtgttgagtgccggagatggggttaaggaggtgcagcccgcacttgtcatctgttgtcacaagccaacccttcgccgagccaatccacatacggctttggatggcaggggaaggcagggtgattgagcgacgccgtccatccgagaaagagtagaagtccgcgacggctagatgttggggggaatcaccggcggccggtagcatgagccaaggcggttcaggcttcggatgaaggcggaggttcatgccgtatccgccgcccgcttccacgtcttgcagacggcgccaaacttgatccagtctgcgaggactaggcgggttacaaatgttagagtttgtgtcgaatatgtgtacgtagtcggttacagtttaggacttggagttgtaataggtattaggactagagtatgagtcggactctatcctaggatccctcataaatagaggggcgtgcctgttgtaaccgcatggcgacttagcatagcgagagggagcggctgccggcgtcgaccggccgtgagtcgttgtaactctgatacgctatatatgatggatcggggaggagcgcccgtaatcagtgccccggagatgtaggctacggctgaactccgttaccaaatatcgtgtctcggtgtcgtcatcgttttggatctcctatggagttttcttccgtatttagctatcgatgtcgatttcggggctggttttataacaagtggtatcagagcctgcgggaggtccatggtagaggcgcgatggaggtgctccacaccgcgtagcctgctataatgcccagggaggggcattggcgcaaggtggagcacggcggcgatcaacggagtcttgatcggtggatcgaacacttctggcggcggccggaaccgtcgatggctgccttcaacagggagatgactagacatggtgctcgggttgatggcggcggaagcgattggcgatccaatcggtgggtcggacacttcgggcgggtggcttggactttccggtgagctactctcgatagggagacgtgcggccgcacgctcgggttgattgaagctggaggcaatcggcgttctcgatcggtggattcgaacactctgggcggggtggcccgggcctttcgatgtgttgagttcgacagggagatggctagacgtagtgctcaggtcgttcggcggctgggaagacggcatgcgacttgtcggcttcggctcgcgactagattgatggcgttcaatcgaaagtcggagcgggtggatcctataggttgttttggaggtgttgacgaggtatttgcgtgacaaactgctacggagaaggcgcacatacgaaaagcaacggaatcaggcagaagggcagtcaatttcagaccgtcaatgcgctgatcaatcatgttagcacagcaataagcattggttgcaactgaccggcggtattcgtcaccagcgaggttcagcgggaggctaggtggctgcgctagaggtcgtacgggtgcgtggaggctgaggaggtcacggagatggcggtgtgcacgtgttggtgttgaagccgggaccatggaacgtggccagagcccgagtagcaggaagtcggattgcgcaggactcgatctggagaggttgtgacatggaaggagtcggatatgtttccaactcggatgcatagcacaacagagaaatagattgagggagagacctagtcaagcacggaaggggaatcggacgaggactacgattcgttcatgaatcggactcgatttttcccaaataaaagcagcagaggaccacaggattgcaacaacgcaatcgaaacaaatcatctagcagagggcgagattcgtacccgattttcgcagaggcaaaggtggtttgggcggcgaggtcacgggcggctggagacgcgtcattgcaggtaggcggcgcacggcggcgtggtactcggcgacgttcgtcgcagctcaggcaggagcttgcggcggcggcggcggcggttcccggcgaggaaccggcggcggacttcggcggcaggcgctcccaggtggcaggcggcggcttcccaaggtaggcgacgcggcggctcctcgcggggtcggcgcaggtgacagcggcgggaggcggcggcgccccaggcggtttctgaggtggggggcatggtgcttcttgcggggccggcagcgtgaggagcaggaggcggcggcgcatcgggaaaagcggcgcgggcgcggtttctgggaggagcgaggaagccaaaggaagaagggagacaggatcgatctgtttttctttgactggtggttgaccaagtaaaagaaaccggtccggttttttggagaaagaaaaaaaaaccggttcggtccggctggtactgttcgagttagtcggtggggtcgattgaaccaaggcagatcaatttaacagggcaacagctgttgagttgattatcgtcgatggcggtgacggtggtttccaaatttgagatggtgaagttcgatggcactggaaatttcgttctctggcagatgaggctgaaggatctgttggctcaacaggggatatccaaggctcttgaggagacgatgccggaaaagatggatgctggcaagtgggaggagatgaaggcgcaggcagctgcaacaatacgcttgagtctctcggattctgtcatgtatcaggtcatggatgaaaaaacaccgaaggaaatttgggacaagttggcaagcctgtatatgtccaagtcgctgacgagtaagttgtatctcaaacaacagctgtatggtttgcagatgcaagaggagtcagatcttaggaagcacgtggacgtcttcaatcagttggttgtggatctaagtaagttagatgtgaatctgtatgatgaagacaaggccataattcttctgtgctcgcttccaccgtcgtatgaacatgtggtgactaccctgacgcacggcaaggatactatcaaaactgaggagataatttcgtcgttgcttgcacgagacttgagaagatcaaagaaaaacgaggcaatggaggcttctcaggctgagagtttgctggtcaaggcaaagcatgatcatgaagcgggggtgtcgaagagcaatgagaagggagcacggtgctataagtgtcatgagtttggacatataaggaggaattgcccgttactgaagaagaggaaagatggcattgcaagtttagcagctcgtggtgatgattcagatagcagcagtcatgagattctcacagtgtctaacgagaagtctggagaagcgtggatgttggactcagctagttcctatcacgtgacatcgaagcgggagtggttcttttcatacaaatctggtgattttggtgttgtttacttgggcgatgacacgagttatcatgttgttggagtggacgatgtcaagttcaagatgtatgatggaaacgaggtgctactttcagatgtgagacacgtgccgggactaaggaagagtttgatttcgcttgggagcctacatgagacaggttggttgtatcaggtggattttgataggaagaccatgaatatcatgaaggacggcaagactgttatgactggtgagagaacaagctcatgtttgtacaagttacaagggaatgctgttgcaggtggagtcatggaagatgggtatgctggtgttgctgtgcacgatcctgaaggcggcgagcctggcgtaagctctacgggcggctcggcgtgagctgcggcagaaccaactcaagtcctggtacacggaggttcgagcaaataacagattcggattggcgtggcatattcgccaaggtggagtttgttagagtttgtgtcgaatatgtgtacgtagacggttacagtttaggacttggagttgtaataggtattaagactagagtatgagtcgaactctattctaggatccctcataaatagaggggcgtgcctgttgtaaccgcatggcgacttagcatagcgagagggagcggctgccggcgtcgaccggccgtgagtcgttgtaactctgatacgctgtatatgctggatcagggaggagcgcccgtaatcagtgccccggagatataggctacggctgaactccgttaccaaatatcgtgtctcggtgtcgtcatcgttttggatctcctatggcgttttcttccgcgtttagctaccgatgtcgatttcggggctggttttatatcaacaaactcgatcaaaatgtccgtgggaagtttggtccaatccatggaggagggagtcgatgaacacgaacacgtcgcacgagggagtagttaccaactcaccacagagatatataggccgtgcaactatgcaaagccatccgaaacggaaacgtcgtaggcagggttttccgatacacgtacagacaaacaaagcaaacagacctggatcgaaatcttatcgcgcagtccaacacccgagttaatgattttcgcgccccgctagctcgcccgcgcggtgcaccgctgacgctgaacatgtctcctttctcccgatcccagcgctgcccccacgcgcgcgcacgtacgcgtaagcccaactctttttggcccgtcctcgaccgcgcgcaggcatgctaccgacgccggatggaataagttcacttcatgaccctcaaatgtgatcgaaatctaaacgataaccctaaactacaaaaccaaaatcagatatctcgacccccaaaatcctaaaaccggtacaatttgactccctgagcggttttaggaggcggttttgctgacgtggcgccacgtggtgcctatgtggcaatattgaccgaatctttgttacacacggcgttgacgtggcacctacatggcggtagaaataaaaaatatacgtgggacccattaatcattcacacaaaaagaaatatgggcccactgacatgcggggcccacatgtcagaccttcttcctcctccctctctcccttctctctctttctctcctcttcttccctttggccgccgctccctaccaccggcgagctccagcccctcccacgcgcgcagacggttggcgagcccctc

SEQ ID NO: 9766 - DNA, 24097 bp, Oryza sativa
  unsure (1)..(24097): unsure at all n locations
atgacaaactgctgattaaggacagctcctagcgctgcattatttgtggagttagtattgctgctgatgaaagcctcaagaccactcagtgcgagataaaagcgcccccatacaaatgcatagactgttagcaccaccatcattgtgttgaaataaaacccgatggttgtataaaagaaagagagcatccgaaagaaatccaatctgtgccccagtctataaacgtctctgctcaaagtttgctcaccgttgccactagcaaccttggcttcaaacatggaaacctgattgagccccacatcccttcctttaccaacctggatgtattcatggtgtgtaacattacccccacggagggtacaattgaacccagcaaatatatcctcactgatgtttataactcttgatgctttactgataccacctcgtcccaagaaccaaagacgatcaaagacatctggatggccataatgcattcggaccttcagtggatctgccagaacacgctgccccagagtaacaaaacttgtttcctgggcagacatgaaccaagctagagaagacacagaaccagtgaaaacatgttcccgaaccccaaggatttttggcttgcgaattccataatggcgattgaactcctctagcagatttctcatcttgagagcttcttcaaaatagttgtcttggttcatatcaatagtttggacagcatcaccccttgtgaagatgagtgcatgattttggttctctggtttgccttcaccaagcttcagtggtccaggcaacttaacacgataaatctcaacctcccgctgcagttgctgatcatatttcacaaggacagagaaatattctgtttcaccaccattggagttcttttcatcaacataggcaacacgtagtgcttcataattcttcattagctctaaaatctcaaaagcatgagggtcattcttagctttctgctgaccgtaaatctggcatgcaaccacataagtgtatttcataaggacagtcccatactcgctgcctttaaataaggtgcttacactactgcttgccctgctcaatgcacgtgacgaagatgtcctgctgtaatatcctgacccatcagaacccacttcccgtctcgaagatcctatccttgatgagcccatagtagcaagctcccgggatccagtccgtaagtcatgttcagatgcagaatcaagaaatgtcagcatcttgagagcttcatagtagtacatcattcccctcacagtacgtgatagtgtctgccccctgtatgaaacccagtgccggagatctctcagcctctgcttctcactgtacagctccttgatattagacatcccctcacgcttcatacgttctacaaagaactcccattcatcaggatagatttgttgcagatagtacaggattgagatgccatcttcattctccttatagagctggtccttgctgtacaacacctcttcattgtagtatggcgtcaagacgctgaaggccatcatcttctccacctgggtggcccgtggtatgttcatgaacaacgaattactgaagaaagcaatccttcgacgagcttcaaggttctttgggacattgatcatagaatcccttgaggtcaggattgtgtgcatgcgccttacttgtttatagaaggtggggttcttctcttcatcaggcagaacaatagtgtccacgaagagaagcctcgtaggccttgactgtgctaaaccttcattcctcagttgttccatgctccttttctcagcctggaagtcacgaatcagaacatcatagagagtctgcagagcattgacaatcttggtaatgtccttctcaggcttcagaagtaagctcaatatagcaacaagctttgcatgcacatttggcagtacagacatcttgtactccacagtgaacttctccatgctcatggattcatcaaactcatggaacaattgtgtcacaatcccatgatcctcagtatcatccttgattatcttaagcagtaagtactttgcactatcatatacctcaatcactgcacatctacgataatcgttcttgcagatcttcctccaaagcttgcgatcaggtccttttacctcctttgcctgaccaagtgcaagtgatagctcattacagagcaagaaacatggccagcggattacacgcacattccacagctcaggtgggagctcaagaagctcaacttcgcgatcaccaacaatgtcctcctcccggaacttagtaattatctcattccaaacaagagcgaatctccgtgcctccacctgatttgactcgattttccggaatgatcgactgaagccataacgtagctgtagcctctgccagaaatttcgaagccggttgggcaagaaactgcgttcattcacctgctgttcctctggcataatgttgaatgacattgcacttgcaaagaactggaaccgaagacgcagctgtttcatgtccctgatctcccccagatgtgcaaatagccccacaaatgcacccgtcagtgaagagaagatagcataccaaatttggatatccatgagatagatcaacaccacaggaagccacaatacaaacacagcaaatcggttgctcttgccaaagaactcatgccaagcgtaatcaatctttttcaacttatatatttcctgtgtaggtttcacgagaggcctgatctggagaaaatagctgaacgcaaactttacagcaagcagaagcacccagaagacagaatacttgacattatcaaaggtgccctcacgcaaaccgcggccaacaaaacttcggctctgaaaccaccatgtaagagcataacatatcttccagtttgtcttctccaatgcattccgcacccacggcacaataaatagcacaatggcaaggacctctgggatcataaacactgctgctgcatacaggaatctcataatctgtgaattgctgttcctgttgttccaggcttccttgtacaagatcgcaaacgccacaacccagccagctgccacaatggccttgagcaccatgcgcacagcaagcatgcggccatccctgaaagcacgccggagctgtgtaccaatatccagtagcgcctgaaggaagcggagagcggcccaggtgataaaaatggtgagaacccgcacctgcgtgttccgattacccagactcctccacggcagcccctcactctcccacgccacgatggctgcggcctgcatgtagagcaccagcatcacccacagcctgtcgaagctccggtaaatgttccagaacgagcggacctcgacgaagcccgttttccgcacgcggctgcggtcaggaggcgtgcggaagaactgccgcgactgctccatgggccagccgaggcggtcgaacacgtcgcggcgccagaagtactcgttgatgtcgtcatagtttcgccaggcgctgtggggcgcggtgccgttccggctggactcgacctcggcgcggatgacgccgtagatgggcgtgacgacgcgggtaaggaaggcgttctcgccgtgcacggcggggttggcggggcggcccgtggaggtgtcgatgtagccctcgaggatgcggtgaagctcgagcgccatgtggtggtagatgtagcagaggcactccgggacgaagcggagattggcggcctccccccacacgagcaggtggagccccgcgaagagcagatcggcgcgcgggtcgccgtcggggacatacacgttggggcggcggccgaggaagccgcaccaggtggtgtagttgcggaggagcttcctgcggagggtgcgcgcgatgcggggctcgagcgtgtcggagaagtcggcggaggagagccgcatctgcgcgttggcgaggaggagcaccagatgctcccgctggttccgcacgttgtcccgctggaacccgaagaaggcgccgagccagtccatgaggtcctggccctcgcgccacgccgagtagggcggcgggcggagcccccccaccgcccggagcgctgccgccgccgccctcacctccgggaaccgcagcgacgggtgctccgcgaggaggtcgtggatggggatgatgttgtacggctccgccgccggtgaggcgccgcccgcggccgcgccgccgcggcgctgggaggcccgcggcgtcgtcatagtggcatttgggttttagggctagatctgggggcggattagccggcggtgagggagggaggaaggaaggtgagctgggttttggaccttggggctggtttgaaaattgaattctctcttagctggtgttgtggggaaggaggaggagatggaggggcggaagcggaagacggaggcggagcggaggagcccaaacggagggtcgcgtgagaaacagaggacgagcatgccggacgcgtgcgcttgcctgacggggtggaaaatgcaaaatatggcgcaggatggcgagaactgccactcgtgtaaaaaaaagatcttctgaagtagtactagctactagctgttgccccttttatccggggtaaatttttcttgtgcgcgtggcgcgtaagtatctttcttctctgcgataagcgtgtatgtatagagatcccacgttttatttgttacagtttataggtgacgataattattttctgagaaaaaaaatatcagaaggattagtacgcctctctggacatcatcgtggtcgattaagatggctatcatcagtgaatgcgccattaaaacacgttttgcggtcaatatagtggttcattaaggaaaagtatggctttaaattaagacggtcattcgcacaaccattagctataattgttggtgcactagcctgtttgctacctccatctctctaaatggtggtgttttttggtattttgtcactactttcaaacttatttttacaaaaagtattaaaatacaactatataaaagtttttcataaaagttctattaatgtttttttgcattttcaaatcctaacattttactttccatctattactacctgttttaaaatgtcgtcttttctagatggagggatttttttaaaaaaaaacaaggtaatcagtaaccatcagttacacactgaaatatactcttacgcgtcagaggatatgtatttgttttttctgatcatatgattatataaaatattgaataattcctcgatttcatgttacataatgtgttggactgtaaatagattaatgcaaggacgtatgtatatgttccatataagtgtccaatttatatatatatattagtgaatttagatgagaaatggatatgccgaaacatcttatagtgtgaataaacggagtagaatataagcggttttgaggttagagtgaaaatgatatatattactctataaagtatttcaaaagcagatttctagacaaaatctacccaagataattatcaccggtggagaaattgtcttcactcccggtttgtaaccccccatagtcccggtttcccaaccgggactacgaatccgggactaaagatcgctatctttagtcccgggtgaaataaccgggagtaaagatgtcccggttggtaaataaagagaggatagggacaataccggatggtccccttttctttttttttgttacttttttattttctcacgaatcggatggcatgcacatcccaaatcaaacctcaaatccccaaataaagtaacatcccaaatccacatcacaaatcttaaagttattatacacacaaatctaaaacatcacaaatcctaaaaaatttacatacaaatcaaatacatcacatattatacatctcaaatccatacaatgaatcacaaaattacatctcagtgaatcacaaaatatcaaaaaaaaagagagaacaagtaactttaggggagggaggacgtttgtgcgcatgtgctcccctgcaacgcacgtctgcgccgcacgccgcgtgtccgtccatccaccgcgtccgtgcggcgcggcctcatacgtctccaggggagggaggaggaaaggaaggggaaggaaggaggagcggcctcatccgtctccaggggagggaggaggaagggaagggggaaggaatgagaaaggggaggatctgtgtaagataggagaggggaggagggggagaagataggaggatcgatctgtgtgtgaggaagtggttgtgattgtggaggagaggatgagaattagggattatatactatgttgaattttagtcccggttggtaaccaaccggactaaagatctaagggagtgtttgggagagagtgggacttattgttttgtgagaggggctctctcccanacaccccctaaaactatcaaccgggactaaagtggtacttaagtaaagatcctcggtcccctgacatgcctttgacagtggatgaactgggactaaaaatcatatttagtaaagatcaatttttttaaccgggattaaaaatcatttttaatcccggcttttaatggaaccgggactattataaaatttagtcgaccggtcaaagatgatttctccaccagtgtatcatgtagtacatcataccaaacataatgtgaaaaaaaatatcgctgacataatcccgtcctagtaccgtatccatatccaatagtgcgacaccgaaacaaccaaccaacaagaccgtgtttacaccctagaggttgggaaaacttgtgattcgtcgtccctttcaaccctgatgatgcaacggtcacacagacgtgaatgtacaattcatacgaatttgaaaggtccattatttatcagaaaagaaatcgaaaggttcctgctgcaatcgcctttccagtgaattcctcgcctagtcgcctttattttttcacgtgaattcctgccgaacgcgtactctctcacggtacgtaaacataaagggttaattaaaccacttgttcttcccgtcttatactagtatcataggaacagtacattagcagactataaaccagttataaacatattttaaggagataaaaaaagaagatagaaaagtaatgtggctacagatttgtaaccagctgtagtacggactttaaaatgcatgtgtgtgtataacagataggatcagacattaattatatagtaattttataggtaactattatatgaattgactattaattgactataaattataaataatatgaaccaatagttagctatatactgttaaacttgctctgaacttcatcttgagtgccggcggctggctggttcttttcgcattaacaaacaccgtgtgcggccgcatccaaactcccaaagtccatgagcgaacccgcgtgagcatatacaacttccagtccacaagcctgtaatacggatcgacacttcctccacgcatgtccgtttccacacagcacagtacgtttcatgtactccctatgtcccacaaatactcaaaccctaaattttcaaggtgggtttaagaagagatacaaatgaccaaaatacctctaattatgaagttatattggtgaatgggtagatgaaaagatattgaagaaataaaatttctaaatttggaaaccaatggtagataaaagagtataagttggtttattttagaataaattttaaactttaggagttaagtttatttcgggacgaaggtagtatgccaaattgatgccttgtcctggttacgacggatcatagatccttcaatattcgagactgctaacaaaaagaaatattactcccctccaacttactattgcattggtgtatgtgaaggtgggaaacacgtatacattaaagtagaaaagttgataaataactacatcaggatttgaaaaaaatgataatatttactcttttttattggtatatgtcggattggtaaaaaatgaagttgttttgaaagcgtacattaaatagtcaattcataaaaaaaacaacttgcataaagtgatgtaatgtcttgtatatatgagtttttgattttgcataaaagcatcacacattcctgagtgcaccactaacacatgcttaaagggtggaaatcggcgacaaatctgtgagctcactaaattcatattaaaatcactagtatcgaagctctaatatcccgactccatcatcatgtataatgtaaaagtatcttatacccgactatgagcggtcgaaatgacgaatcaaaatggattagagatgacaaggggatatttcccaccagggaatgcatccccatctttattcccgtccccaccaactgcaatgggaacatcctcccatagctccttacccgcttaaaaacatatttatactttgatatatattatgtcaatatattagtagatatctattaatccatatgacaagaatacattattgtccacattcactaatcatagcacgctaaaacatgtatagataccacatggctaccatccctctttcctaataggagaatttccataggaaagggatgtgggcattgtcatccctaaaggctagaatggacatatatacaagtaggatgaaatctttgcttgtagagagagaatgagaaaaatgttttttctttaacgagtacggaattggtttcttcgtagctttcatatatccaaaagtcacggcttcgtgaaaacctgacgagaaaatattaattacggacatgacttgttgaaaacaattggaaactagtataaaatctacttcggttgaaagcaacacaaaatttcacatacaccggacgcaatagtgatttcaatgccttccttttcacttcacactatgaaaaaaatatggtccatgcaaagtaaccgattcaatatatattctagacaaaaagaaaattattttacagtactatatacatatattcttgaacatttttctgattaagacgcaaaatttacaacaattctgttagcatgtgttttaaactatgaaacgatacgtttcgtgcaaaaacttttcatataaatgttactctaaaacatcaataaagccattttaaattgtataataattaaaactcaattaataatatgctaattttttttcgttttacgtgtccttaatccttattttcatccgttataaacggggcctcaaagtcaccataagtaggcacgataaggttgtatatttccgaaaggagaacatgagttctagatccgtttggacgcagaaatattctaggttgtttttccctgtccatgcatgttgcctttatagagaaaagaaaaagaaaagaagaagaaggcttgctcggtcagcccactcaaccgccttggctggattctctgtcccatcggcgtggccctatcatcacctgtgcttgggacggtgccgcggtgggattcgccatcgaacgggcacggcgtgcgcgtaccgcagcagcgaaacttcaaaacctggagggcgaagccgataaacgcccatgtgcccgtccgcccgcacgtcggcagcggaaaaaggctggaaagccggaaaaagccgttgaacgtcaaaggagacgaccgttaacgtggcataccgaatttctagtactacttgcgtgctagtagtagtaactaacgtggacgtggtattaccgaatttcgccatgacctgggggtgagtacctgacagttggactcgtgactcgtctgcgcggagaagcatctgcctgctctgaggtccagatccggcacgaccggcctgggcacttccatgtgacccggccgcggggccctccacggtttgcctcgtatagcactctcctcgcttgccgtatgctcctgcgtgtacttgtccgttgtgtagtacttaggcggtgtttggttggagggactaaagtggggctaaactttagttctctcataaaaacataagttcctacatagggacttgtacttttgtgagatggactaaatttagttcctaattcccaaacacccccttacatgtaaagggcatgtacaatgaaggccacaagcataagtggttttaagacgtacatcacgtaggatagaaccatacaaagatcatactgcccggtgaaaaccactccaaaacgtatcttgtatttcagtctctgtttatttatatatcagcccttatgttgtatgttattatcaaacctattaaaactttatattttagactctataacaaccaaaataagtacatactatgcacccttaaacactatgcggacccattgtcagcctcttccccctctctttttaattctctctccctctttccccctctctctcttgagccatctctctccctctctcatttgccatatttgccggcgagctccccatctcggtggcggatccgggttctcgacggcggatccggacgcgggctcgacgctgccgtcctcctcccccacgacggtgcggacgagctcgccgacggcatggcgagcttggcggtggcgggctcgctggttctggcggcggggccacaacgcgatagttcctctccccctcccttcttcgcgagcgtcggcggcggatccggacgcgggctcgacgccgccgtcctcctcctcccacgacggcgcggacgagctcgccgacggcatggcgagcttggcggtggcgggctcaccggatctggcggcggttcctctccccctcccttcttcgcgagcgtcagcgtcgggaagtagcggtggcggcggatctgacaaccggacgaggcgacgcacggggctccagctctgccaccgcgtggcctcgggccgtggcttcgttcttcctgggctcagacgcggcgcttcgagcggttcctccgcaagcgcggaatcggtaatgcggagccatggtccccgctgccacgggtacacgcgtccgatatagagccgtgagaccatgagcaagagccacacgttgtaaatggcctaagactacgaagggtatgcttgtggcatggcagccagcgaaccataataacgggacccttatgttgttattatggtgatcagtattttcttatgttgttattttttaatgctataaaaatcatataacttgatttattttgcatcgaacttttgcaataataacatcgagttctaaagatttgtaaattcatcgtgaaaaaaattgtggtcaaaactcgtataattcagtcactactaatagttattaaaaaagatagatgtagcatgagatatggagtagttatgtaatattattagggtgcttttgattaggctaaaacgagaagagttattagcacataattaatttaatattaaataataaaaacttaaaaatattttttttaaaaaaaaagttattatagcagttcggtaagtgtaattaccaaaaacaatgtagtagccaactcaagaaactgattcaaactctagatgaatctattactactacgtcaacagtaagaaaacatggtatctttgttgctttcaaagttaaaaaaaaaagtccatcttgattcttgattactaaaatatccgaataataatggcaaaacctgtctctcaaatcctaataccagattaatcactcccctaagaagaagaattagagagatttattccacacctttaaatatggaaaatggaaatggaaacaattttcttgtatacagaccattttccaaattttaccatatatttacagaaactactattcttttatattatgttaattaccacatttttaagtatgccaaaatctatggtacatttctttctttgacatatagttagaagcccatgaactcttcaaccaaatccctatatggaatactcctacaaggttaaaaaaagataatctatagtttacatagtgtaacattcaatttatttcatcatattatatacttgtacaaagttaaatgtgtgattttagagtttaatattttttatatttattacatgtttttaatcgatatcgacatgtttctgtctgtataattccgtttccggctttccgatattttgaatttcgtttgtatttctagctgtacggttttcaactctatttttcgagaaaaatgtgattatggaaatggttgaaacgttttcggaccgttttcaaccctatcgggatgaacccctctctccatctcccatgcaaacattaagtacacaaataaaatagtttcagcgaaaaatgaagggaatcatgcagtaacccatactcctatgccagattcataagttgttcgggaagcacacggcctccgaggtttaatacatgtaacctgatgtaattcagcaacattgggattgccacacattcgtttctcagtaaaatactccagagagctagaataccttgattctctttgccgactgtgttcatcgttttgacgtttatcatttgtttatgtgccacataagagcgacgaccctcactataaaaatgttgcaattgatctggctattaattcactggtgctacgggtttccgacataattctgagatgatgagaaaacggattaaaataactttgtcgacaatgaggagatgccgtactcctgtctttggtcggcgcaacaggatagaccgatcaataagagtcatgtagctcctcctatccacaacaagcagctgaagaaaaccagagtttgttagactgttacaagtcagggtcatctcgtcgtctaaaattagctgaacaaccccatctgtccgaaagaacgcctgaaacaagcaaatgatgtgtgcacaggagataggaccaaatggttaagtatcttggatgtgtggcggtacttttaacaaaagcacaaatcacggtagctttcggtcttggattctgcgggaaagaagaggagacatgcatgcatgtcagcatgtggggctgaatcgctgagaaagggggagaggaaagggccatgctcatctactgatctatactacatgtgagcttgcccgatctgattcgctaggagaacagatggaaggcctggtatgcacagcaacaataatagatcctttcttaattactccctccatactagtaaagaaagtagtttataacagcgacacggtctccaaaacacaactttgacttattgtttctataaaaatatttattgaaaagtgatatatgtatacttttatgaaagtatttttcaagataaatctatacatataatttatattttcaaactcaacaacttaagagtttttcatgatttatattcctcagttttgacttaaacattgttttaaacgacttttttttatgagtatagtgggagtacgtgtcgacagaagagacaagttcaagtttgaagaactcaggctataggccgggcagctgagaccaaattaatcaagttcagactgaagaattcgcaacaaggacaaataaggttcatgacatgaagatacataaaggccaatttcaatttttttcttcaagtttctaactttttcgtcacatcgaacttttctacacacacaaactttcaacttttccatcacatcgaactttcctacacatataaatttttaactttttcgtcacatcatagaaaagttaaaaatttaaagaaaaaagttggaatctaaatagagcataaacacagccttaagttccagttctagctaaagcctcaggtacgggtcatatccacttgccctgaaaagtcagaacatcgcattcgatcaatacaagttagcgcgtaaatttagctgaactctcttgggggttaaccgggtaagcgacaagttaaccatagccgcacatgaagtctcagatctccgcaggggggaaggagccgagccgagcgaacacacacagcaccgaatttcctcgtttttccctacccgtcgcactcgtgcccaacccaacgcgtacgtagctgtagcggggtggctgtctggctgagctaccaacaagccagtgcaagtgggggatcggttttgtcctgtcatttatatatatgtaagcatccagcctgagatttgggtgacgctagctgatcgctgactgctaccgtgatatttatcacgcaattggggatccaagcacattaacaactatagacgacaaccccgatatgcatggctcattgttatattgctatttgtcaccttcgatccatcgatcatgcggtgtttgtatgtaaggctttcttacccccatagatttgctgctcaatttgacttgaccagctctggtgtgtgagatccaatccggacaacgggacatgcatgcatatgcacccatgggtgagtgctcttttttcttctgggacatgtcagggtgggggcaaattaaaggagatggagatcgagccggtcggcctttaccgggagagggcttggagctggaggacgcttttgatgccacgccacaagttgcgaatgcgtaaatgggcttcaaagcaaagcgcgcgggaatgccggatcgagcacggcgcggatgggataaacaacacagcagcctcgatcgccggggggcggggtatcgcggttttcgcccttcttttctgacgcgatcagagcggctacaatagcactattaaccagctgtaaacatattttaataagataaaagatgatagataagagcagcaggctacagatctgtagccagctgcagcacggactctacgacacaatgtgtgtatgataggtgagaccatatattagtagtatagtaagcaactattgtattaattgactattagattaactataaatgaattggagccagtagtgggatattttattaaacttgctctcagtcgatctaatctttgccgggtcgagcagacgagtaccgtgtatgtagatgcagtcaacggagagttttatgctacgcaaatggcagtataaatacatcggaggagattccagcgcccagtttatgattctagagtgagaaaaatatgttacatggtcccgttagctagcttagttatatatccagtgccagtatatgtcgttgacaatgttgtaaaaaaataccattgtcaagggcaaaccgcaaacagtgtcgtgccgcatccattgctggagaaagggtttttacccacggttcgcaacccccctatatcatgaatccgagactaaaatgcccatctttaatttcggttaaaataatcggcactaaagattcatctttattcccggttgcacggaactaaagaggagaatctttatgggtaacgccagtttttttttcaattgttatttgaatattgatttcacgccaaactcaccaaactcatcaaaatcacaaaatcatcataaattccaaatcgagttgctccctacatctccaaatcaaagtaacaacatcacaaatcataagattcatgtcaaaaattatcaaaaaaatacatcacaaattctaaaaaaaattacatcacatatcaaataacacagatccaatgaatcacaaattcttttttaaaaaacaaagaaacccccaaatcgagtcctccacttgccgcaagccgtcgtcgcctccccagcccgacggccgccgtcgaccccgcccggcggctgctgccccttctcccgtcgactccgctgtagaagatatgtggatgaggaaagagagagtacagagtcagcgagagaaatggcgagagaagatatgtggatgaggacgtctcgatctgtctagcgctaagagataaggatgaggaaatctaagtatgtagtctctggttcgatctatttaacacatgggagggagatatttagtctcggttagtgatatcaaccgggactaaagatcatatagtccccgtgtacttttaaatcgggactaaaaatagtttctagtccaagtttttagttgaaccaggactattgtagattttggccaacctataaaagatagtttctctagtagttgtgatcacatgcatataagggttgcagttgttcgtaagatacacggtgttacttcgcaaagaaaagcaaatgctcatgtattgatgtacgtaagcaacatgttcacaaaaatgatgaaagcatagcaagagctgtctcgagcgttgtcattgtaagatgccagcttttctcaaaacttgcattaatttggagtgcacaatactggattgaaataaagaatcaaatctgtttattatatatattcttttccttgtctttttggaggcagatgcaaccatctatatatcctcagctatggcggagatttaacaacccaaactgttgagtttaggaaaaaaaatcaaatgggaaatagaaatgggccagtgtgtgggcgagcgcgccttgcgggccacgaaaccgtgaacgacatgttccggcctgcccacgagtcccgcactaatcgatgtaccccttcgtctcggcccgccgccgcctcctccgctcgagccgcaccgcgcagccgccggcccaaaccctatggctcgcaaagcgcgacccgcggagcctcctacaccggggcggaagggcaggaaacctctcccctcccacgcgccgccgaccgaagccgccgccgccgccgccaccgccgccgcctctccagccgcagccaccgcctctccagccgcagacgccatggaggccgaagcgggcggcgtggccatcgtgtacgacgcgctcccggggctgacactggcgttctcgccggaggaggaggagcacctagagggtgcgactgccgacctaggcggcgcgtcgacctccgcctcggctgcggtggtggaggaggtggaggacgccaccgcggcctactccgtgttccgcaacgagatcacggcggctggggacgcgctcgtcgatatccccgcggcggatttcttctccctcgacgtgtcggcggcagttgaagacgagccggccaccccgcgtgcgttgtcgccgcagcctgctccggaggcgacgctatcgggttctctagctcccgctgagcagccagcgcaggggtcggagcgcgcgtggtttcggggagggaggcggttcaggagccctatgctgcagcttcacaaaggtggggataattttggctttgccatttgttagtttgaatgttggaaaagaacacgatttgtaaattgatttgatcagcttagagatagttcaattcgaattttagcttgggtaggcaatggacttgtttcaatgggcacagattatgcgaatagtttggaactgattttagtttggttctgaaatcttctcagttcagcctaggtggagattgatatttttttaattgtattttgatatcaagctactcgcgatatgctctttcatgacactcttgaagtgttgcctggaaactatggtgttataaacttgggagtgtccacatggtgttaataagcttgagtcagtttatatggtttcaggctggacattttgactgacgcaatactgacatattgtctatttcttacagagattcttgacttctgtgactttatatcaccttctgctgaagaacaatcttcacgaacagctgctgtgaaagctgtctccaatgttatcaaacatatatggcctcaatgcaaggcatagtaacacacattgtccctctcttgccatgtgcgcacgcatttgatcagcattagctgcaagtcatttggtaattctcgttttgcattgcaggtggaggtcttcggatcttttagaacagggctgtttttaccaacaagtgatatcgatgtaagggattttctttttgtgctctccagtggatttttgagcatttaacttgctgttctgttgagttgtatgatcccctggagcataacatttactttgatagcaatgctggaatcgtcatacttaacattttgatggatgaaatagcaatacaggagaaaaagagtaaacacagaaggaaggtgtagctcagcatgcactttctgttttcctgttttgcagaacagggaggaaaaaatgggatgtatataattagcaatgtttactcagttttcctggagtaaagtatgaaatatgtttctccagagtgattttcacccttaattgcattgttagctacttccactttcatatcaaagggatacccttcttctgctattctatgattatgattagaagaaaaccgtgatgcatagcctgttacagacgtgttaagtgttaacccctacttttcacctgggaacaatgaaatacgaatacatggaaaatgtaccctattttgggaaactctctcctttatctgtgagtttatacatggttttgtgatgcaggttgtaatatttgactccagggttaagactccacaagttggcctgtatgctcttgcaaaagcattgtctcagaaaggggttgctaaaaagatacaggtccatttttcactctatttaactctagtttgcaacacttggtatttgcaagactttttcttttattttgttaaagaattactcaaaacaaagccaaagagacaaaaatgcattttttttccaatgaaggaaaagtcaattttctgtccaactgaaatatgcatgacggataaatagctaccttgaaagagaccaaatcccactgtttaaactttcactctgtgctgcagttgtcagttgttattgtcaatcaagtagattccagcttacttatttttctggtggaccattttttttttctttcatggcaggtaatagcaaaggcccgtgtgccaattgtgaagttcgtggagagaaaaagtgaaatagcttttgacataaggttaaattgtgtttctcatcaaatattcctttgtttctagttttttgcgggaatgcttatcgaataatttccctttttctttttccagttttgacatggatggtggaccacaagcagcagacttcatcaaggtactttgtgcagacaaattggctaattacttcactggcagcgtgtgttcgtgaagctaattcgtggggcaaatgattgcatatattttgaacatcatttttactctgtactgcaggattatgtgaagaagtttcctgctttaagacatctgtgtatgattctgaaagtttttttacaccaaagagagcttaatgaggtacaattacttaaaactattagtcgttccattctaataatagattgtttgtaattatggcatttctagatttccaattaccatttcactctttttggtaggtctatacgggtggaattggttcatatgctcttctcactatgctcatcacacatttacaggtaaagctgagtctgttttgtactctaacgtgataatggcctttttttgtatacctgaattgatttgagttataattccttaaaaaatggttgaaaggtacacattgtgtttttcctgacatttaagatttttcttataaatacttaagacacctaacaaacataaatttgggttgtttatacactgcatcgctaatttgttcactgattcagtctaccatatattacttactatggataactgaactttagtgctaagtgttctttttgttagttgatctggggaggcaaagatatactggggtatcgtaaaaaggagcacaatttggggattcttttggtaagcaatacttgttttaaatgtttaacagtaatgcaatgttttacattacaatgctttgacttccgttgcatgtaaagttccattggaaatattcatttcatcgtggtattaaccataatgcatattacatactgcttccgaccatatcgttctcagtatacacttttttacgttgtctttgctaatggaaaggacatgcattctctttataattaagggggcatgacacatgattgcagctctttatagttatttttccccttcatggcagatcgcattatttgatttttatggacgcaagttgaacaattgggatgttggaatatcctgcaattctgctaggacctttttcttgaagactgataaaaagtaaggtgtttactagcgggcttagaccaaatgaatatacaataaaattatcatcttcttagtattttgttcaactgaaaaaaaaggataattttttcagtattcttgtgtattgctgtagaacaagaatatctcatttgcttctaactaggccattctgttaaacacttaaaactgttgaaaatctgctctgtaaagatttataggtgaaatgtcattatataactgaaagaaaatttgatgcgggtgcaactgtttgagttgctaaaattttgactttgttgtataagccatggaacttgtttactgatcctgtttgtgtctctctgcttttcaagctttgcaaatcctgatcgagcataccttctagctattcaagatcctatggtatgatctttggccctttccttttagtcttggttagctttaacatctccagcttcaatggatttacctattgtttttcttatggcctaggtaccagataatgatattgggaagaactcatttaactatttcaaggtattatttcttacaatgttgtttgtgctgtggttgtgatacttgaagtattactcgtttactgtttcataataatatatgcaagcaatatcgatgaaagtgttcctatcttataatgagcctgttactttgctctcaatgccagtttcctgggtatggtgcttacatggtatttcatagcaattttgctaggttatacttgtgttatttgagcaatgttccgtggtactctgtaatggtttggtaccctgtcactgtcagtatagtattttgttcagtgatagagtgatagtccatgttctgttaagggtaatcaatctgaggttatctaagggcactaacagttatgtcctcaagttgtcacctgtcctgttccttttttgccactgttgcacgttcgttaccaaagttcttcaggttttcggaccaagtttcttgaaaccataagaggtggtgaaactggaacatggtataaactagtaccctttttctgttaccagaactagttatcttctttagtttgaaacccgaagcttttgcatatctggattctggagttagtgatataactactggaatttcaaatgttgtggaccttcgtggtatagatgttggtccaaatgggaggtttaagtagggtggtatggccaatggtccaatcttagtttacagaataagtgaacttcctagaatttgcaacatatagttattggacattgatgtttgaagtgtgctgtcacattatctatcacgccacttctatgtgagcttttggcatgtttatgaaaaactataaatgcaaaaaatctgattgagtaatatttttttttgactaactgattgagtaatatttgttaactgctgcaggtgaaatcagcattttcaaaggcttattctgtgttaaccgatgcgaacttgataacaagcttggggcccaataggagcattctgggtaccattgtcagaccagactccgtgctcctagaccggaaaggctggaacaaggacgctacaatacctgacatgttaacagaaccctgggaaccattaccccgtcagtttgatagcgataatgatgcagtctataattggcatgtgatagatgatgaaccactgcccaggaatactcgatcctcatcggaggacacaaggccatcacctacacaaaaaaggaagtcttccaaaccaaaacagagatcgcggaaaaaggccaaggctgattcttcgagtggtaacaatgctgaaaatggtttcaagcgggggaaaggattagcacaatgtgatagatcgcatcaaagtgcaggaagcagcagacggagcaaagggccgagagagtatgacagatttacaaataccctcccacaatatactcagcacattagtaggtggtgactttaggctgttactgatagcatttacagtacagttcgggattgggagatcccacgaggttttgacaggcagaatggcgccttggcagacgtcgaagttcaagcagctttctgtagccatatgtatgatttattatttatttgtttgtctaaggttattcggtcctttgtaacgccgatgaaaccgatatattcagttatattatcatcgtatgaactgcaatttcgccaacttgtctatggcaaagtttcagactattaaaaattatctttggctggaacgtgaattcataattcataacaagacgtcacttcggtgacatccgataaaaataattcataacaagacgccttgaaaggtttaagttttattaaacgaaagaggaacataatttagattgtcgcagctaccaatcacactaaatacatgattggaagttaaataaaatcaagcttatagtcgaatgaaataaaaaggttccaccttcttttcccagtttagaactgaacaagtaaacagctttgtttaccgttaccacaacgacactgcaagcttaatacagctagctaccgtcttttactcgtctttcttctgtgcgaatcctgggggaaaggactccagccttttctattccgctcaaaagaataaggaaatataacgagaattgtatatgaggaatacaggataatcagctatcaagcactttgtgttcaaatatcaagcctcttatacctctgctctattttcctttcgagagctgctcctatgttttttccatagtataacggaaaaaaaaggtcaatcaacaatatgacaggttaaataaacattgaaagtaaaaatgcaaaacaaaagaagctaataaaccgatattgtaaggccacccaacaaacagctgacaggatcaagatggtgtaaactcgtcaaatatattcataccgcaaagacataagtttaccaggttacaagcaggtatgtccattaaaagtgaggacatatgctagcatcatcacttaactaatctaccattcttattcagattgacccttcagctgaaaaaaagtagaaggatttgcaccaatctgctggctaattaaaaaaaaaggaagccagattgaagtggccttatggagagctgataagcttccagtccatattagaagtggagatcctttgtgagaccagtgaaacatctcaatatgactggttcattctgcactaacctgaccattctcgtggggatgtaacattgctacctgcattgagcttatcagccatggcaacagagtctgcaggttgggctgcagttaccactgggagagctacgctctcaactcgatcccgtggataccctaccacactagctgtttcaaacatatttccaaatggctgattatgcacgacttgtggtcccaaatgatgaaatgccatcggaccactcgctggatgctgaggcagaacagcaacaacagtagcagcacagttagaaggattcttgaatgtggcgctgtaggattggccactaccttgaacggcataggatgccacactacagtggttgggcttgcttggttgaggtgggcatgagctcaggccgtgttgctgcaatggttgtggctgctgatgctggatgttaaggtctgtcgatggaagcaaaactgtattgccttggccataaaaagaaggcatggcttcatgatgcttctgctgaggtgaagagtatggcgagtgcacaaccatgtttctcagaagtggctccgttgtagcactggcaggcttctgagaagagtatggaggatacaagacagcgacttgaggagcactttgagcctgaggagatgatgtttgctgttgaactagctgtggtggaacttgctgaatattgtattgctgcggttgcaccacaaggggctgtgttcgccatgcttgtgactcaacctgctgagcaggcagatgtagcctttggtcctggggttgagggtacaattctgtcacctggctagatttctgagataggtcaactgcaaccctggcttcaggattctggatttgtgactgaataacatgtaccgcggattctgatggttcactctctgtgcacttaataggattttggctttgcatataatacacggcagcttgactcggctgctgctgatctggttgtgtgctcaaagagacaggcactagttgctgcaaaatataaccattgctgctttggactggcacagcaggagattgcattgcattaacttgctgaagtggcatgaaagcaacctcatgttttgcaacttgtgtgctgtgatcattttcccttccgaatgtt

SEQ ID NO: 9767 - DNA, 9682 bp, Oryza sativa
  unsure (1)..(9682): unsure at all n locations
actgtcgtggtggattgaaattcagaggccagggaaattaaagatggaaagaggaagaagaagaagagagtgtgtacccaatgacatgtctgccaccgtcgtagacggcctgggagacgaggcccatgaggccaatgctgccgccgccgtacacaaggtcaatgccctcgcgacctgcacggaaacaacaactcctcatcatcatcgtgcagtgcagcagcaaattcgttgcagaggcaacaatggggcagcgttctcctgttcccataaaacttggggatacacatgcagacaggagatgcagaggaacgcatgggcgttgccattttctgacatgacaaaatctctgtacatgctgctgtacttgtcttgatacgtactagtactcctttgcagaacagaacgtagacctgtccctctgtttcctttttctttcgatgaaggaaaaaaaacaaagggaggcacgcgaaatactataaacgtctgaatttcactgtcgaatacaaccagtaccattgtagtgtttcttactgtaccaccgaactggatattgttcgaacacgttgccacaatatagtctcttgattagtagtgcatacttctcccccgtcctataatataagagattttgaaagggtgtgacatattctagtacggtaaatctagacatagagcctatctagatccattgtgaatatgtcaaatccctttaaaatttcttatattatgggacagatagagtagttttcaaaaaaaaaagtgatgatggatgtaaagcagccatgtagtccaattgaatagaaaaggggacgagggtatcgtgtcgatctattggaagcaggtttccttatccaatatggatggggttaccactacctggcagtaaccgaataaaaacggatgaaaccgaataagttttaccaactcttaaaactttgttgatatgttgagctgttcccgttacagtatccgttagtaagtggtaaccgatagtttgtagttaactagtacaatatactccctccgtttaaggttataagacgttttgactttggtcaaagtaaaattgcattaagtttgatcaagtttgtataaaaaaagtagtaacattttcaatccaagataaatttgttataaaaatatattcaattattgatttgatgaaactaatttagtattataaatattactatatttgtctataactttagtcaaacttgaaacaatttgactttgatcaaagtcaaaacatcttataacctgaaacggagagtatctttttagacaatgaatagataaaattcggcctctacacaggcgtggatctttaattttgattttgataacacaatatatattgtgattatatatatgcaggtgaaagatagcctgttttgccagcgcatatatatgatcacaatttattaaagatccacgcctatattaattaattataaacctttgcttcctgctttgaggtgtaattatggaaaggaaccgcaatctaaacaaaactaaagagagagattcatgatatgctgttaaacatagatgcatgctatgagagagtgtagttgtgtaccagctctttggcgaggtcgacggcggcatcgcggtaggtggtcttgttgccctggctactgccgcagaacacgcaggtcctcttgaacctgctctcctgctgctgctgctgctgctgcctcattctcctctaattgatctacctttgtaaactgcagacaatgcagcacccagagctagcttaagttttgctctctttgtgtttgtgtttgggtgcgccatggctggctggtttatataaagaaaggatgtctggggccgggcgacctatcttgcaacagcgctagctgcctgaatggagaatggacagtaacagtgtagtgctagctagcttgtgcttgatgatgaaacacacgtcccattcgcctctgctgctcgttgcctgttggtaccatagccttgctagccacctcatttatcttattattatcatactactgatagcgagcaacagtgttctaaaagaaaacatccatgcaggtaaattaaatacaacaacttgacgcctaattagcaacaagctacgtaagtagtggtgttcaccttttcattcttgtagttaaatactactagcatctacttgtttgttttggtcagctgatctgatcttatcatttttgttttgtttggcaagaataaggataggaacactgaaacatgtgcttgatatgggcaaccctttgacctgataacagtaggaacagatgattatttgttactgttataatttctggtcttccatccccacctctctggcgttgatacgtacatatggtttcctcctgtctttaccaaacaagctggcaggcacgctcttaattcgccggtacagtgacctcatccacagctctccagatcgactgttttgctctctctgctggggcctctctagaaagcgagtacataacgtgcaggtaaacagtttgttaatgtttcaagaattaatatccatgttaattagtgtatgtacgtgttggggctatcttagctagtgcgaatatagctagccaaatgatatctaagttgaaggaaaaaggatgagagctaaagagcaaacaaccctatgatatctacgacgtactttccccccagcctttggttactcacagttttatgtgtatgcatcaggatccaggaaatcgaacctcaaatcgagctttgtccctcgctttatatctagccccatgataagagattgtatgttgtgtctgctacgacaacctagcttttatatatatatatatatatatatatatacatacataccttaattagctcttaataattcgtttagcagagttgcatgcatgaattgaaatttagacaacaaattataatactagaaaagttgaaggtcttcaattaccataagaaacacgtgtgatggtattttcattttataaagaaattatgcatgtatactggtcaagtgagtgacagagatgcatggcaggtactagctaggtacatatatacatgacattgggcaagcaaagcatatatacgcgttgagagttgggtgagagtggtagtggcgaccccggtgggcaagggcaaaggatcgatcgacagatgtgtttttcctacagaaaccgcaacaaggcgacacaagtaattggtggtcgtcgcaaaagcgaagccgacgcgacaactccatcatgcatgcattgcctgcctgcctccttccttctcatctgcccatttccaattaaccaacggatcgccgccgcgttaacactgcaccatccatcagttactcctagtaattaactcttcaaattatataaattttcatctaaattcgactctatatagttatagattaaaagatagactacaaagtaaaagctgaaaaaatatctttttctaagactcatatctcagtttgtaattactaaaaagaaatctgtttctaaaatctcaagctccctaaagaatgccagagcatagcagcagcaacacaggacaggggcagagtggaggaggatgcgtatacggaattggatggtgtggcctactcctgcatgcatggatgatcttatccaacacccaggaaaaggtcgaaagctaaattagctaatggcgtttaatataattttttatctttttggttgattttgtaccgagtcaaacaatataatgacgtttctcccgagcaggttggggctgggaccaacgggaggtcgccacgtggatcccgcaggcgagccttttgcacgcactcacagagtgcagtccatttccaagggctttcggtcaaatctgtgtcgaggtctagctatggctgttgagctcgtgtgttttgtacgcctcatacagtgccacgacaggagcttttatcttgctatcgatcgtgctaccgctgcccaatcgatggctccatttgtctggctgaaaactcaattcattcagagataaattaatggagcactcatgtattattatgcacgcatcctttttagtcgtcagtgaccaaagatgaattgctaggtagctgagcctgagctgccttggggtttcaagtttcaactgctgcaggctggagcacactaaaaacatggatggatgcgagcagcggaccaaccactcgatcgagaggtagagctgtcgagtgccgagtgcgaggaggagcaaagcagataagaaaagaagagataaaccggtgatagggcaggggtgagtgcggggatttttttttctttttgaactttcttgtttttaaattttaaaaataaacccttcaaaaacttatttctagaatttgaatcttttggcaacgccaacttgcctagcgtactaaaataatattgacacgccacacacaacggacataacagggcatggccaaataacgctgtcaacgtgcgaaagagcctgtagcctagtggttacaagagcctcagtagcaccttaggtcctgggtttgactcccaatgagagcaaatttttcaggatttaatggctttgtgctttcagtggtacgcgacgtactcgtcgacaacgatgcgtctgtgttgacttcgtcaatctccagaatggatttgccggcctattcttcgaagatgctcatagagttaaggtttacgtgcgtgcgctcatacgggtgagtgtgcgtgcgttgtgagtgtctacgttgtactgtgtaattttaaaaaaaaacgctgtcaacgtgacgtgatcaggtaacgttggcatgccagccagatcagctcaaacaggtcttgaaaataaattttggaagtgtttatttttaaaattaaaaatttaaatatttcaaaataaaaaaaaatcgagtgcggattgagtggggtcgtgaagggcatgtcaacaggcaggcaggcaggcaggagagatatgatccaaaatgccatgccattgcatgcttgcagttgcaggtgtaatattgcagccccggcaggggagggacagaaagcgagggatcgagcctgcagcgctgccgctgtcgccgcctttggccgtggcatcatttcaattttctcgccgccggcggttgcgtaggcaggcagctcgagtgttggactctgctggagtgtcctccgattcactccccacccattccgactcagcagctcaccggtcggtgccatagatcaatacgatgattgatgagccaccaatggactaggagattcatggccgatgattttctaaccctatccaatgcacgctccaaaaacgtccaacaaatcgatctaacatcactaaaagttaacctacacaatctttcttttaaaaaatagattaaaacccagcctctacatctaaatttgaaattagtcttccagtgttttagtttttttttttgttcttttgtggtgttttttgttttctcacttatgagacttggaatctagtattcctgtaaactttagttgtatgtcacttgtagatatagaggctagatttctatccattttctaaagaagatgttatatactccctccgtcccacaatataaaggattttgagtttttgtttgcaacgtttgaccactcgtcttattcaattttttttacaaatataaaaaacaaaaagttatgcttaaagtactgtatataataaaataagtcacaaataaaataaataataatttcaaatttttttgaataagacgagtgatcaaatgttgcaagaaaanactcaaaatcccttatattatgagacggagggagtataatctaaactctcgacagtgcctacgaactattgggcatgcagacaaagaaccacaaaagataacatttaaagttcagcaaaagtatatgtgcatatcttattttattgaattacacatactaattgttaaccccgtacatattgtccgtactattgttactaatatcagaaatattaaaattttaatcatatatagaaatttgatggaattaagagagatccattgggcttctcagaggaaaaataaaaaagaggtttggattcgtggaaaatttttttcgcaaacgcgtaaaatgattgcacgtcaatatattagaagaaaaagagttttagttacacgacgtaatcagctagactgtcttatgctaggggaaggaagaaaaagcaaaagaagaaaaaactgaagcttagagaaattacggcggctaaaaacagactccaagcagcgagaaggactcatggaaaaatttcctatggaattggtgcaatggatagcaattcataggagtatgatatgctcaaatcccttttttttcaaacaacaaaaggaaaaattcctaaggcttagaatcctttgaaaaatctttgaatttccttcaatcaaaggaacctccaatctaaatcattataacatgatttacttaaatcattagtcagatgtttctaatacacgtgtaagttttctcaaagtgctcgattagagtatatatgttggcacaccgtttcaatgaaccacatcattatttataaagaatccagtgaaatacatatgtatcgattaacgtaaaatgctggcaccaaatcaacttgataaaaattcaattttttttagagtaagtcataaaaaaccataccttagttccaacttaaaaaaatcgaagttacagtgcacacttttttttttaaaaaaaaaggggttgtcacgggtacatgtaagcataaaaagcccaagcctggtcagaccaacaggcttaacaggccagacccatgccaattcaacacaaataaaaccgtactcaagtaggaataaacttagagattttctatcctatcccacattattctctagctattttagcaacacaatatttccatggtagtgtcaataacccgctattgctattgcgagtgcaatagcgtcactatcacctctagtaggaataaactagagagacgttctctattttatcccatattattctctagctattttagcagcacaatattctcgtggtagtgtcaataccctgttaccattgttgcaataacaatagtggcctatcaccactattttgtatcaagttgaggatgatattatatccatcacattattatcccaacagttttgggctacttgccgccaacaggaattacaactagtcgtcaacaattgtgaacaaataacccagatatcactaatcgtcggatattattgtcttacgtaggcaatttacttaccatagaggcttgggttatatatatggttctagttggcattgatgacgttgtcactgatagttcgctgacggcctgaccaccgtctatttcatgttttgatgaattatggatgcatcaacgcaccacagcactcacagcttcattggtaccggtccgtcacctctacacaaggttagatgacactgacatcccaacgcaactctctatcctatctgctatcgagtatcaacgcactgtcactccatgggcctagagtcgggggaacaacgatctcttctacagttctactgttctacatcttttagtgcaactatgagtgaaataaattctagcaggggaaaaaaaagagagaactcccatgctctaaacaaggcttgaatgttgaatatggcacagcaatagtactatttaattagcaaacaagtataagttctgtttagggatgagcgtgagtaccctgtcccagcctaaccgtgttgattcctaatcttgctcataatttaccccaccaatctctaccatctttccatcgagtaacaaccattagacagtggtaaacattgttaccaggtacatcttgggatttaacgacagtcgtcaattcgtcattcaaaaaacttgccaatgcttaattaaagggatgcacgatccaatacgtcgtatttgcacagtaagtaccaaaagtcgtgaccatcttcatgaaaaagagattgggagggtgacagcggttaggggtcatatgatctgagaaaaatacctggaatttcccggttgcagacgatgcacgtgttcacagtaacgttctgagcctgtctgcttctgcatctgggattttcgcagggataatatagcatcctcatgttgatgatagctccatgaggttcaagtaaagttggttgctggcgtgtccaagatgcattggaaaccgtatgcacaaacctgacatgcatatcagaatatcaacaaccatcgtgctaaatctgatcctgaacatttaacagagtcaaactgccgatcgactggcttaacgtttttgccgtatgtaaagtaacagacatactcgtgccagcgtatctggctatcaggttcatgtattctacatactttggaagctggcgaatgctattctaacgatgcatccttactggaaacgtaaggatgctgcccttgttgcacttaataattcataatctcattcgtggtattcatgatccggcaattctagaagaaattcaaaatactgcacgtgcaggaaagacatcctaactaacttctctatatatgatagaatggtgttcagaaaagtctggatctcacaaagcaccagcaactcagcgagaagcaatgcatggacgactagatcaacgcatatagagtaagagtagtaactagcacagaatgcatccatccacccacaatattccagttttaacagcatcaactgaatcctgtaggacaagatcaatttgtttgataaaatctattccgaccttttactatagataggaatagccacaagtttgttgtttgtgtcaaaaatttcaaatggtgctgttaacatggtcgaatggctgcacttgaggtttggctgtagtgctgtacaaatcatatttcaccaagttcgagcccattattagttggaataactagtttttctccttgagattaggtgagtgtgcatatgcagggattccctacgcatattttcaaatttctccattaaagtcaaattcagggtcttacatgttttttttttttaaaaaaaatggattcacagctattttaatgataagaggaagaggaagaggggaggggattgccagcagtactctttttcccagaagaatatgtgataacagaacgtgcacaagaaacaacagtccattctgagtaaatatgtccccaccagtgccactgcaaaaaggtcagaatatattagcctcacattgtgcatcatcacgggattacatcagaaaagtaattgtgtgccaacgttagcattctactattgtttgacctcatttgagctatatgaacaaagtaatagcttgcatttaaagtcaaagtatcaaatgacatatgaactgattttactcgaacaggcacctctggttagaacaatataggtcaagactctaaccttgataatagggagcgcaccttgaactaaatttttcttaacaccattaaggtcttcatgtgcagaacgacaggctggtctgaacccgtcataactctaattcccctagcaatcatggataccacatatgcatggccaatttggtctgttcaagagaagaataaatcacttcctaatgcctgttaaaggaacaacattaaatttagcctttacccaacggtatgcacatggaaagttctttagataaacagtagttacgacagcacatttgtgtttgttttttcacgtacgcgcaaaagccttgca

SEQ ID NO: 9768 - DNA, 20796 bp, Oryza sativa
gtaaatttgaacaaactacgttcgttttgggacaggcatcatgacatgtatgtatccactagaccagtaaattatcaagtccatgaaaactatcaagtataaatcagtaatgcacgaaacacatttcctattgtaccttcagatataaccttacccaccatgcatcaagttttccttaaaacacatggtaaataattacttgcaaagtgtaaattgagtttaaaattttgatagcacgtgtaaaatacttttacttatgtgttactgcattatcataactcgcacaataaactgctccctgaataatcaattggaataaaatatataaattgcaacaactggaacaaattgaattaaactgcttagctgaataaccataccgatgtcaggttcttcatcacatggaacatctaattctggtaaaagagaatctgtgagtgcaccaatggcatgtagttcttggcaggccttaagacaaactgtctccttgagaatagaaccttctccttctacattaactgtctgcacaggactgctcttaggaagatgcagagtgcatgtgccagatgccttgtctatatcgaatcttggtagaggattaaaatatctagcaagtcaaaatttgacccccatcataaacttgaagcaattgtggcagataattctgcgcaatataaagtaaacgaaactattaagtgtgaaacagaaaactaactcatccgatggaagctttgagcagaaaaaatgaattaatggaacgctggagtttagtgtcacaattgctctagttgactcgacacggtaataggtatcctcgcacaaggtgttctcaagtggttgacaagaaattgatcccaatctcagagattcctcccgcattatttgcccacttgcgagaaacttctctgcattagtttgagcttccacatcccccctgatgcagaaacgtgtataatgcacagtaataaaatgcaaaataggtcaagtaacgatgacaacaaaaggaggttatcgtgtcatctaaaatcagaaagatgacggataaatccacagcaagtgcctacaatagtcataggatctgaccaggtccaccatccaagagaattttggcagttccatactaaaaattcaaacaattatttcagttgaaacttattaccaggatgatacaccagttacctctggttctggaaaataccatcaggaaccataagtcaattttataataaaaaaaagctttataaactgctattactccctagtataatccagcttggatttaagagtcaacgttaatatttagtgccactatggatgatttgattcactacaaaaaccaactgatgaaatgggaaaagcaatcactaatataggtaaccactaacaatttcctggcactaaccagggattcttttttttatccagtgcatgcaactcttttgatgaaatgtgaaaacagtgaacagagtccatggaagacacaaacaattcactaaagatggaacagttaacaaatttgcacagagaacaaacaaagcaacaaaattgaaaacgtgccttccgacaagtaaaagatagtcagagttttccatcctagctcgaccacgggactgtataaagctgcatactgttgctgatggatcaaagcgaattaccaagttacaacttggcacatctaaaccctcctccaaaatttgtgtggcaataattatatgtacctgcataaccatcattctctcatcagagaactatcatactatgacttaacagaatgcctatagcatacttaacagaatgcctatagcataaaatacaagtaccaatatcgaacctttccttttcgaaaagattcaacaatttctgtatgatttttcctgctctgagatagcaaaccaggacggcttcctgccatgtgcttaacattccacccagacatttgatgaatagatgaaagtaggtgctctaatactatgcttgtgataactctctcaacaaacacaatgcatcttaagtcttgcatatgcctgagagagagagagagagagagagagagagagagaaagagaggtgttacttattgaatgatcaaaagaacaaaaagttttagtacaagaaagtagaagcataagcatctcttacaatcaccaagttacttattgaatgtcgttttgcccgcgcggtttggtctttaatccagtttgcttcgaatattagtttacctaatagtacaactcatatgtttgggcattggataagaagacaaccacacaatttgagatctttggtcttattaggggcaactaccactatttggtctatttggctttgcagaaatgatgtggtttttgaaaggaaaaacatatcttcccctttgcaggttatcttttttattacacattggctctgctcatgggctatccttcagaaggtcaatttgcggggtactatcattgcggcttgtcaacacttggagctagtggccatggagttttctaccccggcgcatgggtggcgttctaggctacggttagagggctcctgaagttctttttgtccctgctattttggatgatgagtttatcttttgtttctttcttgttggctgtgtgcactctttgggtgcagaagccagaggtgctctcagaataattgtatcacttgatagaatttactgagattaataaagcttccattatctaaaaaaaaaactttagaacacatttttcacactggctggtatgtgattatctattccatggaacttacttacacttcaatatccatctaagaactaacctataaaagccagtaatagggaatggaagtagaaggtgaaattcaagaaaaaactgtatgcagcaggaaaataatagtggtactggaatgtatcatttctgtactacttatatgagttggtggtgatgggttgtgctctacacccccaatccttcaatcaacctttggtgaaacaatcagcatagacgtgtgtcattttactcatttgtacttctattgaaccaatatatagatgatttaattatgttcatatgtatgtggttgtcagttgatccaagttaaatattttaaatgtggggatttttttttggcatttgagtaagccaacttatgcgtgtttatctgagatttgttacaagagatgggcaaatatgctagttctcccagaaaaaataaacttttttttcttgggaactcttctttatttttttattcagattttcaaatgtaatccatggggcatgtacaaaaggcacatgcatattgtagaagctaatggctctttctctgtactggtcatccatgatttttcctattttctgattatgtaaaaccatgcatatcacttgatattaactcacagcagacaaaattcaaaagttgattaaaaaagaatgaaagaatacaccactatcgtccaccctatacagaacctttggtaccatttagtcgatgcagtctcaaagggagagaatgagaaatattaccaatactactataagaatagccaaatgaatgcaatctcaaaggatgtggctgtgaaatattatcaaaagaaaatatcagaagagtattttagcacctgtactgcagaagagttcgaataaggcaatgaactttgggtgtcaatatcccatcttgagaatcagctggaaatttttcaccaatatgacctgaaaaaaaaaagcaaagaatgaaataaacatggtatgacctataaattggaatttcggcaagtggatgccatctatggtttaatattcagttagtatcgcatgtatcataagtgaaattatgttaaaaatatcatagtattcataagtgaaattataaacatttttctagtatccagatagcaattcatgcagacaacagactagacaacattttatttggtaattgagaattccagaaagcaaatgctgtcatgcaggtaaccaagaaaagaacataaaaagcgcaacatgctagagaaggtatgtttgtaaaagccagagctgtgtagtatgtaccattcttcaagaaacatgaaagttctctatgtacttcttcgctgtagtttctaatgaagccctcaacatttttatccaatgtttcaccccagaaggataggctgttttcctcgtatgattgtacctcagcagcctgaaaatacaatgttaaagataaattgggattccagaaagtactataaatgtgcagtgaaatctttattcatacctttgctgccagccatactcctagattatataaacaatatacaaatgtatgatgcaattttgatatcctttgcttagcgttttccagagatgaaccatgtagttttctgtccagagcttctatatgctaagagaatgaaacaaaattgcattggtatctggtaacatatatacacaggatttgttaaaagaagttacttaaagcattacaaaaagaatgtcaatgcatctcaataaaaaaaaacctcctgcttaaaatattgaatgtcatattcagcccaagcacaagaagccatgaataacaggtccatggcatgcaatactaaaggtctggcacatgctctaactaaaaaaagaagtctaacaacaggcttaacagtctctgagactgataaatcatcactaaaaactgtctttttgacctaaaccgcattttagaattcacatacttctgtagaacactggctgtgctactgtaataaaccctaacttttttattcttcatttatattctgaaagatgccattgataggtcccacgttttggcatgcaggggatatcatttggctatctgggcctgtttggcagagcttcagagcatcctggctataaaattgttagaggtcaagctagcggtagactggggtgttggtgcgccatcctgtttacatttcagcatagaccaatttattttagcctaagaactccatatttacaaaaatacaagagttggagctcaatccagctcagcatattatgcttcaaaattcttgaagctggaacctaaaagtaggtagacaggagtgtttaggtgagtcatcttctttacattttggactaaaagtaggtacttaaaccactttgttttagcctacaaaactatattctgcaacaacataggagttgggagctctccagaatagacccttactaggcttcctctcatttcacatttattctaagtttctaacacttctccccaactcaatctctgttcccttctgtaggcatgccgaaagtgccaacctctcccttgtatcttaccccaaattggccgccatgcctagtcttaccactcaacttcatgcagtacagtaagcaacttgtcggcaagcaacatgtaactgaacaatagaaagcactgtttaccaaaagggcaaacaaaatgtagaagaatgatagtacctttttattcaatctattcaaacaactgagaatattggcatgcagctcagatgaaatgttggaatcgtcaaagtccactatttttgtagaagcaaatggtatgtactccgacaaagctgattcactatcaacagtgtacaccttgaacaacaaatgcatcaatgcttatttcccaaagacacatacaggtaactaaattaggaagaatgattatcgtaactgcagggatcacgtaattaactgaaaattacatggcctgaccttggaattcatgagattctcaatctcagaaatttgctttgaataattgtgcggattcaaatctatagaaggaacagtgtgacagattagatgatcagagagcctgtgcataaaacataagggatgatcgtttcgcccttaccttttgaataaatgagcgaagcagacatcccaaatatccttggcagagggtctgacgcactagaattcaactgggggtgataaaattcctgcaagcgtcgaatgatttgtctaaattggtgatacagatcagcaggggaagggagacatcaaagattctgactgaaatagtaaatgtggcaaaaccaacgctgcatgttccaattatattggcactagtatgtaagttagagcataggtgttcctatgttgatgagacgaaaatggaaaatgagagctactccactactaaccccacccgatcaataaatgtgaagggaaaatacgaaagggcgcaatacggcggcgggtgtaaacttttgtaccttgaaaatgcaggcgtacggcgtattgcccctggcgtggtgacactcgtcgaagatgagcagcgcgatgtcctggaggcggaagaagctgtggcggaggttgtcgagcaggatctgcggcgtcatgacgagcacctcgccgtcctccagttgggatcgccaggtggcggcgtcccagaagtcgacccccatctcgccgcagaactgcttgacgacgaggtcggtgtgctgctcgacgacgcgcgcctgctggcccacgaggacgacggtggggacgaggaagacggcgaagcggcgcgagtccggcctccgcacgcggtgcgcgtacgcccggagcagcatcaccgcgatgagcgtcttcccgctcccggtctccaggaacgccagggtgttcccccgcaccgcccgctccagcgcctccagctggtacctgcacgccacgcgcaatcacaaacccccaccaccaccattagcatccaaaggggaggggaggacggcgaatcgcgatccgtcaggcgcgcactggacaccccccgggcctcaccatctggccattgtcttcgggtcgggcggcggcggaggccggagcggttccaccgccttggcgcccccatctcctcgacctccggcggcggtgagggggcccacccatggcgacggcggcggcggcggaggaggaggaggggtttgggggaggaatcgggggaggcggcgggatgggggtgggagagtgaggtggcgcccacgcttggggccgcttccgcctccgcctccttcggtgcacgcacgaatccgaaccgaattcctacgagtcgcgcgcgcgtgtgttgggctcgaacaatgacgagagataaatgatcttatgggggggaagcgggaggaggagggatgggaccaattggtagtgggaggcttcggggcgaaggattcgcccccgccggttcgttcgagtgcgccttttgagttgacgaggacccgaggagaggcgaccgggaccgcgggggaatgggcgcggccgtttggcgtcagatggaggggagggaatcacaggtggggtactgggggtatgtggaaggtcggggggcggtgacgtccttttgggttttggcttttgcaatggattaaatattttttagatgtcatgtcacatgtcacatcggatatttgatacgaattaaaataattaaacgtagactattgataaaacacattttataactctggattaattcgcgagatgaatcttttgaatctaattaatcattgattagcctatgtgatgctatagtaacaatgtgctaattgtggattaattaggcttaaaaaattgtcacgtgaattagctctcatttatgtaattagttctgtacgtagtctgtgtttaatactctaaattagtgtccaaacatctaatgtgacagggactaaagtttaaagtctagtccctggattcaaacaccccctcattgcaggtaataaaatctcgacaattccatgtgcattgctctttcaataaaaaagttcaatgctggtttgttttctaggatttgggttccttaggccatcaccaatgcgtactctcaagtgtgtccctgctcacagccgtcgccagtccatcagtttgccgtccctagcagaggggcgcgtcttcctccgctcctcagtcgcttttcgtcgagccacggagctaggggacacgttgggcgacgtcgtggcttgaggacacggctcccgcacctgatttttctccttccacccttggcctcttcgctgagaggcccatgtgttgataaaaaaacacacactggcctgggaggtctgcttaactccagtgcaggtcctaaatcttgctttcgggtttcgctgggaggagacagagttggcgacgacgaccggcgatgaccctgtgacggagacggctcggcgaccccgcgcgctgctgccctccgccaccgcgcccgtccccgcgccgcttgtcgtccgccaccgcggctggtgagagagaaggagaaaggtgacgatgagtggcgcaagagagagaggagagaggcgacggcgacgaccagatccgaccaccgtgcgctgcggcagccggcgaggacggagggcttcctcgtgcagcggtggcgaccagatctggcgcaggctgtcggcgcagtggctggggatggcgaggagggaggcgacgtcggtggcttgggaggtgacggcggtggctggggaaggcgaggagggaggcggcagtgagcggcgtgggagaaaatggcgagcgggcaagagagaggggagattggcgatgcgcgcgagagagaggagaagcgtcggtggggaaaaaaagtcatcggtgggctatggagagaggagggtagtataggaaaatacccaccgtgggctttttggttgggacacccattgtgagcttgagtgccttcacccagttatcttatattttgaggagcccatccaggggtatctctcattgtgagctgagtttctctacgagtgtcctcaattagtgaggacactctaggaatagctcacattgtagatacccttacagtaatatgttgtgtccaactcatacgacttctcattatctgtgttcgttccggtgacattgagggagaaaacccatcgttttccacgcgcacgcttctaaatatccaaaaattatgtcacatcaaatatttggacatatgcatggagcattaaatgtggaaaaaaaatccaatttcacagtttgcatgtaaaatgcgagacaaatcttttgagcctaattataccatgatttggtaacgtggtgctacagtaaacatttgctaatgacggattaattaggctattcatctcgcagtttactggcggaatttgtaatttgatttgttattagactacgtttaatacttcaaatgtgtatccgtatacgtcaaagtttttaaacctaaacaattaaacacggccaaagtgtcaaactttactagaagcagctgtgcagtggctatggtagaaattatatgttgctactgtagctactaactgccatctagtcataccgaacacgaatcacgtgtacactttttaaccgttaaaagataaatatattttatagaaatatactaagactagttgggtgcccgtgcgttgcaacgggaaaatatgtatcatttgaaacatacaatctatgccatatagaaatatgcacaaatcaatgaggaatcatttccttgatctgaacaaaacgaaattgtaatgaatctgattcatttgccaagttattatgctatatattaagaagtaaaacttgtagatcttcgaattcagcaaagaggaatatggacatgtgcacccacgtcaattctatgctttttttatataaacatggtttaatcacattccgtagcacacaaagaaaaatagtatgcatgcatatcaaaaggatcgtgtgaaaaatgagaaaaggagaggctacagaacatgggtactaacaattaactgatgaagcatgaatttgtgatattttcaaaccatgccaaaatgttaccatgcatttcttcaatcaccaaatccgcatacagagctagaatgagcatctctgaacaaatataattttcatcaaggaaattcgagttcaacaatcagataattctaattacaaactaagagagataacaaagaatgatttctatatcagtctatctttctggtcaatggtagcccgacacattagtgtctcaaacacgataaaatgcccaaacatagataaaataatgaaaacaaatccatttagttgttctcatgcccaaggtgcatgcaaagttttatatgggcatggtatcttaaataaagtttttaaggggttattgaccaaatggaaggactactgaacaaaaggacaatattaggtacctcaaatgatgtgtaccgtcagaacatttaaaacaaacttgcatggattcaaaaccttaagctgcttttcatctggcaaaataactggaatattcataaatgaacagcaacaaactgaatttcacgatcttagaggacacaaataattgaaggtgtaaagtattcagttaaaaatatattgtgctgaaaggttgaagccttcttttttcagagcaatacatgcttaaaacatgacaattcaagagcaaatgacatccgatgactttggttctaatttaagcagttactgattctgtttgaataagctgaacaatctactacagactctggtgcataaatcatgtaaatgtgcacgtgaaacccacgtcaataataagataaaacagagaataagcacataatattttcacgtctctaataagatgaaacagaaaataagctcctatacaacaatttaataattccacgtctctaataagataaaacagataataagctcccatacaataatttaatgaccatacaatactttgtatagataatctttccgatagaaagagcactgctacagaccaaaggatgaactgccccaaacgggcatagcatgagtacagcagacccattacatataacgttaaataaaaaatacataaatgaccgtcttcctattttactgccaaatgatgccttagaaggctcatagatggaggaagggttatataggcctcagtcctcagaagtacctttccatgaacccgagttaaatacaatagaggtgaccaacatcagttaaaagaaacacatgtagtagagagaataaactttatgcaatgtaaattatgaactaatgctcacggaatcagtgtcagctaaaaaaatgtgtggttatgtattaatgtgatctaaattagagttcgtaagtactgcagcctattctctgcaacgttaaatggatacggaaattgatggggcaaggcaaaccggcaaagtgttctctcgtactgcattccagataatcaaatgtgcagtaaacaatagtttacagcgatatgcaataatattaacaaccttccttttctatactcattaagcttaattgaaggaaatgattctgccaagatgcattgatagcagtaagatgactgcattggtaaggaagataatatacaggtaaagaaactaaccgtgtgagcatagatgatgcaatttactccatgactgaatcagggattagtgtattttctgctcgcatattgactaaatttcattgagtggagggcttctctcacatttatagaattaaggtgtgggtttatcatcatgaattcaggtgtggtttatcaccatgaattcccatcagcaattgcgctgatcatcagaacttaacatgagacacttaccatgaggaagtatatatataatcacatccaaaattttatgtctaatgtgagcacctagccagtaaaacaactaccaggatcatgaccaaacagtatgttaataccataggagaagtcgttatagtgatgagtgtgcaccacatgtaaatgcggcatcacagataaataaattgacagacacaacatagatcaacgatatttccattgcatgttaaaaaattgatatcgcagaaattaatcaagtaaaaacaggacaaacagaagaaactggtcttactttcacagtagggaagagtacccgggtgatgaagaaacctgacgtcctgaagaaaagtgagcttgtgtccagtggtaagatttcacttcagatctacgccgtttgtgagataataatttaaataccatgggtaggtacaggatcaatactcttttttcgctggtagtactctcgcatcttttgaagcctagcttccttgtcgccagcactaagagcagcataccgctccctagcacgcttccgcgtaaattaaatcggagttaaattagtgatgccgccaagtgtacctgcagaaacttgtacagaaatcatttcacaacatagcaacagtacgaagcagcgagacgaaaagggagaaaacagataatgtccacaaatcagatacacattgtagatataccttcaacaggaaactgtttcttttacttaaaacgaaattgtctaacaggaaactgtttcttttacttaaaacgaaattgtctaagtgatactttcacatacattttgattacagctcgaacaaagcagtacagtgctaaaatcactttgaaaagtgaattggtttctggacatttgctcaacatatttatgaactttagttgatttgtaacttttctagatgggggatgtctagcaatcgaatgccatataagaaattttgtttaccttttgtagatgggaatgtccctcagtgatggaggggagacgggcgagtactgcatccacctgccgacagcatccagcgacgaccggaggactggcggccagcttccggtgcggcgcgaaagggaccgtggtggagatcgacggagaggagcggatccagtcgcgagatgtggcgtaggcgacggacttttggcgtggacgtgggctgcgcacggggaagcggagtcgacgacgaaggccgccgcgggatgggggtggtggtctagtgggaggccgggatgtggggggttgatgcagccggcctgcggaggtgaggtcgatgatgaatccggcttgtagacctgggaggtcgtgggcttgtggggcgtggattccacggtgatttggggacgtgggatcggcgatgggagaggagcgaggcggcgcggtggttgggcggggtggggaagtggcgtggtgaggacttccggcggcagggatcggtcgagggtgcgcctacgtgatgaggcaggaggagacggcggcgatgggggcgtcggcggtggaggcgtggtgcggcgactggggaggaggatggggcgttggtggcggtggcgctggcagtgggggcgccgcgggaggagccacctgatgacgacaatctggagccgatggcgacgcggaggagtaggcatcgaccgcggggggagccggggaggaggagtaggcgttggcagcggggaggaggaggagtaagagtcggcccggcggggggatctgaagcggactcgacggcgggggattcggcatcggttgcgggtgggtggtggattcggcgtcggtggtgggtggacggaggagtaggtgttggtggcggtggcggtggcgttggcggcgggtgatggggaggaggaggacgcggcggtggacaggacggcgtgactggcgttgggggcagtgtctagggtttcggagtccgccgcaaggagtcctccctgcgccagcgatggtttgacgaaggcggtggcggcggcgaggcgagcagtgggggagggagctggtggaggacggcggggaggagcgaaggcggcggcggcacgggacggttaggggacggcgatggagctgtcggcgacgcgatggaggaggacggcgatggcggcggggaggatcgaaggcgacggtggcacaggacggttagggtacggcgatggagccggtggatgcgggcatgcgggagcgatggagcggtggatgcaggagggataaggtgaggagctgggtggggatcggtgcaccgttggatttagcaatctgacggctcacattccgcgtgtctgtcagagctggagtcaccgccaccactatagaattttaaattagtagagattatttgaaaaatcgtattaatatttttaaaatttttaagatataatacttaattaatgatgaactaattcaccatgttgctatatttgccgggagtgaagatttctgaacctataccttcaaaagcacccaagcagtgttgtgtaccggcggtgtagtcggctgtaaatacgacacaatagcaaaatcgttctgttaatgtgacaagggctactattattattcattagtatttatgaacgtcaaaattccatttttaacgattaatcggccactttttttaataatccgggtaatcatttgcatattgcacttgacgatcttttagagtaacaaatttatttttttacgatcttgttttgtttagtgttgtttagtactacctccatttttaatggtaaattttgctacaggacatcgcgacttcgtggaattagctccaggacacctcacgaagtgagttttggggaagacacattctcaaaacatggctatttgtcataggacaccgcgcccatttgtttggtatattcgtgctgactaggcttgagcaggcccacatttttacgtgaccaggccaaattgccctaccacatattctttaggcccacacagattactataaaaaaaagaatattgggttgtactccagctccacacagttagtgggaagcaaccaagtcagctccatggctgccgccgcccacctggatgggcttcctcggcctcctcagcttccgctgcagcgccaccgccgtcgcctcctttggccacgcgcaggacgacgagctgcatgtcctccacaccctccaagcccacgtcgccaaccgccttgccgcggttgttaacaaccaaatttggtaacatcagcgtcggagagaagattagatcgaatcaaagtcggaagcggagatcgagtttgaaaacagggcaggaatcggctgaagtccagatcggctatgacaagatcggctgggtctgagtcaggttaggtaagccgatgtggccgattccgacaatacgacttgtacacggcatcaggttcaagttaatgtacttcaagatgattgccacgcatggatagagtcctgggaaggcaattgtatatattaattaggatattttatgtaaattccttatagataaatgtgggcaaaagtctgccgcaaagacttatgatatcttagagtttgttagagataatggtcatgtctggtatgggcatatcttataatcctcgagtataagtagaccccgagccctatgtaatttttaacgacagacgttcaacacaatttcggcgcatcgccaccctttttacttcagttttgtttagacgagttcttgttttcgggttgagctgcatcgatttcgatcttcaacaagaggtaaaattcattatgatggattgcgttcttaggattagtgcttccatctttatgatactctaatcccgtttatcccgtttatgtaattcatcgagttatcatatgtcttacataatctctagcaatatcatcatctaacctgccatcggttagtatctgttaatagagggtagccgattaggttaaatattaatattgatctagattatatgagacatctaccattctatgaaacttctagcgacttgattatctagatatcgttcttcttttcatacttaatgctgcatcagttgagtttgatctattaagtcgtgcttagaatattgatctttagcctgccctctagttgccgattagaatagcatcggagtttcagccgatcgtatctgatttaacttcatttgttatatatgccttattgatatgttaaatctgccctttatgttaagatattgttgtatctaagtatgttaggcttttgctcaatatattattcttgctttaatatcttgatatagagtagtatcggagtattagccgatacatgctagatctatctgatcggctatgttataaacatatatagtcttgttattgacatatatttcgatctaagtgatttatactgtctcggcatgatgaccgatctatcccaatcacttgatttaagtatacatcgatatgaggagtatatattgttaatatctacagccaatcgagtagatttagtccttctttacttattcatgactgccgatcgatgcacagatgacatcggctcaaagataaatgatatgtcatcggcatctagccgatcggctatcatttatggatttaaccacggtttctttgcttctatttcttgttgattacaggatcaaatcaactggcacgctaatacatccgaaggcgagctttggacctacactggagttaagtagatctcccaggccacgtgttttctgtcaacagcggtctcccatcagccaccgctcctctccctcgccttcctctccaagctgctcgacgtggtgctctcctcatccgacgccttccgcgacatcctcggcatcggccccgtcgccgcgcgctctgcaggccgcctgcctcactggtgacctcctcgaccacaccgttaagacactcgacatacttaaagccgtctccctaatgctcgcttcgctccggggctcgcaccgcaccgtgctcaccgccatgtcgtgcctcctcgccccgtcgctacaccacgcccactttggccgcgcatgccaggccatctccaggcaattccccgatgccgccaagctcgctgccgcgccaggctgtccttcagcgtctctaggaacaggtcctccggccgccacgtccacgccatggcggcgcacttcgcaccgccgccacagtagtcgcccacgtttgcctcccccggcgcaggttgcgggctggggctggcgctctacaccatgagctcggtgctcgtccgctgaagcatctaggcctccggtgttaattttggtaattgttggcgatatggcatgaggcccttcgaccaaacatgctgaaagcatgcacccgatgaggattcaagcccgagacatcaaggttagtcaaggcgaaccctccccatgtcgaagactatggagcaaggacgacgagaggcagggaatcgcagccgagctggaggcctcctggccgaagggcgcaaggcgaagagcgtacgccgaagggggacgacttcgccgtagcaggttcggccccgggaaggccgaagaagctatcctggcccatcaagcccaggggttaattgggtcgactataaccagtcggcccgctaagggcccatgaacctcaattacgctatgtacccatgtaaatatccctttcataagggcaaccatgtaaattcccctgcataaccaaagccctagtagtaagacctgtaatgggggctataaatagccccatagggccatgtaatagggggatccaagaaaaattctctaatcaatacactttactttttttctcaaccactgttgagtaaccacgtctttcgacgtatgcagttgtcgtttcgacaacagctggtgccgaccgtggggacctccgagcgaaaccactgagagtgaatgccaccgaagaaggtcgtaaaggaaaaggttacaaggcgaaaggaaagcgacgccggggcggatatggccaccgaagagggagcagagccttcggcgcctgtcgctgaagatggaggagcgccatctgcttccgcacctgcgccatcactaccgccttcagcccttgctacctctgtgcaggtgccgaacgcagctgacatggcgaaggcagctgcggcggcgagggcactccagaccagggcggagatcctttcgacaagccaactgctggtgccccaagccactccgtcacagccagcagcggccccaactacgctcgctgctgtgcaagtccaagtcaaccctgaccccgagacacaaaccgaagccgacatggaaggcatacgacagaacatgacacgactccaagacatgcttcgccaaatgcaaggacagcaacaagcgtacgaggcggcaaggcggtccaaggtcgcctcggcaccaatcctctagtattcggcaggctatgtcccaccccaagtctatccacaagtgccgacccagccccttccaccacaagtcgcgcgagcgccaatgtacttcgccgggcagccatcgaccgcagcagcgcatccggcccctcacgtgcaactgcaagctcaaccggtcgctgcccaagtacatcctcaaccgcctagccaagtgccacaaacaatggcagaaggggcttcagctctgcaggcgcagctccaagctttccttcagcagctcagccaaccccacaacatttcaagtacagccccttcggccctcccggaggggaatacaagtcaagatgcgcctagttggttgccttcaaatcaaccaggtctgggggcttcgccgtggagtcaaggaccgcaattcgactccatcaatgctgctcaggcgccaaccgttcggccgcaagcaccaacgctaggcttcagagcaaaccaagcaccaaaccagatcaccatgacatggtcacagccaactttcgacccattcatggcggctcagcaagcatcaccaatcggggctgtgtagccgagtgccatggcccaatctcacgcgcaagccgtgatttcacccttcgccacgccgtacccgcagcaaggtgctgtgaacagggcagggggcgaaaaggggcaaccgctgagtgggggaatcaagacccgcacaatcccaccccagtgcaagttcccacccgtcccacgctactcaggcgaaactgacccaaaggaattcctctaaattgacgagtccgcgatcgaagcggctcatggcaacgaaaataccaaggcaaaggtaatacatctcgctctagacggcatcgcccgttcgtggtatttcaatttgctagccaatagcatttactcatgggagcaattgcgcgatgtctttgtccttaactttcgatgtacatatgaggagccgaagatgcagcaacatctgctcggcattcgccagaggctgggggagtcgataagggagtacatgcgtcgcttctcgcaagctcgatgccaagttcaagacataaccgaggcgtctgtcataaacgccgcttcggctagtctgctcgagagcgaactcacaagaaaaatcgccaacaaggagctacagacacttgaacacctacttcacatcattgacgggttcgtaaggggcgaggaggattccaagcgacggcaagctatgcaagctgagtatgataaggcttccgtcgccgctgctcaagcccaagcgcaagttcaaattgccgaaccacctcctctcactgttcgccagccccagccggcgatacaaggacaaccgtcaaggcaaggtcaagcccctatgacctggaggaagttcagaaccgaccgtgcgggcaaggctgtgatgactgtcgaagaagtgcaagccctccgcaaggagttcgacgctcaggaagcaagcaaccatcagcagcctgcccgcaagaaggcccgaaaagacctctactgcgccttccacagacgctcttcgcacaccacggagcaatgccgaaacattcggcaacgtggtaacgagcaagattcaaggccacagcagggagcagcagtcgaagcacctcgcgaagtagctcaagaacaagcacccccggccgaacaacgccaagatgcacaacgcagagtaatccaagtgattacaagggccgacccgccaatccaactgtcgaagcgacaaaagaagatgcagctgcgaacgatccacaatataacttcagcaggcgaagggtctccgcaatatctgaaccagcaaatctcttttgggccagaagacgccgaaggagtaatgttcccgcaccaagatcctctggtgatctcagccgagatagctagtttcgaagtccggcgaatcctggtggacgaagggagttcggccgatgtcattttcgccgaagcataggccaagatggggttgactacccaagcccttaccccagcaccagcattgctcacaggcttcggcggagaagcagttcaagttaatgatagccttcggctcgggggaaaatagacgcgaagagcaagtattgttcgacgttgtcgacatcccgtacagctataacgccatcttcggccgtgcaaccttgaacaagttcgaagccatttcccatcacaattatctcaagctcaagatgcccggcccgaaaggagtgatcgtggtcaaggggcttcagctttcgcctgcttcaaaatgcgttttggccataatcaagagagcagtacgcaatgttgaggccgaaccgcatgaccgggcgaaacatgcgtcaaagcccgcacctcacggcaagatagtcaagatgcagattgatgatgccgaccccacaaaactcgtatcactagggggcgacatgggcgaagaagaagctaagaacatcctagaggtacttaaaaagaacattgatatcttcgcctggggccccgatgaagtaggaggtgtttcggcagatctcatcatgcatcacctggcagtcaagccggacgccaagccaaggaaacagaagctatgcaagatgtccgctgatcgctaggaggcagcaaaagccgaagtccaaaaattgcttaaggcaggggtcattcaagagatcgatcatcctgagtggctggcgaatccagtgctggtgcggaaatcaaatggcaaatgacgcatgtgtgttgatttcacagacttaaacaaagcatgtccgaaggacaatttccccttgccacgaatcgaccagctcgtggatttgatagccggttgcaactcatgagcttcctagatgcatattccggctattaccagattcgcatgaacccggccgacatccccaagacagccatcatcacaccgttcggcaccttttgtcacctcaggatgcctttcggtctgagaaatgccggagcgaccttcgctaggctggtgtacaaggtacttttcaagcagttggggcgaaatgtgg

SEQ ID NO: 9769 - DNA, 4104 bp, Oryza sativa
aaggaaaatttaatagtagcaaaaaatatgtctacaattaaaacaatctgcagtgccaatatttatatcagaagagcttattggtatgatgtacactctcatagtaagtactcacagtagaatgaaatctaaatttcataaaagtagcgctaaaacatataccatattcagctgaggatattaaatttggaaaactttacattcaaatattggaaaattttaaattcaatgtcaagcaagagtttacattttgggctacatatttaagaattcaattagatgtacagaaagttcagaagggtctgtaactcgtagaaactaaaacacctaaaaattttgtcatcaacaaatattaaaattcattatctaatcatgtttataaatgttctgcataatttccaacttagtaacttcgagggttttattacagataattgagtcaacacatgtagtcaaaacggaggatagctggagaaaacattatgtaatattactgcaaccagagaaaaaaaaacctttttcttttttatagtagtagttgtggaggaagttccgcactttcacatgtttactgccagccaagagcggctgattttcaaaagtcaaagtaagaccatgcctgagaaacacaggaaacaagtagatgtgtgcattcatagcttacaggagcatgtatgatacataaacatgaagtaataccgaaagggaaaacatatacctagtcttaaaataatctttgtaggtaacaacagtcccatcatgttgaggcaaacgggaatttgcatctaagtcaagaaacccactaataacataaaagatgttattatgaggggtacacacaatggaatttttaaggatgcacctgcagaaaggaccatcttttgtctgcagtaaatcaatatctctacaagaatggcaatgtgtcatatgtttgttgttagcttcatatattggtgaggatgagaacttcatactgcaccaatcaattctgccagaaactaaaggcagaagtagatagactactccaataggcacttgcatctcatggaagtatttaataccattgctaacctccaaatggtcatcaccaataagaaacgaaagaatagttgtctgaaatcttctagcaataattacctggacaaacaaaagttatatattctcaatgaaatggtctaaacaacaatagcctagttatcaaagaattagagaacataaattgacaatttacctgttcttgattgagatggatgatgccaacatatttcatggtaacactagcattgtcttgcccacctggcaatttaaatgagctagaagtaaagtcagatcccaaatcacacttcaaagctaacagtatgtcagttggagaagctgttttgggacatccttccaatgagatcttatagcaataatatatgccaagacgagaaaaggagcgccaattatccacaaattcttctggaaagtaagaaggctgctcaattttgttctcaacaactatatgagaaacattaaggcaacattagtgcaaagccccaatatatatcacacttaaaagccaacttcaaaaattacgacagatcttttactttcaagattagtgaagatatcaaatttagcaaacaaaataggtaaatttgaacaaactacgttcgttttgggacaggcatcatgacatgtatgtatccactagaccagtaaattatcaagtccatgaaaactatcaagtataaatcagtaatgcacgaaacacatttcctattgtaccttcagatataaccttacccaccatgcatcaagttttccttaaaacacatggtaaataattacttgcaaagtgtaaattgagtttaaaattttgatagcacgtgtaaaatacttttacttatgtgttactgcattatcataactcgcacaataaactgctccctgaataatcaattggaataaaatatataaattgcaacaactggaacaaattgaattaaactgcttagctgaataaccataccgatgtcaggttcttcatcacatggaacatctaattctggtaaaagagaatctgtgagtgcaccaatggcatgtagttcttggcaggccttaagacaaactgtctccttgagaatagaaccttctccttctacattaactgtctgcacaggactgctcttaggaagatgcagagtgcatgtgccagatgccttgtctatatcgaacgctggagttgactcgacacggtaataggtatcctcgcacaaggtgttctcaagtggttgacaagaaattgatcccaatctcagagattcctcccgcattatttgcccacttgcgagaaacttctttgcattagtatgagcttccacatcccccctgatgcagaaacgtgtataatgcacagtaataaaatgcaaaataggtcaagtaacgatgacaacaaaaggaggttatcgtgtcatctaaaatcagaaagatgacggataaatccacagcaagtgcctacaatagtcataggatctgaccaggtccaccatccaagagaattttggcagttccatactaaaaattcaaacaattatttcagttgaaacttattaccaggatgatacaccagttacctctggttctggaaaataccatcaggaaccataagtcaattttataataaaaaaaagctttataaactgctattactccctagtataatccagcttggatttaagagtcaacgttaatatttagtgccactatggatgatttgattcactacaaaaaccaactgatgaaatgggaaaagcaatcactaatataggtaaccactaacaatttcctggcactaaccagggatttttttttttatccagtgcatgcaactcttttgatgaaatgtgaaaacagtgaacagagtccatggaagacacaaacaattcactaaagatggaacagttaacaaatttgcacagagaacaaacaaagcaacaaaattgaaaacgtgccttccgacaagtaaaagatagtcagagttttccatcctagctcgaccacgggactgtataaagctgcatactgttgctgatggatcaaagcgaattaccaagttacaacttggcacatctaaaccctcctccaaaatttgtgtggcaataattatatgtacctgcataaccatcattctctcatcagagaactatcatactatgacttaacagaatgcctatagcatacttaacagaatgcctatagcataaaatacaagtaccaatatcgaacctttccttttcgaaaagattcaacaatttctgtatgatttttcctgctctgagatagcaaaccaggacggcttcctgccatgtgcttaacattccacccagacatttgatgaatagatgaaagtaggggctctaatactatgcttgtgataactctctgaacaaacacaatgcatcttaagtcttgcatatgcctgagagagagagagagagagagaggtgttacttattgaatgatcaaaagaacaaaaagttttagtacaagaaagtagaagcataagcatctcttacaatcaccaagttacttattgaatgtcgttttgcccgcgcggtttggtctttaatccagtttgcttcgaatattagtttacctaatagtacaactcatatgtttgggcattggataagaagacaaccacacaatttgagatctttggtcttattaggggcaactaccactatttggtctatttggctttgcagaaatgatgtggtttttgaaaggaaaaacatatcttcccctttgcaggttatcttttttattacacattggctctgctcatgggctatccttcagaaggtcaatttgcggggtactatcattgcggcttgtcaacacttggagctagtggccatggagttttctaccccggcgcatgggtggcgttctaggctacggttagagggctcctgaagttctttttgtccctgctattttggatgatgagtttatgttttgtttctttcttgttggctgtgtgcactctttgggtgcagaagccagaggtgctctcagaataattgtatcacttgatagaatttactgagattaata

SEQ ID NO: 9770 - DNA, 24410 bp, Oryza sativa
cctagagttagtctctgtatacacggtgaatttgatgtttctatattaaattacagtgatttaagattttaaattttttatctatattaagattatttaaatattatccacgtaattgtaggaatacccagcttcaaaaaatcttgaaataaagttgtgtcaaagaggactctgtagtgatggttaacgaagggccattttggtttaataccaaaaacatgccctactaatttattagcaaatgtaaatagtttgtgtgttagtttagattgaggtcaaatatttggtagtgcccctatcctatttggttatattttagaagtttcttcactaaactataataatattcctttatattggtagcaatccaaatgttagctaaataattttaccctatcaatattttagtagtgctaaaatttacctagagtgtgatattaccaatgaattgatagggtaaggaaccaaacaagcccaaaaacctcagcttcaaaagaaaaagaaaaaaaaagaagaatagacttcgcatacatgatgatcatcacctggtaatacaaatcgccaaaggattaaagcatcaccaacataatgtatataatccaccccaaaattttgttttggtttcttaaactgaaaatagaaagtgaactcatctctttaagagaaagcctaaataaaaactaaaaatggaccattcttttaaactaccaatagaaatctcccattccatcaaagatcaacgctgatctccctccccaacgccaatttcccccaccacaccatcccatgtcagttgttctttccctctcccctctattccccactgttgctgcccccacctctccctacttgcaggggcggatctagaaaaaaatagtagtgagggctgaataaactacatcatcataaatcaaatctccaatccccacatcttatgaatctatggaaaaaaaatagtgggggcttaagggggtctgcactgtcccgggagcggtagtggggtctcaagatccccctccccccaattgtgagtccgcccctgcctacttgccctcgttctgctaaaaaaataggaatatgagtcgtcgaaacaacttccttcaaatgctactagacgatgagtcttcgtcggatgacgacgatgaattaatttttgaggtagttgaaacagtgtatgatagtaacagttttacatttagatgcaaaattattttgcatctaaaatgttgaaaatgattttcataaattagaaataccaaaattttccaactaaagacctaggtgagtctaatataacttgtgcctatatgaaactttgtgaataatttaaacatttttcctttctaacccaaaataaaaacattttggattttacttgcattgcataataggtcctataaataaaatgtagggagtggcaaagttcttcaatcatggccacacctaggaggggaagcaaggagttgaattgaagatgggggaagagaagctgtgaagtgttttacaaggatgtcgagcttgccaccgtagaggctggcgacctcgcggagcatgcgttccggctggtcccggacggagacgtcgcggactgagccggtgacgcggaaccccctgccctcccactccctgaggcgctcgcccagctcggcctcgttcctggagcaggtatgcacggccgcccccagcgccgccagctcgtccaccaccgcacgcctgcgcatgaattccccgcgttgatcgtagaagcaacagaaggctccgcggcggaggtctccctagccagcgagaaggggataagtgtgttggggtgagtatccgatgccgccggcagggttttaaatttcgaaattgctatttctgtcgaggacactgaaattttagaaatttcgaatttttttgaccgaaattatttaaaagtttaactgattttgaatgaatttgaatacaatttgacaaattcacaaaaaaattgtaaaaaaacgaaaatttcgggcgagatatgagcttgccggtgggagggcaaaattaacgaaatttcagaaattttgcaacgaaatttcaaaccctagccgcaggtgtcgccggtaatgagggtcctcttgctggccgaggggccatcttcccgcatcgccgctggccatggccttagtactgtggttcctctttgctctagctatggcaatcctgtcccatctgtttgcaggaaggatgggggtattttgcgaagaagtcctatatcggatctgttctttagaaaaaactcttcgaaaatatatactgtaaagtttatatagtgtacaaacctagaaactaacattggataaaaattggacatataagatttattcacatcactcttagtaaatttttcactatttgtaatttttttattaagagtataaattttactcacgataatgtggagaaatttcatacgtctattttttcatataacgattgttttatatttacactacttatcggtagttattcggttgttttgtgaaaagatcagaacgcggtaagcctgtaatgatcagaaattttcacataaggtctccagactcgggagtccggccgctatgatcgatagcggtccggtctctactactctctccgttttacaatgtaagtcattttagcattttctacattcatattaatgttaaagaatctagacatatatatatatatatatatctctatttagattcattaacatcaatatgaatgtgaaaaatgttagaatgacttacattgtgaaacggagaaagtatcaagcttcctccggatgaaccgtgggatgctggtcagagagagttagcctggagcgttggccagttcggacttcggaggatacaaaaaagtatctaaattcacaacacaaccattctattcatgtcttcttcaccagcaacatctgttcaatctccaaataataataataataaagaaaaaaacctaattaaacaacatcttcagttcacctgcctttagcgaggcttcggttggctttgtctgtaagagcttggtcgatcgctgctgtaatcgctgctagtgtttccctgactccccggcgctcttcttgatcgtggcccgatggactcacccgattccatgatggaactgtaggtatcttctgcgtacgtagtcctaaatatagagtttagatcttctccatgcgtttgtccttgcaagtgcttcaggatctgaaaggagaaaaggaacttcttgtcacatataggagtatcaaatatcagttatttggttatgtagttattgttctattttattctggaacaaggcactaccactacttgtacagttgtactgaaggtttagcagtttcggtgtttcaaactcaaaacttttcagggaaggaaacgaacctgaaccatggatggacgcagatgtgctgattggcgcacggcagcggcggcacactccatcattcgcatcattttgttttcatcataatcatctccaatatccggatcaacaaggatatcaaagttgccttcctccatagcttctgaaatcaagggttttgcctgaagaagcaaattcagaaatgttctatcaggctagacatcaaagttcctcttagaactacatttattggagtgaaggaaatgtattagatgtcaaggaatgaattttgtcaagattcaagaacttctttttgttagaaactgacccaaccaactaacgtgctgtccatgtaagactcagatgactgaaccggcagccttccagttatcagttccaagaggacgacaccaaaagcaaagacatcggctttgtcagtaagcttcccgctagacaggaactctggagcaatgtacctgcagaaaagaggatttgctatgaatacaatgagggataatatatacttgtgctatagatattcatgttcagaaattagaatgaacaaactcggaatacatagggaatgctgaagagaagtactgacccaaatgtgcccattattcttgtggaaacatgggtgtggtttcctggttgctactttgctagaccaaaatctgcaacctgcaaaggatcaagacatactgagtataggactgtgcaatataatggcatattgtttgcaattcaaacttgtcctgggattgcttcaaaaaaaaaacttgtcctgggaaaaccagatcttcttgaaacgttgaataatatgtgcagagagagtaccttgggctcaaaaccatgatccagaagaatattggatgccttgacatcacgatgtataattttaggagaacctgaatagtataaacggactttttcgtattaaatcacagttcaacactagatacgaaactgaatataagtgtataacgcgaaatggatgggtggagtagaactaacagtcatcgtgtagataggccaaaccccttgcagatcccacagcaattttccatctttgctgccaatccagaggtggccacttgtcccctgaattaagttcaacagtaacatgatcagatcagagtaaaaaaccaagactaaaaaaacattgactaaacagtcaacggatgcatttgacagaagaaaaaacaaatatgtaaaccattattttttttattcattttagatgtagacataggttttataccgtgtaaatgcgtgtcgagcgtcttgttggggacgaactcgtaaaccagcagcctgtcgttgccggagatgcagtatccgacgagggagacgaggttcctgtggtgcacgcgtgtgatgatgtccgcctcggcgcggaactcgcggtcgccctgcttgctctccgtcttgagcttcttgatcgccacctcggtgccgtcctgcagcctccccctgtacacgcacccgaatccgccctgcccgatgacgttgtcgggggagaacccgcccgtcgcggcggccagctggtcgtacgagagcgagccgccgtcgatggagatggagtgcgggcgctcggagccggcgtcggagaacgtgccgccgctggtctgcggcgccgtcgggtggtggtgctgctgctgcatgaagacgaatggcagcggcggctggtcacctgcaagcaccaaagtgtggtggatatctccgacgacgacgacgacatggacgtacgtacgtacacgacgtcgaacgtgacaagaatcacaagatgcgcgcacctttgtagtaggggttggggttgtataacattggcggtggtagcggaagcggctgggcctgttgccgccgccgccgccgcctccatcgccggatccagagcgcgagcacgtacaagcccaaaaccagaccgacaaccccagcggccactttgacggccacggaattcaagaacgagggcgagcccgtctggggtgccgcgggtgccgggtcggacgccggggccgtcgtgatgatctcggtcacggcacggcgtgctctctgcccgtggccggaggagatgacgacgacaccatgcaccgtcgtcggtccaccggtgatggtcaccagggcggccttggcgcgatccaccacgtcatagagcctcgcgaaagctgaggctcttcagggggtacatactgaggcggtgggggtacgaacgctgccggccgtgccatctcggccggttgggaataccggaaacgcgcccacatcacccccgtctgcggttgtgcgtgtgcacggctcggtgcgcgcgaaacggaggcttttataatgggttatggcgagagatttttaggtaaaaatatgttaaatgtaattatagtataaatatagtgtaattacatactaactatgtttttaatagatcacatcgttgacttttgaagatatgtttaatcaattcgtcttattaaaaattttatgcaaatgtataagatataaataatgtttaaaatactttcaatgataaaataactcgcaacataataaattataattacgtaatttttttattaagacgaatgataaatgtatggcaaaaagtcagcggcgtcttctattaaaaaacggaaataatatatatgtaatttagcttcttagggcatccacaatatagtctaaaagtggtccataagcaatacaatatttgtttcagccacctagcaatattgtggaactagtccatagcaaagaaataacaaaaactacccataagcatataagcatatgggctaccttccatactcgtaaaggaagtcgtttaggataatgtttaagtcaaacattgggaatataaatcatgaataactctcaagttgttgagtttaaaaatgtaaaaaatatatgaatagatttgtcttaaaacatactttcataaaagtatacatatatcactttttaataaatatttttatagaaacaagaagtcaaagttgtattttggagactgtgtcgctgtccaaaacgacttcctttatgagtacagagggagtattatttgtctctgtcctatctatatggattattttgatatatacattgttgttgccattacaatataaatacacgctgatacctttttcatgaaaaatttgatgacacagaagtccgtttgtaagctctcactccttctgtctcgctgagctgggctggcggttttctcctcaactatgcggcgcgtcatgcctctgtttccgcgcgaaaacagagtgcaagttgccacgggctgcacacgaaagcggagacgaccactcggttttggaggtgggaacagcagagacccactggaggcatccaccaatctgtggtgttggtaacaccgtaagtactcctacgtaacaatgacagaaatgagcgtggcaaatccgtgggccgaacggctggagatggcagcacggaccgggacttgtgctatcatccaaagtctaggtttaatgtgttggcaagtgtgtataggaatgaacagttgtcgctgtccagaacaatgagttgacgttcacttttcaagacattaaacgtgtaatgagtaatcagggcgctctatcgtgcgagggttaagtattaacaagtcaaattcaatgatgaccttcatcaacgttaaaaactggataagttaactagctggccattgtcagcccagcagttgtgccagtagatcagatactgccaatatgtagaagcgtgtgtttatactacgtcgtacaattgctcgtatatatatatcttgagcagcccatcgttttacaatttaatatgttgatgaagtacaatactctctcaatcctaatataaatataactttgtattgatgtgactgtatgctcagatttataactatagaatataccatatttgtacaaggtaaggtttcacttgtattgagacggagggagttggagggagtagagttcaactactttagtaggtaaaactataagaataatatgtaggcctagaatgagataagttcatggggaaggattgggatcctttgcattagagtacaaaaatttgcaccatccattcacaatcaattcactaaacgaagcattttcgagacttccgcgaaagtcttcttttagcttgagttcatcggcctgttggcgtcccattttttttccgcttattactatcttctgaattaggtagagtgggagcactcgacgaggcatctacgacagtagaggctcttcctcgtttttggccggacaattctataaatagaatcaaaaaccagaagaattgtgagaaataaatcaatttattaagttgagacacatcgagggataaaacatttcatactatcataagttgattccatttacaattgaatttttttttctttttatgtgagtaaattttattttgggccatgtatttttacccatgttgcagcttgggctaggttttagctgagtttttcaccttggatcacttaatataaccatttgtttcatcctggaccatagccgctcatcttctccgagtccaacaggcgataacccatcaccaacgtgcccatccgaacaagcgttggcggcagcggcggttactgatgcgcttatttgatttgatcacaacacattagcttggttgctccatgctccacaatcccagccggccagccaagttacacctacaaccaaatgggcaatggaacatggcttccgttcactgaagcaacaaaaattgatgcaacatcattaaaattagaacaactcaaaccatgcatttgtgttgcctctgtccctaatgtaagcatcaacaaattactagttgctatttgaatcgattcccttgcctcgcctcgctgttgtcgccgatccgccatgagctcgccggcctcgccctcgtcgacggctggcgtagtgcatctcgacaacacggcagctgagagggacgtgatctagcaagccaaaatggccctcatggcctagagctaacctgccgtcggctgaacggagaagtgcgccgcagtgcgaatcagctgtgcgttgctgctaaactcccctcggataggactaggagctattggcattaatcaagcacttatccccttgtgctcaccacatcctcctcccatcgatggcccaaaatgctattcatgatgatagtgatagcaactcaagcagtactaacgcactgcccctggtccaaactgctatattttgataaagttagatggtgttaagtgaaaagattggtaaatccctggtgcattgtacaactaggctaataaaaaggggtccaagataaaccgaatcgaacaccgaagaaaaaaaaccgatatttaggttcggtcctttgattttcgttttgtttttatttggcccaccacaagtcaatcgcgcccctttcttctccccaaagaagcacaagaagaggaagagcttggcgacgatggcgagcggcagcatcgtgaagaaggaggtcggcgagaaccacgacgtgctccgcttcggcttcaacaacagcgtcaagggcgacctcgcgccgcagcacccgatccaggccaccgtccacaaggtacccgtcgctgcttcccctctcctcgccccctcgaaaaccctaacgcgctgaatccgggtgattggtggtggggcttgcccgcgcgcaggaggccaagttctgggcggataagaagaggttcggggcggaagccatctacggatccgctttcaacatccgcaaggatctcgatgcccaaatcctctccaagtaatttcactatcctatccccccatatgatttcgctgggaaaacgatttgttcgagtaaataatcactgcggttcatgttaacattagataactgtgtcggtattacatagcatatattggaattgttagggtcaatgacattttgggtggaattcctcaactcaaatggccttattgtgggacgagatatgtttctttgaatttgatgatggcatgtattccccctgtgtttgtctgttagataaccctcgcagtacataaaaaaaaacctcgcatttacataattttctgtaggcttcaattaaaaaataaactcaaggtctcgaaggatcaaattaaatatgtacaaatgaaaaaccccaaacaaccagatgttgcgtaatcattagcatgcaaatcaaacaggaaattaggggatttcgtgggttagggaaaataatctcacccgatcgctcgctggctcattgttgcttctcatgagacaccagccatcgcacttgctgtgtttgtgcgtctacccgaggacagtacaaggcaaagagacaaaccaacaaacaagttagtttcaggttgcgataacaggcatgttagctgctgttgtgtcgggtactcggatgttgtttatgggttgagcaagagagcaaataatggaccaattatgtctgagtattggtgtcaaaagacaaggttctctggtgtcacccatgagagaatagaatagagcacttggaacaggccaaagccattggtatcatgtgacaccactgctataacgttggatccacccctattttgtgtgtctagttgtaaatccgttagctctttgcatttactgcaactattttgctcttattgtcgtatgcatcaagtgtcagtgatgttatgttttgtggtcatcagcggtattctgctaactgttactccctccattctaaaatataagtcacaaccacctttaacctaaagaccaaaaaacaataatcacctcattgtttgaatcatcataataaatactaatgcatgcaccctatagaattagagatcttgagggtgaaggatttaagaaataataatttagtggagaggaggtgctagttaacagcctcatcttttggcttatgcttatgtttataagccaaaaattgaattttcaaccttaaatttggaattgattttggggttttttcatcatagtttattttccagcctttgtcttttagatcgctaaaaacacggatataaaaaatttatttgcaaattattttctgtttacaaatatgccgtttcacttattctgtcaataagcgaaacgatgggggtcctaatttcaatgcatgcatgcacaccttgtattatgaaacgtgaaaaaaagtagttgtgccgtatattttggaatggaggtagtagtttgcaagttatttctgaaatttgttctcgtggctatgtgcagtattttgagcactgtttttaaggtgtttaattaggtcctgtttcttcaagagcatttccacaaatcaaatattaggactgctaagaatgtattaatgctttgagtatgctaacatggatggaatgtctggattccttggtctggtgaatacacaatcatatcttgaggttgctcttgtttgtctctccgtctctccgatgtagtaacaactaacaactagcacatcagcgcaactgtgcaaataagggaaaacagcgtgcgcaactcatgcccaggctaacattaaagatgttttggttgatgatttatctgtttgcaggttccaaaggccccctggtgcattgccatcatctatgctaggatacgaggcgctgactggttccttggatgatttcgggtttgaagattatctcaactgtaaggcttgttgtcctttgatttcctatgaatcttcttgctggcctttcacatttacgtgcaactatttgctcaccaacttttgctgatttattagctgcatgtttgatgcttatgttcttcattggaattatggaatccagtgctatcaagttctcattacctttatattaattctagtttttttattttagtagaccaaaaccatgtagtcttatgattccttgggagtttagaagttcttgggaaaccaagggtcatgaaatgatacttgtttttcatttttcatacttctagtcggtacatcttgataaaattttgctattaggatatacttggaggaatgtataataattatcacaaagtggttattttattctgtcctcatgatatgatatattaacagcaaagtacatattttgctttgtcatccaagcttggttggccttactttgcatggcaaaacatacatctcatcaccattttcagtgatgagatgtatcaccagaaatacagcctctatagactatatatatttcagtcccacttctgccctgggaacattttttttttcttatttacactcgctgagtgttcttcctgttgttggaaatgttacttagccttgtgttaattttctttttactttggatcatgttgcagtgccccaagattctgacagcttccatgctccagacatgcaccacggaatggaggttctccttggtttgtcaaagggaccgatttgccctagtttcaattgatttcacaaaatgtatttctcgtcttgcactgttctcctcattcaatatctatgtcgctctttagactgagatttcgatgcttgttttggttcataaccacacttgtgacgagattccttatccatcatgtagacctcacatgtcattgagataaaagagtgtgacaagagtgtctcattctagctaaagtgtggctccaattttgttagccacacattaggcaagttggtcaaaacattgtgtcaaccttgcataaatagaaatactcaaccaaacagtccattacgcttatacaccgtcaaatcaaaatgggacagtttcagacttggccgtggcttccatccatcgtcaatgcttcaagtgtggggacttcttcaacagccccatccattgtcgtaccatgtggttgatctaatataaaggcattccgagttgagctatttaaacaacccaactaaaatagtactccctccatctacttttgatagacatatttccaaatctgaaaaatttacttttgatagccatatttcaattcaatcatctatcctcttaatgactttctatgatttaatgcgtgactctccattcttccacacaagattggctacatgggcatcgagaaatgtaaatattaatgaatcgcttgtttacgaggaataattagtagcatgtttaaatggatgataagtagaattatttttccttggtcattgtgtcaagataaaatatgactatcaaaagtagatggagggaatagtattggtaaatctctctctgcgagtaaagttcggcggcatgagttcttgctttctttggaccctcgttggtacatgcaaatacagagcagcgagtaatgcaattctcgttccctcattgcatgaactacgttccaaaatcatctcgatcggtgcaggtgtaggcctaacctttctgaaaaatcatttgcgtctctgaaatactccactccaggcagcacccggcaaatgctagttaggtccatcatagttttcacttgaaaagaagcctgccgaaggttccaataatttgaacaagcaaacagaacactggaattgcatgtatgtctcaaaatcgcagagtattgactcctttttcggacacgttttatttgtcagttgcgactaaaaaggacacatagaagaatggatgtgctaaaaatgatcgtccgtcatatgaaagatacatttaatgtgaagagcacttggggcacattgagttgtttagagattttgcataacacaaggaaatatttagtggaaatcatcaaataaatgaaaacccatgaaagccatacttacatattctctaaattcaagaaaaatttgctagagataggtatatgcaagaaatacattcataccagatctagaggcgatagtggaggccgcggggtgcggttgccaaatctagccccctctcgttcggatctggcttgtccggcgctggaggctgaccctcaagccaccgccagcggagaggtgacgacgcggacgtggaggtggcagggtgaggtaggaaggacgcgacgacacgccatcgatggagggcatgcccgcgcggtgccatcggtggagaagggaggaagtggggcaccggctaggagtggccagtggcggcggtaggctggcgtggtgatgctaggaggcccacccgatggtggtaggactatggaagtccaacgcggcgtggcgatgcaagaggtcgatgcaggcaggtcgatgcgggtggcaccagcggtagcagaaggctggcatggacggcatcgggaggttggcgcgacaacgacaaagaagccagcctgactgatggcgtgaaggtcgacgcacgcgccaacggcaaagaagctagcctgactgatggcatggaggtcaacacagtgatgacagggagtccaatgatggtggtgtgtgccactaggcatgctgagactgactgacggggggtgtcggtgcagcagtggccacgtgcctacgaaggatggccagtggtgaaggaatggagcatagctatggatcgataggggtgagaggtaggtgtaaaatctagcttggtcttaacggcctgggaaaaacacaagggttaacgtgctcaagtgaattaattatacttctatctctcgataattcaactgaactgttgtcttccttgtaaaatcaaacttagttatgctacttcctctatcttaaaatataaaaatctagtaccgaatgatatatttcctattgctatgaatatgtatctatagaaaatgtttcattcaaatttaggttattatattttaagacgtaggtgacatctaaataccgttagtatggatttattgcttgaagttgccaacgtgtggtacgtgtgtgccatatgcttacgtcctcgtctatttaggcgaacggaacagccaaaagaagcaaatggaagcccaaaatggaaggcagaaggaagattatacaaatccattgtgacttgggtttaatttgtgggagcgccggagtagcctgtcgatttcagtaatgccggccagggccagtgtgcactgtgcagcgatgaaactccatccatgggcgcggtcaaatccgggggggagagagagagagagggaatgggaatgcgtttacttggccgggacacgacgtgcagcctcgtccacgtacacgcgagcaaagcagtgaaatcgcccgccgcgacaacgagtggatcggaggggagccaactgtgaagtactagtactactaagtgcggtacacatgtactacctgccaggccgcgactctctccttttttttaaaaaaaaattacacaactacaacaacacacgcgcactcacctttataaacacacgcacgcaaaacctacccctatgaatatctttgaagactagaccatcaaatccttaagattgacgaagtcactacagacatctcgctattgacgggtacgtcgcctaccactaaaagcacaactccgataaatctagaaaatttgctaccatggaagttaaacccagtacctataagatatacaggttttttcgcgccgcgactctctccttggcaaaagccggcgcttgtatgcatgacacgcgtttgtgacagcttacccaagtctaagtacgtctttgtgccctctttgactagttcaatattctctccgttctaaaaaaagacaaaccctgggttttcgtgtccaacgtttgactgttcgtcttatatgaaattattttataattagtatttttattattgttagatgataaaacatgattaatactttatgcgtgacttgtttttttaattttttttcatattttttttcaaataagacggacggtcaaacgtttgatacggaaacctaagtttgtctttttttttttgacagagggagtattgaacagttctcatttccatacttgttatcgtgcaaaagaacttttcgcacttctaatcactagtttagtattcagaagtttggaataaattgaatttaagcttattaataaatatgaaaattagaattcttagacgtatgtactttgcttctaagttacacacaaaatatatcttaatgttttttattatattatattttgtggatttgatttttttggaattactcaatacaagattgtcatgtggagtcttaataactattattgttttattggctgtttttaaaatactccctctatttcaaaatacaagcatgtctaatttgtttaatagaaattaaggtttaatacaaaatactttgatgcccctcatgaatggttggggtgagagggtatttaaaggtaagctgggaagaaatttaaatgatagatgattgatggaataaatagtaatccgaacagtattagaattgtttatatttgataaatttaaaatgtgataagtgtttatatttttgaacagatgatgttagaaccaatatatacataaaaaaagtttctaggatatgattttaacaaatgattcattttaagaagtttgttttttcttggatgaaggggtagttaccatttactagagtttggattttctttttcatgttcaatatttacattactgatagtgtgagatggaatcttcatttatttttatgttgtgttcgaatgtgtcggttcggaacatatttctccaacatgaaaaatgagataggttgttagcacatgattaattgtattaaaacaacttaaatataatttttcaaaacaaatttcctaaaagatgtataaaaacacatcgtttagctggaaagtgtacagccaaaaacttgagagcagaagttgagaaaggagacatttgaacgcagccttggtctccttggacaaatggccagatttactcaattttattcgattaacgtggacgttttaggaaatataagcatggatattatgcatataatgattggaatcagtccgctggctggcaggctgatggtggaacagtgactggattcatctacagaaagaaaattcaagatttaacaatcaccaattttattctaaataacattcattttatgagacggagaagaaatatcccgcagatgcacacctgggcaccaccggaatctccgtcccccgctccggggcgcttcactcccgtgccgcactggcccagccgcctgagacgacgtgaaccgtcgcccgagttccacacgcccaccccatccacaataatatatccaatccacccatccatcctgggagaaaattggagttgggacgcgagattctcaggcgagcacacgatctcgcggcgcgctcacgtccacgccctcgcatccacaagcgccgcggttaaaaaaccacgaggcatccccctccccctcccccgcctcctccgcggccaccacccgcccccgtcgtgctcggcgccgtcgctgctccgcctgaccaggtcgtcgcggaggctacggctgcgcgccgcggcggcggcggcggaggaggccgacgtgctccccgggcctggggccgagggggagatggcggcgggcgggaggctggaggagcagcccgaggggccgatcgggggcagccaggtcgacatcggcgggctcgccttccagggcgacatgggcggaggagggttcgccggcgggagcgggggcgccggggccggcggcggggacggcaacaagatgctcgaccgcggcatcaacacggccatcgtgctcggcgccagcacctacgccctcaccaagctcctcaccgtcgaccacgactactggcatgtacgggaacctttgtcgattccccccaaatcgttttgttccattttgtcttctcttctctgtgctgttcttgatttgattcgattcgaagctaacatcgttccgggcgggctgttgttcatgattggattgggtgcagggatggacgatctttgagatcttgcggtacatgcccgagcacaactggtcggcttacgaggaggccctcaagaccaacccggtgctcctcggcgactggattgcgcaggtgtgcaaacgctttaattttcctcttatttagagtaatagcttttatgcagctgcgcttgcatatttgctgattctgttgctgttgatgcttgcagtgctacgaaggcaagccgatcttcgagttcgaccgtgctcggatgttccggtctggcctcgtcgggttcacgcttcacgggtccctttcacattactactaccatttctgcgaggtaaacatcgtggtcttccatgctctactgcctaaagctttgtgtcatgttcatatatggtgaatgatatgaagccaactgtttttcttggctcaggcactgtttccattcaaggattggtgggttgttcccgcaaaggttgtgttcgatcagacggcctggtctgcgatatggaacagtatctacttcgtggtcttggggttccttcgtttggaatcaccggccactatttccagtgagctcaaatccacgttttggcccatgcttactgaaagcactgatatttcctttgttataataatgccttaattgagttcccatattctatattcttcttttttttttaagaattgaaagtttatgaaaaagctgtagttgtgcagttgatttgttgtcttcagtgttcttgacagcaaaaccattgcctgtggtcatggtttttggtactatgatccttaatttgttgaagggattcgatgaattcattgctctgtatacaagtaaattttttaggttaatattaacattttgtcctccaattattcttgccacatctattttctcaaagttttaggtctagaagccactattattgaattaaactagtataaaattacaacaaagctatgagaagtcattcaaattttgaactttttaatgttcaaataattattcaattttcccttctaataattccatccataatctttctataatcactgaattatttcttaatttcaaaacggtttttacagtgttttactgctaacagagaccttatgctgggtttcaattattattataggccggctggaagttgtggccttttgcacacttggttacatatggcctagttcctgttgaacaaagacttctgtgggttgactgcgtggagttaatctgggttacaatactgtcaacgtaagcccaaacatgtcaatttcactttattactacggcagcctgattaaatcgcgaaagataaaaagagttcttcatttcttataacaagagttcttcatttcttgtttggcagttactccaacgagaaatctgaagcaaggaactccgaggacgcatccacatcaaatgcttccaatgtatggaacagtttaattaaaaattcattctgtcagacatgttatcgttcgttctaacacccaaaattcattgcctcttctacaggacaattcaatatagcgaacggtatagccagccaagctgccctttaccttcatcattttgggcttgtatatattgtacaatttgtagctgcagctctgcaggtgtaacctttttgcaaagatatattaaacatataagatgtgtagcaactgccaaaggcaatcagaacgaaattaccttgcactggatcaactgttgacgagattatgagctatgcaattttggtagctattcttttgatctttgaaaccccttttcagtgaaatcaaccgtcttgcattgaaccttatatgatcgacaacgcaagcaaggagcaaaacctatacaatattttggggtggttacaatttacacagtattctatagacgctagcaaacaaacagcttgctcatcatcagacagaacatcttaaaacaagttttcccttgatgcgaacaaaatgctgtctgtacattttttcgtttttgctggcatgctttctgtacaatctgatgctatgagtaatatacaactaatgctactatttcgaggaaaaaaaaactactgcatggcatgggcaggtgtgctatgcccgtatttgtaatttacaaaattgcgatacttgtaagtttgaagcatgaaaacctaccagaattcatgaggccgttcacacgcatcgtttgcgagcacacaaaaaggagcatttccaaattacatgtatgaatccaaccaaaacttttctattgtgcgcaactatctatatcaattgttagctactgttgcacgcttaaatagttaagcatcactatactgcagcagcctctgtatctttgtgaccagcaatcagatctttaagcacagcctttgatgccaactttttcgccaacttgcagggacctgattttgttgcggagtatgtagtctctccagccttcacccgagcaatgaccgatgagactccatcaacatggtttttttcgtaggttattttgaatgatctacgatcacaaaattcttgcagccctttcaccgggtcaggctcgatggtttcgggggtggcaagaggttccaatagccgcttcatgcttctccaaacaacctccttgtcacacttgctgtcgagataaattgcaccagctattgattcaatcacatccccgagaacctgtttgtttgcaagtaaagcaatagatccagcttaagctattcgatggaaaatattacagaagtgcacaaaaataggttagtccaaacatataattctcctattccagtttacagtcagactaaagacattttgtggtcgtcatgctgtgatgcactatgcatcggaacctagttaagactatctttagttctttttataaattctctagcaactctttaatccaaactagaaataatggatctgatgcctggttaaattttgatgtcatcactatatggcatagactataatgtatccgaggtaatggtagagacctaggaatactgagtaatgactaataagatttaaaataaaagacaaacaaattaactgatcaaattttaccataccagctaggtgcattttcttttgcagaaaaagagaaacaaactctgctatcagactttcagaatatatgcaatatagccacctacaccaattacaccgtagagaatacacacctttggtagaccaatgcccgcttcccagccataagatggacctgtaaatgactgcccaaggtagtagctcatcttcctatgcagttctgatgatgagtgaaggatatgcttgtttaatcctgatttaacagctgcatgcgcgtaacaattgttgttcacagaggcagatctaagatctgtcaacaattctggagtacagtcagggtatttgctgtagtaatattcagtgaaaagatgatccaaaatagcatctccaagaaactcgagcctctgcaagggacacaaacttgtcattcaactcaaaaaagatcccaaactaacaacagctacttgagaagtttgattcagataaaaaagaagctagacaaaaaggcaaaggcctcatcaaaaatcctaagccttcagagcttcaagccgatgcatgaggccatcaacggtcaccgcagtatgaggaaggttctccaaagcagcagcgcacccatggaggatgtgacgtgtaaacgccaccaccactcggcgtaagctgaagcaaggttttcacctggagatcagtatgggctaggtggaactacaccataacggcgcctccaaggaggggaacagtgcccaaaggcgacgctgtcattcaaccagccaatggctcaacaaggttttcaccagttgattctccatccagcccacacaaccaatccgcagcacaatggcagtcgccggatcaccacaccatccctctagcaaccatgcccatgcatagcccgacagctcaggcatgctcataggactaccccgtttccggccacgccatcgacatctcctgatgatagccacaacttccaccctccaatcaaagctccccatgaccaaaactacagtctccagccatagaaggggaggagctccaagaagaggaagatgcttggccggcaaaaatggaagacacgccgtcaccactacccagctgcttcttgatcatcgcagatgcccagctttggtcgttgtcgtacctcgcacctccaccctgttgccaccatccatgcaccacaaggagctccaaaacgtccaagcggttgggaggagtcctctcgctgctcggatgctagcacgccccgtggctcggatccctacccctagcgaggacgcaccagatccagtcgctcaccgcggcagggctgcggtcgccgttgatgccaacttgaatagccaggaacacagcctcaaccaccgcccacgcggcccacttttgcgactaggacgaccgccaaacgcccatgcagctgctctgccgactgcactcgagcaatcaccacagcgttccggcggatccaacccagaagccccgcatcctgcctaaccggtgccagccactgttgcagcctctcctagcgctgccggctttggctaccatccaaagccgtcccaccgctgccgtagcaaccaacgtcacgcttagatctagctgccatccatcgtccgtgcgagagcccaaggaaaggaggcccgccgccacacggtttccggcagccagctccagcggcggcaaggggtgggaaggaaggaggtggggtagggccggcggctggaagcgccgcccgagtcgctgaaggagcgaggctagtccttcagttttcaggtttcagataattctacagcaagttaaactcaaaaggaaatgaaacatatagaggattgctaacatagaaaaaaaatgttgttgcaatactgtttaatcatttgcactttgttgagtaaagatcaaaaggcataataaagccgtgacacatactaaatagagatgatagatgcttttatatcaacctgatagcatgaagtagggccagaagtctgatatgagccatgtgtcaatgcttcgagcaataataaagaatcattgaacttgtaaccaagcattccctctaagctcctcacatcaatgaactcttcagctttcattgaaattttcctttcaactggaatttcagtgtgaaattctatattcatccctaatgatttcatcaaaagaaatgctgccttttccccagcagtactgaggtaagccccaattaaggcctcaactgaatccgcaatcctcttacttttaatagacattttcctttggctgtacataccattgggtgccagaaaggaaatttttttgttaccacgctcatcatagtccaagcaagggatgatccaatctcttggattaaactcctcagcatgaatgtaaccctgccaaccaaacataaagggcaagagtatcatctagtaccagtgataaaagacagataagtcttctttgaaacatgaaaaggtgaatagaaatattttatggtacttgaaaaataacacaattcattttgtgatgaacaaatttgtatgcaaagcattattttatttcatgacatagccctagccacatagcaccagaaacaaaaattagacctttaaaattgattggctgaaaggattacaagtcggttgagcggattaaagaaagctatttactatctcactgcacacgccgaagatagaatccgtttcaaggataggcagatgctaccattcttcccgccattcttgcttgccaggcaaagtaccgctgcttcaacggtcatgaaagcagaccacgtcaagccaacctcagatctgactacaggtgccatgtgacctgagggctaggtgttggcccaacaaggagtaatatggtctgagccacagccttgtattaacttagggtcagcaccacaaggttttggtcacctacaatagtctatattggcaacttggcaaacaattcaatgcaacaatagagttcccattttcctaaaaaggaaatatgtggaacattgcctaattgtgatatagcagttgcacaaaagaattgaaataggctgacatggtatgaaagatactgggagatgtaggactattaatattgcataaaattagcaaggatgtgcatgtaatcagttctgtagtgtgtaggtgtgtgtttctaaggtccttttacccttctttaacgcaatgatatgcagctgtcctgcgtgttcgataaaaaaaatttctacatgcctagctcaataagaaaaatacagttagcaacaggatctagagtaccacaagattactgctgcaggccagctggcacagagctgcattggagatcaagtttttcttcatttttgttaatatgccttcatgttgaagcctgtattcactaaaaaggtgccgagttgtaacatatttgaggaaagaatccccaagtgtttctaatgattcctgtgaaaattcttcttggcatttctttgttgttaatgcttccaggatctgcaactcatgaaaaaaatgcagagaaatacacatgtaagaaatatgcataggggaagtaatttattcaggtaacaagtaagaaaattcagattgacatgtacattgttaacagtggggcatccaaaatattaattagaaccataaaatactccacggattcaaatattcttatatcttatttttacaatataggaccatcaatccatacatggttctatagagtacaacacaccatcaagcacctccattggagtgttaatgaataatgcagacagctttttgtatgtgcttatatagttacattacgcattaattgaaggtatttatatgcataagaagttattaagtaccactgcctcatcaattgctacaaaaataaccaacttctacatggcaacaaaaggaattatttctttgctaagtgtccccgaaatatcttgcattatacatgacttaagacctgtcatgtttgcaagtagaaggaaccaaaacttatgtttgcctcattaatagatagtcacttcgaagtgctgaacatattcttactaaggcactgttgctgcattaaacaactaaaaaaatcagaacctttagttttcactgtcaaatgtcatcactcttcctacaacacctactggtgtgcccaagaatgcacttatatccatttttattttaaattcttcaaaaaataagggaaatatgagttttcttatatgacgacatctagttgatctaggtacttcaataattcataaatag

SEQ ID NO: 9771 - DNA, 78482 bp, Oryza sativa
ttcgagagcttcaatgaggagtagcttggtctcactttcatcggcatcacgcctcaccttgtctaactgctcttggaacttgttgatgcgctcctggatgaagccctccaggtcggtcatcttcttatatttgtccagctgtggcaaggtcttgaagcgctcgagaactctcatcacctccgactccgacggccaaaccaccgttgcttgcgcctcaccctcaccatacaccatgaggcatgtgtccacattgcatagtgttgccagctcgcttgccttcttcatcaagcccttgagccgcttcttgaatgttgcccgccgcttcgcatcattgatgatccgctgcagcttcaccttgttgcgagccatggccttcacgattcaccactttcttgcaagaatgcacctgtagattgatgagaaatggttagattgatatgagatcaaagaaagaggaatatggtgcttttatagtggaagatcagatcgcaacaatcagcaagttgtggaaagaaattatttacagatccaagaatatcaaatgaatcaatgcgagttaatgttttcctgataaaaatgcctggttaatatgcagctggctagcatacttgtcgacctttaatcgtgtctgtctttggaaacttcattgcaaggatgagctagcaacagccaataggcattactcgctagatgataacgtgttcacaccaaagatgttaatctaataaggtgcttaatatgggtccagttcaacagatatttataagctcatcctatttcatacacataataggattgaagtataatagtcaagatttttaaaatttgcttagaattaagtacatggtgtgttggaggtaggccatgaggcccttcagccgacacgccgaagcagatggtaacgaagaacggtggagcacgacaaagcatagtgaaacactatggagttgggaaaacccgcggagtccaaggccgacaacctaatagtggacacctgtggagaggacaataaaagctacctaaaaagacccctgagaaagggccagcccaatagttgacccgtatccgctcagtaggttgagaaggtgggctaaagacaagaatatccctataaacatccatatcaatgggacaggaatgtaaaagcctatctaagccaaaccccagggtttgttgttaggcttgtaaatctataaatagcccgtaagaggaatttttctttgataaataggaaacttaagattaagatgctctaaaatggaaacgagagaatgaattcgagggattttgtagttcattaatcaaggcttggcagaagagcttgagaagtttccaacaattaaagatccagatcacggaatggatacgaaatctagtggcggcaagtaagatagggaaacagaaactattgtttttggtgaattattagtgtgcagatgaatttcatccactactattgaagaagcttttaactgtaagacgaattccaaaaaaaatgatacatacctcattgttttcgtactttccattaggacaagtgttcgtctttggacaacagctagcgccgtcgtcgggaaccgagcaaaagtcaatgccacccaagagaaggttgactaggaggaaaacggttccacagagcatcgcaggaactaccgaaggtgacgccgaagatggtgccaaagctgaagtccaaggggttcccgtcgaagctcagcctgagagtctttaggctcaggcatgtaggcttcagggggcgacgaagttgaggaccagtgagtgatgcctagcacggtttaaacaacatcggtcccaaggctggagtatgaggcagtgaagcaaaaacatggctaggctgtaggaaattcttcgccagatgcagcaacaacacacaacaacaacaacaacaacaacaagaagcggccatgcaggcaagagttggtgttgtgacgtgcgtggccgtgctgaatgtgttctatccaccctccggccccaccgcacgcctaagattgttccaagtctcggtggccccgacccttctaggaggtttgggtgctacttcagtaacacaagcttcgacatcgcactgacgattggacgtcgggtcgacactccatgcacaattccaagtcttcctccagcaaatgaatgttagtcttccatagaatactcaagtaccaccacaagcagcaacacctatgtttatgccaattgttggaggagcaactcaatggctggtggcatggcaattgacggtcattaagtataaactttaaccatcaattcctgcataaaagatatcaaatgtactagcaaaacttagtggtaggagtttactactaacaacttccactagttttggtaaatatatgtatgcatgttatttaaggagaaaatacaccagacatacaaggattggagggcccacaagtcattcataaccgacttaaagtttgaccaaaccatcctcaactgcaataggggcccacctatcagagactttagaaaggtggtggctaggggaggcttgctgtcatgcccagaaatttagcccaaatttctagactattttgtgtattaaatccttgtccaggaccagccagggtacacaaaacaacaagtaatatacagttccaacgtaaataaaagcgtaaaatacttacagaagaggcgcttagtcctcacaccgaaagagaacgacagcagcggaaaaaggcgatcctagcggggcttcagctccactccacaggcaaaactcaactggggtctgagccttggccttctaacttcgtcttcagctcagaagcactacacttctgaaaaagggaaataatagcaaggcagagtacaaccaccgtactcagcaagccacaccaatgatgcagacgtgcaaggggatacaaggacggtttgtggctatttgcataaaggcggttgtaaaatattttattgagcaaaacagtaaaagtgttgagtaattaaagtaacattaaatctccactgatcaacgctacaccacgttgaacaggcccaaccaacccacatgaactacagtgcattgagtcgatttattaaggtgggactaatcacggtgaatctggtcgaccgcccataaccgtgggcacggctattcaaatagttttactctggccagaggtgtacaactgtacccacaagacacagccccacgacacgtttccgtgtgccgacatgccaccatgacatatcggaaagaggccgtgacaggacccttcgcataaccccctctaaccaagcacaccacacctcaggtttcacccccactcctcgcaaggcagcgggcaatcccctctcgtacctaggtgaatccggaagccgcataggccgtcgcagggcccatccaaactccatcacgcccacccttgcttggatgcgtcagctagaggaaagctacactacaagcccagccgttgcccacgctggcttgtggaaagtacgaggaaatcttccagggtttcccgcgaaccggtccttaactgccatgggtgcgactagcaaaaccatgcacccacagcccacaattcagtcgcattttagttggataattacgaccactgaaacatggccgggtgtctcgagcacgcagctcgttctgatgctaaaaaggtctaatactgcaattatcccatcaactgagctagtggtaattaagcatggctaagcatatagttctagctaggtcatcaaagtaacacaagctagtcgatttatcacccaaggttgacaaaggacatatatcaaataaacatggcacacacgagcagataggtaaaccctattcccatgtaattagcgaaacgatgcatatttatttgcaaacaataaaacatttataaattgggatcaacatgctcaaggggaatgtgtgacttgccttgcttcttcaaacaatcttctgaactcttttcctcgcaaccgcggacttccgaaacgacagattctacacgctggcatgcaaaatgaggaaaaactctaataaacaccaagcaaacattacataaaaagtaaacaaacaagtagagatcaattttagatgaattttgcaagttgaacggctcaattcagagttcgaatgaattagttatgaattttcgaagttttgagccatttaaatgaatttctagaattaaatacgatttatgacgcaattgttaattattctttcaaaggaaaaaggccgtcgctgacgtcatcaaagaggtcggcgccgacaggagggccccatgagtcagcggcgcaagaggagcggcccacggtggactcggtccaccgtggcacaggcgcgggcgcaccacgtggacggccatgtggcggccacggtggacaggcggcaaaggtggtgtcgacgtggcgccacgagggcaccgatgcggggcggcgccgaacggccatgtggacgacccagattcacccggggtgaatcaggcggccacaggcaggcgggagccggctcgccgaccggccggccgggaagcggcggcgtgcggcccgatggtcaccggcggcttccaccggcacggcggcatgtgcgagagagcggcgggaaaggggagggggagtagcacacggcggaaggaggtggccgtcggcgagatggcaacgggaggcggcgacggcggagctcggggcggacgaagacgacgatgctccggtgacgggcggcgctcgggaagaggcggacgagcagcagctgcatcctaggatgggaggggaggtgttagggaggacggggcggcgacatggcctgccggagcggaaaggaagggaggaagggctcaccggcacacgggaaaacggacgtccagtgagtttccggcgatgggaagaggtggccgaggttctcctcgtccttgtggagcagagggaggtgacggcgtgggtcggcatggaccgaagcggcgttgcgacgcggctggaggtggcaatggcgacggagagaggtggtgcacgtggcggcggcgttccggaggtggaatgggaaaatggagtaggggtcagggtggagatcgacacggcgatgccgatggtggtgtcgacgcggcttggtggtggctagtgcggcgggagacggcggctggagcacgccggtgagtggtggggagagggagcgccgtggggaggtggtttcggtgacacaatggggaagcggaggggatgctggggtatggcacgacgcggcgaagccgctggtggcggtcgcgcggagcggcggcggcaggagcagcggtggcggcaggctggaggatcgccggcgagcggcggcgagaggtgcgacggtggcgttgtggttttcgtgcatgggagggctcgggagagaggggaaaatggagagggaggtgcggggaatgtttttataggggagggtaggtcggaccgagcccgggagaggcggagtcggggcggcaaccgccggcggcgtgggcggcatcgtggggtgtgggtggcggttttggaggggagagatgggcgatgaggaggacgtggggcggcggggtcccacggccagtggactcgcgcgcggggtggagaaggagggcggaaacggcggcgtcgtggggaggctcgggtggccatggcggcggttggagccggaggaaggggatgacaggtggggccgccggtcccacctgtcggcgaagggagagaggaagggatgcaaagcagactttttgcgagggaggataggagggaggccgagcgggccgagggaggggaaagagaggctggcctggccgggaaagaggagggagggagttgggccgagcctaaaaagggaggaaagggatttaatttggtttttctttttctttaaatgagtttaatgaactttgtgactttaaaattacttcttgagctccgaaacttcacgggaaaatttcagagaatatttagggcccaaagaatattacaaaatattttcggccaatgattttttttaagggaaaattttaattctcccattatttcacttgattaagttactttaacttttatttaatttctagaaaatgcattattaattgatttttaatcccgaccgaaaattggggcgttacacttgcctggttcggtcgaaccagccttggagcccccggctcccaccttgcacgtggcagttccccattggtcctcaatgacgattaaggggtgttaccgacttttccaaccgcctacagccgtcattgacacactataaaaggaggtcctcactcacttggaagaacacacaactttgggctcaagtagagtactattcacttgtagtttcatatttagtctgtgaagggatgctccagaaggagtgccccgcaatttcgtagttcctcagagaattttacggaggagtgccagagtgtcgacattctcccaacggagttccggagaaagccaagattgtcaaccttcctctctcacttgtacctcagcggatgcttcctttatcaaagtaagtgttcaagtttctttatgttatttaattagtttatttaagtaagatatattctcatcggtgtgggttcgtcacttagtgtgcaactaaatgctctagtactaggactctggatgaagaaggaagtttctgcgcaagactagagtagtaattaataacttaggcttggtgtctaggttagaaattacctttgtttattgtgtgctccacggaaagtgaggtaggtggcaggtggtgacagccctatcaggccttcgtatttctccacattcgggtacatcatagagctaaagggtggactcagcttggcagtcctaggggggctgatgcccaaagcattcgatagagttttacattttacttaattaactaactaaaagacatacgaatcctctctagccaatttatcctaggctgttgttcttggattgaatcctgatcgtagataatacacacacgttcctcgtgttcaatacccttggaatactctaagggtaagtgttacaacagtatttcgtgtgcctgcagatttatttgttattgtaagaaatacgaaaattggccactggtggcagtggtgatcgcttcgccccatcttcaccgtgcatacgttgtgctctagccagccaccccagcggtgtaagtagctttggccgaaatcacccccacacacaaccacaatccatgatgccaccgccagcggttgcctttgtccaagctcaagtacaagcacaagtaccgacataaccgttcgtgccgcctgatgccctaggctttcgctcaagcatagacaacaaaaagatgttacctctgagttggagattacacaacaaccccataccaccttaattcatagaacccaacgattgccatgtacactggcaactttgactcaagtaaattcttgtcattttatgagttgacgtttgaagcaacacacggtgatgagaacaccaaggcgaaggtgattcacctggttctagacggttttgctaggtcatggtagctcaaccttcccccaagcagcatttactcatgggaacaatcgaggggcgttcccatcaccaactttagaggaactaataaaggataaaaaaaatgtaaaaagagctcttcggcatctggcagaagccaagctagtcagcttgtgaatttgtccgaaggttctcatatgcaaggtgcaagttcaaaacaccatcgtaacttcggtcatcaacgcggattcgacaaggcttcgcacaaggccgatcactgagaaaatcatgaggaaggagaagaaaatgcttgactacctctttcgcattactgaggattatgcatgagggaaagaagatacaaagcacagaagtgaaattcaagccaagtatgaccgagccacaaggcaggacggaagcctgagtcactaaaatagtcgcaccagttaacccaccacgataaactctgccacaactgtcatggaagaaatttcagaatgacaaggggaagcaagtgatgacggtcaaggaggtccaagcctcgcgcatgaactttcatgcaaggaaatgaagcgaacaggctcccgccaagaagaaaaagtgcagcatagataaatattgcttgtagcacgataaattcacacactcaatggataagtgccgaaatttgcagcagctgagccaaggatagtctcctcccctgaaccgccaatgggctgaagagggtgatcaaccgagagagcccgaaggccaatacaaattgaaggaaccgcagatggccacaaataatcatagcagtcatcacgagcggatatgccgaaggattcacaccaacgaggcaaaaagacgtacatgaccaggcgatgattcatattgctgcaaaccccaaaaccaaggtgccgcaatactgtaacaccccaatttcttttgaccccgaggatgcgaaggggatctttgttgctcaccaagacccatgcgttatcacgacgggtatttttgggtgtgaagttccgtgagtgctggttgaaggagggagttccatggacataacattttttgatatgtactgcaagatgggccctattggtattccttacattcatagttaaatccgcaagtgcacagatagcgttgtatcatttcacccttgagtattcccaagggtattatatttatatttccgcagggaaggcaacggtgtaaagatatagtttatacatcattaatcaatccataattaaattatcatagtctaaacaggggttaagatgaatatgatcaaggggtagtgtgacacacacaggagattcgcctttgattaattactatagtggaaagggcataagagaactagaatacaactgtgcttctatattaatcatgttttgtatatacttaatacatacatgttcaggctaggacttagttctagacacccaatactaccgagagatcactctctactggtctaccagcgtgcttatggcatttatgcactcttacgtcatatctaaacatggaggaatacaaaggacatacatggctatcagcacccgccgcctacctcacttttcgtgaggctaggccacccgcatccaacaacatttatctaacctaagcagcatgcttatgccaataaataatattactaactcccaaggggctcccacccttcggatggacaagttagagctagcaacttatcaaggcccttggagcgttaccgtagcatagatcgactaacctaatcaagtgaagcatataaatgaagtacatcatattcataaagcatataaatactaaaacaatatatcaattatgaacacaagaaggtaaagaagataattctattaattcgactatagtcttacaagaagagcaaaatagtaaaacataccagaatctccgagaagactataggaccgaagatactctaagcctactttcactaatattatagaagatacaatagagtacagagaatagctccttgaggtgtgacttgtgaagtgagagggctcctccttttatagctggtaatgatggttgcaatgttggttaaacacccatatcatcattaggagccaatggagagttgaaacgtgtaaggagatggcgaggtgggcttggcctgattcagccgaactagtggcaccgcctcttgctactgaccatctcccataggcttgcacggtgcatggtggattagcctccaattaagtcagtttgagctgacttctgggcccattaatccgtgtgcttgcacgtgattcaccacaggtgtgtttctttgcatgtttattctctgcatctatgttaattctccaagtatagtggaactacattatttattattgaactacgtgtaagaagtgctagttctccctttatttattatgataattggtggtcaaaattggtacttaacggtcatcaacaatagcctcaagctgaactttgctcctcctgagtaaagataaaacttaggttgttgatcatgtgttgctatcatgttttatttctcattagtacaatgcatacaacgtatccttctacctagaatttgaataagttggcaataatacttttacctttattacctatgggacttgtagcttctcctcatcttgggtggttgagagatagagcgaatcgtagagcatcaatcacttactcttttgttcaacttttctttctggaggttttcaagaacttttgcaattaaagccaaagttcctcaaatgatactctcgatcattcaatgtgtatgatactcctcaccaaggcatggtgttgcctctttatcatcctacttctaaaggtttctatgtggagctcaaagtagagacaaaagatgttggtaatacgtatcacatatattgcaaaatcaaagagaggatccaagctaggagaaagcaaatcatacaatcttgatcaagtgtgcaaagtgtgtagctatatggtggaagcccaaccttgctgcatggtggtgttgatgttcgctaattggtcgttgatgtgctactgtcatgtgtgggtctcctggacatgctggtttagcatgttgtgcatctcgctggtccggagattcaactctcccagttgccgagtgacatctgcacctcaacccgaagtcacgaaaattttgggacatgaaaaagtcacgtgcattggactgtgggggcattccactggagctggtggactggtcttcattgggaatatttccctagagtctgttgatgggatgttcccactgaccactactcgcacttgcccacgccgagctccctactccatatgttggcagcggttggttccagccaagtgtatacccaggctggctccaatctaagagcgggtattgcaactgttgttgctgctacttcgcgacggcattcctagacatgtttcgagttgtcctgccagaaacattgctccttcaagccccctcttgtggtacgagaggaatggttagcgcctggcacttatacaaatgaaattttgggttagttaacgaaatctcatttgtgtatctagggaaggaaaacaacatagaggcatttggaccatgtttcaatgcctgcccttgcacaagataatcctcgttaatgatggagtgaggttggggaatgtctatgattgcaccattctccaaagcttcgactttaacaacaatacgagtgattaaagaattgcaatctattggtcctatcatcttgagttgttctaaccattgttttatcatggctttgacaggagagattttaatctttttagtcatggcataaaagattctcaactcatcattgcagattagcctaacatttttccgaggaaagatggtaaaggccaatgtgtcttgagactggtaccagcatcgcgtaccacctcaccaatggctcatatgacatatgaggaatgacgactggtaacgctgcagttgaccctagagcatataaggtatgaaataatattgtacatttctaaatcttgtcctacaaataatggcatacttagtccatttgatcttaaatgtcctgttatatgccatccaagtgcttgataaacaaaagaaatcgtgtacgagtcatgctgcaccactgcatagggtctcggagctacttagtccattggaatgtgctgataggaaacttaacaaactatgtttaacaggactagttccaaaactgttaccattttataaataacggtaccacctctttacacctcaatttagaagcaagagaaatacaaagatgcttagttcactgccattgatttgttgaagacatgccacagcaacagaaaaaatggtttgagcgtacccatcaaggatgctattataaatcattacgctactttcttcatttttatataggtataattgaaaaccaacttttaagtagtaatccttattgacttaggttgtcattgaggttatactccgtaaacaagtatcggatagataggaaacatcgatggatacttagactgtatgtgagattgtactttctcacatttcactactgcagaaacaaccattggtgccgttttctagctgacaccaatttgtcggcacctattcccgagattataggtgtcggttttagggattacaggtgctggttcaccactaacaactgacacctatgaggtatatgcgaaacaaaaaaaaagcctcgacggctcaattaatccagtgcatatgaggtgttccggttgcctcaaatccaaatccaaatctcacaactcacagtccaagtcaaggatgatttctgtacgagcaacaattaatgtaaaataaagaatacaatccgctacttatccaagacaaacttcaatgaacctgatttgtttacatcttcaaacaacacaagaccaaacgattgccaatttttccagtgacacacaagcacacaaccatcctacaattggtagtaaattattgcagattggcaatcccggaaccgtccaacttgtaacaacttcagttcggctcgatcagtgtaataggtgggaggagaagggaaggcaagctagcagtagctagttgggttgttcatgtcggggcagtcaaagtggtggtagccgatgtggacggcggtgtggataaggccgcagatggcggaggattccatccgccacatccccagccccaccgtcgacatctcgtgcctgctactcagtgttggtattttttaacgacattactagaaatatgaattcccagcaatggcgacagaaatggtcctagtatatatatggttacagaaggaatccgcaaacgcatggatataccattgtagcatttcacccgaaagtattccaaggtatggtatttatttaatccaaatcccaatggaagattgtaagagagaattatgctaatatatatatatatatatatatatatatatatatatatatatatatatatatatatatatatatatatatatatatatatgccacttgtatgatcagagtctaagcaggggttaatgtattcataaagagtagagtgacacaaagaaaataactcatatctctcattaatcaattctacgccatgtgtaagaagaaatagaaaagcaatcaatccctatacttctagtatacactcaatcttagtttacatctgctagtatacaattatgtggcctataccccctaacagtgccctcctggtgtttcgagagaccaccccgggttgtcatgttccttataacaacctgtcatggccgtccaactagggctacatatggaggagtacccgtactgagttgtcaccatcagcagtacacctcgaccgtcccgcaacatatatgcccaaataatgatacttaataatcgagacaccacgtctacaatattaaatactacgctatatcccccgagataacatagagcaaccgaatagtcggatattaaaccaacaccattgcacctctctggtaagctagctacacaactatatcgatacatgtataaagtaaagccgatactgagataaactaaagtaccgagagtatataaagaataatatcccattaattccgaaagtcttacaaaagaataaagaaaagctactagagccataccctaattcctccgaagactccaaggactccgagagttattctattctactccacttagcactagaatactaaactaaagtatagagagaaatgttgagcttgcttgagtgtgccttgaagtgaatgaggcctcctccttttataggtaggtaatgacggttacactatgtgaattgtccaaattgccctgtaaccgccattgaagaggagcgtccacgtggaaggccgggatgagaggagctcgctagggttcggctgaacccctggttcggccgaacctgggccggcccaacaagcctccaaacttcccaaggtcactgacaggtgggtccttaaggcggttatggcagttatggcggtttctgggacggttacacctgacatgtgggcccatcttatccttaaacttacttaggttgtgttcgtttccccttgttcccaactcctcattttcgtttttcacgcgcacgcttttcaaactactaaacggtgtgttttttaaaaaaagtttctatatgaaagtttcttaaaaaataatattgatccatttttgaaaaaaatagctaatacttaattaatcacacgctaatgaactgctccgtttgccatggggaggagtttggttcccaaccatccaaaacgaacacagccttaggagtgaagtttcatcatttcttctccatttatgtattaatctccacaaataaataatactccaggtacaagtggaactatattattctgaaaaatatatgcattgcaagcatagctagttctcctttattttatttagagtaaagtccatgtcacgcctagaaattcacaagtaatttccaaactaatttgtgcattaaatccttgtccagaaatcagccgaggtacacaaactgacaatataatatacagattcatcaaaataataactttacatacttacaaaagaaaagaaaacagcagcggaattacggtctagcgaagctccggctccactcccacaggcaactcaactggggtataagccaaacgtcttctcatttgcaacttgtcttcaactgaggtttaattgattattgcaaggtgagtacatggaatactccacaagccacacagcaaatatgcaagtgcacaaggataccaaagaatggcataatatagggctcatttgcaaaagcagcatttagtaaacatttgagaattgcaaaacagtagagtaattaatcatcaatattaatcaacactaaacagcacacccatgctgcacaggcctaaccatcctgaacaaccatacccggctgtacagatctatctccaaaccaggaatgtaccattccaaaccaggagctaatcaaattattaccagttatagcatcatttattatggtgagaagtgtgagactaatcacgaaagacattgttagacccgcccataatcgcgggcacggctattcgaatagttttactctggccagaggtgtaccactgtacctacaagacacagccccacgacatgtcaccatgcgcctcaataccaccacggtacctcgaaaaggagctgtgacagtacccctcgcataacacaatccaccacaacgcattgttcctggatcataatcaccctcttataaacaaggcatggactccccagcgacccccgtgggcttatctccgccacttctcagtctggtgccccgcaatgaaccatgttatacaaaaggtaaagccgttgcccatgctggcttatggttggcacggttaatgtttcacaactgaaactcgtgaaccggtccttaattgtcatgagcacgaccatcaaaaccatgtgctcacaacccaccattatcaagttttagttgaccaattattaattaaccaatcacgattgcccatcgtgagctaccattgaatatctatcattaggtaatagtgaaacattagttatcccaattgagtgctaatgtttctaagcatggctaagcaattatctctaatacatctagttgaaccattatataagtacaactagtcaaattgtaacccaaggtatcaaaggatagagtaatcaatgcaaagtggccataacaaaggaatagtttcacaccaccctgtgacattcgaaaataaatgtacaatagaaataaatagagaatttaaatataggatcaaaatgctcaaaagaattgtgtttgggatatgtgtgacttgtcttgcaataatcggtcttcaataagtctctggaatacttccgacgcacgcgcgaactttcgaaacgacatgaacgacaagctaacacgcaaaacgaggaaaaagactaagaaactccaaataaacacatataaagtaagcaaacatatagatcatgatttttgatgaatttagagactcgaacggcctcattccgacttcatatgaattatttacgaattttacaagatttaattccaattaaacctattaaagaaaagactattccaaattaattaaacaatttacaaatgatttataacggagataaaagattaaaacaacctccggaaaagattagatcatatttggtagatgacatatattaaaaagaaataatatgccactgaaaagagatagcacgacttatattaagattaattttgaccgagtcgactaagatcgaatggcttagattgatctgaaccggaggaaagagcacgacgaggggagctcaccgatgacttgaacgacagcaaacgacgacggatgacgacggcggcgaggttggagtggcgacggggtactgatcgacggtggcgatgactttccggcgatctttggcggagaagaggtggtggacggtcttctgcttgcagttgcgaatccaacggaggtggcggtgaagcttggcgatgacggaaggagcagcagggcctcgccggagatcaaaacgcgacggcaaacttcgggttgacggcgacgatggagctccagtggatttcagcttcggggaagtggaggacgatcttctcctcctcctcgcaaacccaacgacggcagcggcgaccgaaggcgacgaccacagcgacggcgctgggctgctagagacacggcggcgtcggcggctcacgggcttgcgcggaggcggctctaggtagaggacggctagggggtcctttatataggcacgggagctcgggtccgggcccaaatcgacgagtgaaactccgggaaagtttaggatattcgccggaaaaaggaaagattgatccgcgaaattggaaaggatttccatataaagttttggggatttcttggggaaattgaagaggagattgagaggattccattcccgtaactactttggaaagaggagcaacggggaggtcggatttggaaggaggaggcggcggcaacaggacacgagcactgctggctcggctctgcctgagctggaagatgaacagtggcgcagggagaaaaacagacttttggttgggcttctattgcacagcccgatagaaggagagatacaaactagacttcgggaagggataaggccggccgaatagaaggaagaatgggccgagaactaaaggtgaacttttcctgtttcggcccgaaaaggaaaaggggattttaattacttttcccaattaaattaatcactgaaatgatctttcagttgttaaaaatacttccaatgctcaaataattccaagaaaattcttgaacatacttggacactctaagtatttaaaaaaattaaaaccagctcatttaatgattaatttaatatgtgaataattactgaaatattctttgtattattaaaattaataattgagctctgaaaaatccaagaaaatttcagggagtataattaatcatggataatttaataaaaattaaatccaaccatgatttatatttaggaaattttatttcccacatttaacttcgcttgtaaattaatgaatatttaatataaattctattaataatttattaaataatttataaatcctgaaatgaaattcaggctgtgatagtccatcaccggtccctaaacttgtaccgatgtgttataccggtccttaaactcgcaaatcgaccgttcaggttctcaaacttgttcgactgtatcatttcggtccctaaactttcctaaacaggacggtctaaaaactttatatcaaaaaataattcataacttttttatgtgaactttaatgaagacaaactttatatcaaaattgtagccctcgacgcgacctacaactttgtagttgaaaagtttttgaattaaatctatttagggtcccaaaatattgttgcatctttataaattttgaaattttaattttaaaattacattttgggacaaaaaatgacttaaaataaaaaagaatttcaactacaaagttgtatatcgcgtcgagggctacaagtttgatataaagtttgtcttcattagagttcacatggaaaagttatgaattatttttaaatataaagtttttagaccgtcctatttgacctagatgatattcaaatccaagtttagggaccggggtaacacaactgaacaagttggagaacctaaacgagtgatctacaagtttagggaccgggatgatacagtcgaacaagtttgaggacctaaacggtcaatttgcgagtttagggaccgggatgacacaacgatacaagtttagggatcggtgatggactttactcttttatttatattgaattggtctataacgaccatcaacactcagtgccaccgccgctagcaccgcgctcccctgtgccgttgtgccaccgtttccgatggcccccacctccatgccaactagatccggtggccaccgacctccacactgctggatccgccggcggccaccgaagacaagtggaggggagaggagagggcggtcgtagctaccgccgaaggaggagctgctgccgcgcgtggtggctggatccggcgcgacacggctcggagacggcgaggaggaggggcggcgtggctcctatatttatattataagtgtcggttctagggaaaaaacgggtacctcggttcttttaaaaattgacacctagagtattagaatcgatttttctttacaaccgatacctataatatttaaaagtgttggttgtatgttttttcattacggcggacatgggaaaaggtttataaatgccggttttaaataaaccgggacctatgagctgacatctatgaagagtttagtagtagtgctttattcagcatctaggatcgaagaacatctctgaaacttcgccaccacgtttggagtgccctaaacgacgtactgtacctaatttgcaaaaagccattgggatttgggaatatggcctcggtaggagcatcatgaccagttcagtcggatgagagccaaactatgaataaatgaaaatgctagcatgcacatggatgcatatgcaaattaacagggtccggccggggagctataaatggggacaactgcattggtagcgagttttaaaggcttgagttgctgctgtccaactccccatggaatcatgcatggcgctcatttatcttttcacagtgtagcagctagctggactccgggtagagtacagtcggacactcccctaagaggccacgaaaaataaatctaaattagatgtgacatattttaatataataaatctaaatagagataattatagatttataatactaaaatgtgtcacatatattcagtattaggttgatttttaaggcaggaggagtacactgcaccagctgcatttacctacaaatcattgcctacctcggatctgcacaacgtactgacaacaattgctagctgtaccggctgttaattaaccgccctatgatcgcaaagtatagaagcataaagtatggcctcgatcggatttgaaaaaagaaatactatctagtaaactaatgcatgcagttgactcacctcacaatgacttttttgatttaatgcgtgactctttattcttccacacaagattggctacatggtcatcgagaaatgtaaatattaatgaatcgcttgtttacgaggaatgactagtagcatgtttaaatggatgataagtagaatcacttatccttggtctgtacgccaagatgaaatatgactataaaaaatagattagatggagagagagtataatataagatatggtaaaagttacacggtctccaaaactaatctttaacttataatttttcatatgctataaggtttgtagcaacaaaattataatcatataaaagtaaatttaaatgtcaatctaatgatataatttttaacaaataaaattcatttcatattacattaaatgttggtcaaatgttttaaaagttgaatcttgaatacgtgcacgccttgtattatgagatggagggagtactatggacctgtttagttgatgaaatgaaaatttttgggtgtcacattggacgtttgaccggatgtcgaaaatagttttcagacacgaatgaaaaaactaatttcataacttgtctggaaaccacgagacgaatcttttgagcctaattaatccgtcattagcacatgtgggttactctagcacttatggctaattattgactaattaggctcaaaagatttgtctcgcgatttacatgtaaactgtgcaattagtttttcgttttatctatatttaatgctccatacatatgtctaaagattcgatgtgatgtttttggaaaagtttttggaactaaacaggccctatctctatctcaatgtaacaacaggtataataatagactaaccaactataaatatatttcgataagataaaagagtatagagaagagcagtgggctacagatttgtagctagatgtagcacagactacaagatccaatgtgtgtatgataggtaggaccaggtattaacagtgtagtatatgtttataggtaactattgtatgaattaactaatttttaaattgattagagatgatttggagttagtagttggctatattattaaacttgttctaagtgcagttgtatgtttcggtgtccaacgtttgaccgtctgtcctatttaaaaaaatttactcccaccatttcattacaagacttacgcgatatttttctaacttaaagtttaaagtttagttaaatttatagaaacatagcaataacatcaaacatgcataatatcaaaatatattaaacgttaaatttagtggaactaatttggttccataggagttgctatattttctttaaatttagttaaatttataaaagtttgacttaaaataaagtcaaaacgtcatacaatataaaacggaaacgaaaggagtagctctttctagcttggggacttgtccagattattagtcacctgactaaagttatagccaaaaacaaatcaaaaagtttcagtgaaggcggaacttcgattgattcgaaaatgcacccgataataattggatttttcatgtaatctatatagtagaaataaaaacttgtccacatcatttagaaaacaatagcctttggacccgatacttgatctcaccattacattcaggttataacaaccatgcaagcatcaagcatatatacttgtacatacctacatggtttcatgctagaacaaccgatgtagaagtaaaacgaaaaccacaaatttgctggtcgctaaaatatatgtcacactttagtagaaatgtagaaacttttctctgaatccttcagtaccctccaatccaacttactccatttttcagtagctgatcaaaatacccatttttttaagttacttgagtctttagatcgcgctaagattcgtgaaagtagagcaaccccctaccccacccgtagcgccttccccggtacaccacatgtgtgaggcgaggtgctagttcacctcctccagtgccactctcctctcactgctcggcctcgctagtgccagaaggaaccaacagctttggtgaggacccccggttgtccctcctctcctacattccttcctaagtcatacacacagtggcgagtacccttaccatgttgttctctccatacgtttccctcagggtagatcccaccgtcatctatgcctcctaaccactccagatctaacgccccactgtcaatttcgcctaacgcctaaccctccctttcaaccccacaactccattagtggctccaccatcttgtcgcatgcctatgtcctctgcccattgctagttcgaccaccgtctgccggccatccctctaagtcttgggaaacccctcttcacccaacttaaatcctctccaaattgactcccatccaagtttctctgtcggagttttaacatcgtcaccaccagcaggatgtcactgctgccaccaccaataggaagtcactactgctctcgctatcgtggctggtgagtcttctacctctcctttggtcagagattaaagacgattccctagccgttggattctagggagcaatgtgatatgactaagaatttggtcacctgagaactattaattctctctctccaatatgaagatggttagaaaacaatagagggattgctttttttatttaaagtactactaggccttgccggcttgcccaatagtaatatattaatataaaagagtattatttccaacacaaaacaggaattataaaagttgtaaccagctatgcacagaagagctgagggcctaattcatcctacaaacataaagaaaaatctcattcctaaaggcagcgaaccaatgatcttcatcacacaataaactatcaaaaactttctcatttcgttgttttcaaatttgccaacatgcaaaaagacatgatctcaagaaaaccttttctaaactgaagtcttatcaacaccaacatatggcgcatttccaaattagtattccacctaattccaagacgatcccaacaactcttgctaaagggacacatgaagaacaaatgtatcaaagtttattcttggacctttacaccaagcacaatgtagatacgcatcgtcaggggcacaatgccttttgtctaacaaatctctaatattcaatctgtcctatagaagtagccacataaacactttgattttttttacatatttagttttcttcattcaaatgaaaggccttgggaccgaaatacccataaagttagacatgtaagggttacgtattacttgtaagggttagttcttctcagcttatacactcggccacttgctcgtttatcgtgagcacacttactgaactgctaaatgatgtgtttcgtaaaaaaataatatgaaagtttcattcaaaaatcaaataaatatattttacatatttgacagaaaagcccacaaaagatcttgaaatttttctactgtcagattgctttagtgcacacccacttaaacctaacccacccttcctcttcctctcagcacagccatgatgaaggctcgagcactcgatgccaaaattgccaccacgccaccgctcagcctcgccggttggctggaagacatcaatggcaccggcgagccccctctcccctggtttggcttctccacccttcactccctcctcctcctcaagctggcgccacgggaggtgccctcggtctgccatcggatacgccaccaacagccgcggcctcctaaccacaaactcgttttgcccccatcaccaacgccggtccaccacccttctcgaccccatggctccggtgtctcaccgtctctgatggccatccctctaagtccggtattcttacccaaaccctcaccccttgccccacacccatcccaacccgagaccctaaatcctaactgcattgtcttcgtcgaggtcacgatgatgttgaagtggtcgttggagctggtgggagaaggatagtgggttaccggaacacaaattgcgaaacaaatcctaagataatatatttgcaagactctaaccctaaatttccgtcgaatgacatttagcaatttcaatatatttttaagtctataataattaatacttaattaatcgtgtgttaacccaacttcatttaacgtgccacaaaaatttcacatcattcgctgattcgaacgcagccatagtcactctttcactctcactctttcacttaacgacttagggtgtgtttagatcccaaaaaattttagtaaaaaatatcacatcaaatatttggacgcatacatagagcaataaatgtgaaaaaaaaacaattacacagtttgtatgtaaattgcaaaacgaatcttttaagcctaattgcgctatgatttgacaatgtgatggtacagtaaacatttgctaataacgaattaagtaggtttaataaatttgtctcgcaatttataggcggaatctgtaatttattttattattagtctatgtttaacactttaaatgtgtatccttatactttaaaaagtccatatactaacaaatttttggccgaactaaacacagccttaacgtacaaaaacctagttcgtctatggccatcggtcgctcatcaggccatggtgacaaacgcactacgcttacgctccacagtagcagtagatggcagtagtaatggcagctccagctacttggagttagagcagtgatggcgccagctcgggctcaaattgacccgattttaatgagcacgccaccattcgctgtcgatctctgcgtgcgtctttgagaaatgaaaacgagcctagacgtactactcgatccgtaccataataatttttagttttttttacaatgtattcaattttttttaaaatataaaaaacgaaaagttatacttaaagtattataaataataaagtaagtcacaaataaaataaataataattttaaaaaaatttaaataagacgagtggtcaaatgttataagtaaaaactcaaaatatggaactaaggagtatattccaggcaggcagccagcagcagttgaccctagcgatttattggcatccatgttccgatccctccacctcacgcagctcatgcattctcgctgaccatccttcccgccggtgcgcgccactgcactctcgccgtcgagcgataatggggagctgcgtgagcaagaaggccgcctccgcacgcgccggcgccgtggccgataaggaggcggcggcgccgctcccgcctgagaaggaggtcgtcgctctgccgccgcccgtggtggtggaggaggaggaggtgaaagaggtgctgtccgagacggccgtgcccgtgtcgcggcccaggccgccgccggagccggagaaggaggtggtgaagcggaaggaggaggaggaggaggaagtttcggagagcgcgtcggtggcgtcggccacggcggagaaggccaaggcgaagggagggggtgagggtgagcaggaggtggagaagaaggcgattggcgggatggagaaggggagggcgaggaggaggacgccggagcagaggaggcccaaggaggctgcaggcaacgggagggcgaggtcgccgtcgcccgcgtcggcgcagaggaggtatggcggcggcgaacacctggcgccgccgacgcggccacggcgggagcagcccgcggtggtgtccggcatcgggtgccgaagcggcaggttctctccgtccgcggcgaggagggccgccgagagcgccgtcaggcgaaccaactccgccagggaggccgacatgatgctgccgcattcttcccggacgccggcagccgccaagcggtccctcaacggcaatggcggcgcctacggaggaggcgcagccaaacgggaccccggcgagcgatccgggcggcggccggactccccaacatccaagcacatcccgcccgcctcgccggcagcgaacggcgccatctcccggcagcagagcctcaacggcggcgccacgcgcaagaccgcgaaggacgacaccaccctcgagcaaaccaagccgcaatgccacggcggcggcggcggtggccggtcaccggaagagggaagagacggctccgacgagtcggcattggaggaggaagggcacgagcaagagaagcagacggcggagggcggcgcgctgggaccgatcaacccctcggtggccatggagtgcttcatcttcctgtagccgcccaccatttccgatgtccaatgttctcttgctctctcagttagcgtctcgctaaccttgctctgtaattcgtggcaattattgccgtaccatagattggatgattggaatggaaggtagccattgtgtgtcactttgtttaacattcatccccctctgaatcacgtgtgttctgttcttgttttacctgcgacctgtgatatggagatgcgcggcggttggccggtcgggcggccggcaggcgtcgagccaggatcggtggagcccgatgttacagttttcacggtggtcggtcggcatcccattgcggtgccatactgccatactatacgttgatatataatttttgagggaacagggagtttctcttgcaattcattatcattatagaagaagagaattgatccaatttataaaggaaatcggacctaaaaaccttaaacggcacggttaatttgtgaaaaactggcgaaaaccctggtatcgacagattgaacctaataactaagtacagccgtccatcaagggaaaacttataaaacgatgccttcaagaaggacacgtcgactgaacagcgacatcgcccgatcctacaaatctaggttttcacccggagaacctcttgatatggagttgaatgaaagctccaatagcaactcctttaagaaggtgaacggcgcctgagagcgtcgccgttgcgcatcggtaaagccgagcaaaggttttcacctcgaagtcccatccaaacaaagcaaccgcaaacggaagctaccaaatgccacctgcacactgaatgtacatgttctatgcacacaaccacctgcacaccgttgatgacctgcatagccaccacgacggaccagctgagctcgctggcgccacctggactccaacgtcgttggtccgcactggcgtcacgccaggacgcggggagccgccggatctaggcctacgtgaccagatccagccatccccgtaaaaacttcgccgctgggctgggatgaggctgctggcgccggtccgaggacggagtccgccggcgccgggacgccccagatctggagataagaagggaaggagagaagagaggaggaagaaagggagaaaagagaggaggaagaaggggagggagggagacactgccatagctggcaccaccgtcgccggcggcctcgtcggcggctgcgacgcaagtggaacgcggccgaggccccgcgcgctcaggctatcgcctcccgtgtcacctagagcgagcggcacgggagtcaatcacccggtccctcccaaaaatgaagaggtcaccatcatccatgatccattgtcgtctcgtcgatgtaggttgctgacaaattaaggaacattgacagatatgtcattgctcgacccattggttcagggaaccggaggatgtattccctgttcaaagttcaaacaataaaatccaaacattcttctcttttaagttacttgttaattttatttaaagtcaaatatttctaactttataaccattagtttctaaaataattactacatagtttaacatcctaagatttttggtttccgattcaccataagaaatgttttcataatatataatttacatgttgttgcactacataatttatagaaaatgatagtaaaagttaggaatgtttgatttagaaaaaaaaataaatgataagcaatttgaaatgaagggagtagttagaaaaaaattaacaacatccatacagcataaatgtatcactctacaaaatattagaaaacgatttacctcgcacatccagtgcacgacaaaatatcagacgctccatttagtagatcccacctaacccttctcccccacttttttctccccaatgatcaatactacccactcatttttccctcttcttcccatagccaccagagcggctaagagacgaattgttgagaccatacctgatgaccagcaggacgcaacgcatcacatcatgaaactcgaagtggttgagggtgtcactataaggccttgtccttccaatcatactacttttgtgtcaacccttttacacgaagtgaggataaatgtgtaaatggggtgctttgtgtaagtaggtccgcttgtcttgaatggcagggttgcatggttctggagggcgggctgttatattcttcacaccttgcatgtaagcggaattgtagactactaccagagagcatgaagaaataaagaaatagatctattccgcctttttttttaatttagatgtttcagctcagcaaattaggatgtttcattagttagaacaaaatgatgtagtgggctttttaatggtgtttttttgcctattcaaagcattatgtgatgtttcaatacgtcataatgtttcatattaatctatgttgtcaagttttttttaattttttataactatttaaatgacatataaccaatgagaaaacatcccctcgagggataaaaatacatatcccgctcacatgtgacatgtcacagccttatctctttctcctgtctcttatctctttcttctctttcccacgaccacacataagcttctccctcgatctctcctacaagccacacatgagcaacgcagcggcctcggcccctacgagcaaccacaagccgacaacgatggtggcggcaaccccgtccgacgagcaacgacctcaggctcatcgagtagtgagagaagcaacggcctcggcccaacggcaagcagtggccttggcgagtaacgatctcggtctcattgagcagcaggagaggcgacaacctcggcaccgataagcaacggccccagtgagtagcgactttggcattgttgtgcggcaggagaggcaacggcctcggcacaggcagtggcgaccccagtgagttcaggcctcggcctcggcaggtagcaggagtggtggcgtcctcgtcctcagcctcgagcaagcaactaggtacggcggcattggtgacctcagcatgttggtgattttaatttctttggttgtcactgagacctgaatggttcacatattttcttttttatttagttttaaatgtttttttttatttaggtatgcatctgggcatgctgtgggtattgatttgggtatcaatatgtgatttggacagagccgactcgaattgagcttctttctgttttgtgatataaatcgaggcttaggagacactggcaatgtgatcctattaaggttggctggacttttggatttgtgtgattttttttctttccttgttttcccttttctaagtaactatagagcgtgcacgtgcaaggcacgttgatacatagaatgacagctcactgaaaattcagttcatccttagaccattctgtaaaggagaagcttagcaaaccgtttcttcagctatgaaatgataaatcaaaataaacagagtgatgtaagtttagattgatggacctagaagatttagaacagtgcatatttcgaattttaggaaaatatgaatatgaacacttttcttagaatgacagtaagtgaacatattgatttgataaaatattatagttacaccgtcaccatcatgctcaaaatgaagcaacaggggttgtgccagcaacaacccttccctaagcacatatccctgtgtcatcggtgtgccgattacaactggaaaaaaacaatgagcagctgcaatgctcgcgccacttgatctaaccttttttatgcagtctactccatataagttgacgtaaaagcagggtttcataaaccacttgaatttacctaaattactccccataatgaaaaacagtacccaaatgtatccaaacaattgatgtatttgataagctgcctatgggatcaacctttatgtagatggtttgcatctttacggttcatgtcctacaaggggaatcagactgataagttatcaattcaaggaacatgatcaacccaacgcaatccataaagtacactttcaagaaccccaatccatataaaagagccctttaagagaaacaagcaatccaacaacttcaatagtgccaaatctaaattcttgaggacagtggtggagccaggatctatactcgaggggagggggcaaattaagctaagtaccaggattgtgaaaaaaaatacatcaaatttcaagtaaaatcgaagcattttacgtgaataatcaatcatataaatatacctatattttttgaccatacagaagaatattttcatacatattatttattattcgttacatacatattttttttattattttagtgcttttatattaaagtggagcggtaaattaaaaattagagcttacgaggtaaaagacattagcagtcaacaacgatacgtgaccattggaagagctgacctttctaactgtccttgcattctaacatgttaaattgttgcctgcttgatttgctctaaagttctagcattgcagagaccatggaatgccgagccaactaccatgacaaaagacatgtagggttatacctccagcttgttttggactgcaaatctagcccaacacaccaaagtgcttaacataatcacctaatttaaggattacttagtagtaggtcctacaacagacacacattgaggccaggcccccctgtcttcgccgttgctcgagggagattagatagaaacacataataacacattcaaaaggttgttagattagaatagtgcttaatcaaacagaaattaattattgaatgcatgcatcttagagcaaaacaaggaaacataggtaattcttattattgaacaagatgtagtgaactcatgttggacaaggtacaacgtattggtactacggggaaactacatggtactacagggtatgcaacgcccataagcaatattaaacaaaatatgttgtgtaaccaagatcgtaggactaaagggataatttctgaaataagagcaaacatagcaagttcagaattccattccatttgtttcttcaatcagtttagccttttatgataacagtagctggacaatagcttagaagattgaagcttttttttaatccttccatcaatcttgaagatcacttgtccacatcacatattcacatatatatctaacttcctggcacaatcagattaaagtaagagaatagtacaagaaaagtagaaaaacatttaggaatttaatttccacttcagaaaacaaaaatatcatctaacagcaacactgacttcaacacctatgttcttatgtttgtcaagtaccgtatcaagaagcaatggaagtcattaggcccatacataacatgacatttaatgtatatatacaataaccatgcacatgcagtgcatgttataatctagtatataatttaaaccaaacatttccttatttataacccatcaaaagttttgacatttataaggagaagatagaacccatgtcaattataggatctgaaaatggtgagtaccaagcacaagatccttacaaagccatatccattggtgtaatatcatccaaagctatttgacctgttgtttcttttccaaccatctttttgtttgatgaaagccctgtaaaaaaaaataattttagcattctagaagtgagatcgaaatttctttgtcactcaagcagtctgctgctatatggctaaaacatatatgagcaatgaaaacaatttcagatgagaatttctcgtagcagaagcataaaaagctaagcatacggaagtcctccaaccatacttttcaggactggaccggtaattgaaccagcgggggcatcaattcattggttcaaccattatgaatcagtaacaaacttacttaacagcatatacacattacacaattacagtctcattctccagacaaaagcacatagctactaccaaactcatctcaatctcaaaaaacacaagacaacaatgttaaattttaatttttggcagtattctgagagggcaagacgtacgtcacctgagagatatttggaattgatcttgcaaacatatacagtcaagaaacttggtatagccccagtaaatccaagccaatttcttgcagctagattcggaccgcaagctgcaaaagcaaaaatattttatgaaacattttttttgaaggcagcagtgtagttagaatctatattgatttatcttgtctgtctaatcttttcattactgaccaagaagctaaaaaccaattaccaacaaggttaggcgagcacttgaagaataatgttcaagtatgcctttgcacagacagcgtgggcgatggttgttgaaccaaaataccaaatacagccaagctctacagttttttgaaccaaaataccaaatactgtaaaactcgttcattgagcacctttggcaggtgcctgaccggccctgctcacttgtacagccggccgtgccagccgctcgcttgtagaacagctattgccgccactgctgcaggttcaacttgaaatcagcaaatcaggacccttcacctcaagttttgatgccaatttttttctacatatctgatatttcctacaatatactaatgtgagtatctcgattaaaaaatcaaacacacgcccaacgattttgcaatttcctctagaaatttcgattgccatttgggatttgtggagataagcaacaaatactgacctgtatccgtagtcggagttgtaggggaggttggagagcagcgtctcatccatgccgtcgtccccgacacgtgtgacccgcgcgtaggcggtcgctttctgcgcaaggacctcgaacaataggccaggccggtgaggaactcccgcacatagtcggcgaatcctcagacatggatttatatggtgctaggttgttcacctcacccgcctggctccaattaacgaaccacacatccgccaacacctcgccctcctccaccgttggtcgatgacgagcagccgcggtaggaactgcacctcctcagccgcctccacccctcggcccccaccatcgtgacgacaacggagaggagcgtggccaggaagaggagactgcacgatggagattacggaagtggcggttcagacgaagagagaagatctaggttcagcgcgccggcggtaggggaggcgcgagctggatggagagggcaggcgcgggaggtgaggaggcaagggcgcaggcgggcgccagcggcggggatgtgcgggcggggtggagggcgagtgcctgcggcggagaggcgcgggcggtgtggtgggcgggcgcggtctgtggtgggcgacgtttttttttttcgctgctattggttctttttcgctaactgctgattactccaggtgggatcgctaattgcaggggttgatctaacttttaatatgagccgttggatgaatagatctaagggtcaggagagagaggtatttgataaactagtgctttttatattgaatatagatgattatccgattggattttgtatcggtttccgattttgttcttttgtccgtcgtacacctaaaagaagttgagtgtactctcctctaaatattatagcataattgtcctgcttcagttattaatggacgaaatttatttatgaacaaggtaatattgaatctttcttcagtggcctgtttgcttttggtatgaccagcaaacattggttttgggttttgcacattgtttaccatggtgatccttctgaacttatggtctgaattgtaggttattttgtggagggtgagcttctttgcctctcaaggatctgatgttgcacgagataatgtgcttaggttgtacaagcaaactgtcgatgctgtcatgtgcattcttttgcacacgaaatatcatccttcgcaatctcatgttcatctaattcatctaatggtcgaatgaagcaaatgtgcagcagcatttcatgtggcttgcgatgatttgtttcagttgtgctgctacattgctgagtggaattcacttcagctgtcctgaacctggtgggcggtggcgtccgttttcctcgccacagtttttacagtgactacatgctgtccttgggaaagactgaactgagctgcagcaggaagagcttctcgctagccgacctacgtaaattcgccaagccgcaggtaacacttcaaacaagtagatcagtcataaccatctgtacttcaaagaaatggacaagttcagaattgagaggactaattcagagagaacagatatgttcagacttcagaacttagatgtgataactgagcagagttatgtttttgctaggctgattatgtgctgagatattaggccctattgatttaaaaaagtccacagacttttagaaacaagataaatggaatggctttttccattaacgtgtggcacattacaagggaaattcaaaatatgctcttcaaacatattactcttgaaaatattgacaaccagacctgttacactgctatgaaaatggaattttttgcattgtcaatagtctcctacaagttcttctggttgggtgattatttctagagtgcttctatatagtttattcagcaccttagtgaaagtacctgttgtctcttatggtggataatgtgcgaaaacacatttttcgggaatacgctagaagcgtatttttgcattaagaggagtaaaacagacatttacaaccaaaggcaaaaactgcaggggacaggggaaccggacaagagaaaacataccccgccacgtgcctacacaccaccacaccgagaggaacacacggccacctccaaaacgatgccttcaagaaggtcacgacattcaaaacgccgccatcgcccatcccgaaaggatgaggttttcacctagaggatccttgaagagggggagggaagcacctcaacaacgccctcaagagggttggaatgcccaaagacgtcgccgttgctgtccaagaattgggccggctttcgcctagcacctgccaatgcccctcttgccgctacctcaccgactcccaggcaatgtcaacacgtggcctctacagcaacaatgcccctccgtcggctggactccaagcgacctaacctgctgccagcgcgacccccatagctacacgttggaacgagcacgaccaaaccaccgctgcacttcggcgaccagctagccttcctcccatgccgtcacctccaaagagagtgcccgccaccgcccatcactatcgataacaacctggggcaaccttgctgccaccttcaccgtctcgcaaaggagctccccacgaccaggcggtcaagaaggggaggagctccaaggagatgagaaggcacccacatggcgtcttgtcacaccccgaagttctttcccaagcctaaattgaagttataaatggtctcaagaaaataccagtgtaaagcaagagtaaaccttaataaattaatgcaaataataatcggaattggcatgtggaatttttcttgagttctacacgtcgaaattcgctaacaagatttttagtggaattttcagagccctcgaaataattttaaccaattaaaattgagcacatgcaattttaaatcccagggaaaatcttttcctccttttctttttcttttccctccttttcctcttcttgggccgtcggcccagtccaccccgccgccgtgcgcgccctcctccttgtgggccggcccaagccgcccctccctctctccccgggacgccgacaggtgggccccacttgtcagggtcgtccccttcctccggtcgcccgccctacgtcgccaccaccgccgaaaccgccgccgcgcccacgtccccgcctcctccgggccacgtcggccacgcccgtgcatgtgccgcgtctcccgcacccactcccccctctctcccgctcgcgcccgcgcccgagatggccgggattcgaattccgaatcccgcctctctcgcctcccctactccccacgtcggccggcgattcccgcccctaccggccacgtccgagttccccctcccctatttaagctccaccgccaccccctctctctttttccccatctcgccgaactctcccgagctctccatcgctcccgcaccgtgcatccacccgccgccgcctttcccgccactccggccgcctctagccgccgctaggctcgccgccacaccgcgccgtcgccgacgttgggttcgagtggccgagatccaccccgttcacccctcctccgtcgaggttcgccgccggagcgccattcccgccgagcgatggtgagagccgccatgtccaccgccttcggccggcattcccgccttctatggcccctctctccctctctaatcttttccttttcgttctttaggtcgtcccggaccccgtccaccgcttgtcgacctccctccgtcgctcctcgtcgccggtcgtcgccgccccctccggtgaggactccctcccctttcctttccttccccgtttccccgtgcgcctccgccacccgcgctcgccatcgccttcggtcgtcgccgccgccggggtgccgtccgctgccgccgcccgcgccgccgcttgccgtcgccggtggacgcacgcgtgccgccgcccttgccatggctggccggtcggctttgtgccgagcagagccgagccaggtcgccgctgcaccgtccgatcggccccgggccaatctgggccgtcgatcccgtggaccggctgtggaccacccgcgtggttccggtccacggtagaccggccaccccgtgcgccactgacatgcgggccccgcctgtcggcgccacccccttgatgacgtcagccctgggatttattgcgcaataaatgatttaagggctttttgttatagtaataaacatagtgaatcttctaaaattcataactaattcatccgagctccgtttaagcccgttcaagtctcagtaaatcaagaaaaatgtgtagaatccattaaaaatggttttgttctctgtttcagtagtcttatagcctgtttgtattgtttgctttgtatgtcgcttagattccggttcttccgacgctccggtgtacttcgagatagtcgctgaggttcttccagtagtagagcaaggcaagtcatgcttgtcacttgaacatgttgatcctatattacaaatgctctattgtttttctttaaatactgcattgttttataatgttactatgggatgtttacctactgtcatagtcgtactattttgtaccatgttcctttgttagcttgggatataacatgactagagattggactagggattgcttagccatgcttagttcaactagcacacaatgagggagatcctattaatgtttagactgtaggttctaatggtaatgttggattagtgacaccgcttcggtgttggttaattaaaataaatcacatggtgggctgtgggtgcatggttttgttggtcgcacccatggcagttaaggactggttcgcgggatgccctggaagaacttatcgtacttaccacaagccagcgtgggcaacggctgggcttgtagtgtagctttcctctagctgacgcatccaggcaagggtgggcgtgatggagcgaggcgggccctacgacggcctctgtcgcttccggattcacctaggcacgagaggggactgcccgctgccttgcgaggagtgggggtgaaatctgaggtgtggtgtgcttggttagagggggttatgcgaagggtcctgtcacgacctctttccggtatgtcgtggtggcatgtcggcgcacggaaacgtgtcgtggggctgtgtcttgtgggtacagttgtacacctctgatctgagtaaaactattcgaatagccgtgcccgcggttatgggcggtcaaccagattcaccgtgattagtctcaccctagtttagtctaatgaaattggatagtttaggtggatggttgggcctgttgcaacgtgggatagcgttggacagcggatgattaatattgattaattattacaactgtttacttctttcaacttctgtttataaatgctcgctttaggcaaatgaactactctagctctcctttgataaatccctgcatcatacccctattccagtatgacttgctgagtacagtgggtagtactcagtcttgctctattttccccaaccccagagtacgagtatgtgtcagatggtggtttctccgaggagtaggcttcgtccgtgccgtcgaggatgcctgtggagtggtgttcccactgcagatcaagtcaaggcttagctccagttatctttcgtttttccgctgcatttatgtaagacttttatgatgtttgtaagacgtggatctgaatgtcaacaccccggccggtcctggacggggattttaatgcacattctacttggaattctatttgggaatttctgggcgtgacacgtcccctcgtcatcgccggtcgtgatggcagtgctgtgcggctgaatccgagctcgaccctagatccggcggcatctccaccggccaacacctgcagcgctgccacacgggcgacgcgcaacgaccccgccgccgccatgcaagccggcgtcccagtcgggtcccccacaacgcagccatccatctggcagcagcccccaccggtggtcatccatgaggtccggcggcaagcatcgccggtgccagccactgccacgtcagcccgctgcacggcgccgcacgcatcgacctcgacgtcggcgtcctctcgtcgcgcatgcgccgtccttccgcacgcgccgtcctcctgtcgccggcgacgccggccatcacgaccctggccatccgggagtcggatccggccgcggggacgccggatccgagcggggcgcctccggagccgccgccgccttgccaggtgctgctcccagccaccgggccgccgccgctgcccccagccgcattgcgccgccgggccaccgtcgccacccccagccgcgcaccaccgcgggctgcgctgccgcgccagatccggccatgggggtgccggatccaccgccaccccacaccgccccaccgcctccacttctcccagcggtggggtacctcatcggcgtcgccccgtccacgtcgcgccgggagggagctgccaagaggaagaaggacctcgccgccgccttccatgctcgctgctggctttgccgccggcgagctccggcggcggcgaggcgggggagagggggaggaggcacgggcggctagggttttcgccccccgagccgcccacgcgagaggacgcggggtagtcttctgtgtgcgaaaacacattcacttcttttctatatatcgttgctcaaaattcttgctaattattgaaatacacaattgttcagctaatatatatttccagatatcggtaaaaacacatgttctttacttcttttcccaagttgtgactcctcatactacaatatctatatacttgaagttgcacgctgtccagctttgcacgagtaaatgccatctttgaatgtctgagcagtaaatttttattgtgtggaattgtttttttatatgtatcatgccttccatctgtccattactctttttgcagggaaagcaaaatcaaggccccatgaaatatgcatcaatttataatcttgcttaggtctgtcaatttataagcatcaatgaaatatgcatcaatttataagcaaaaacagctccagcacgggcttaggtctgtgttacatggttaacccgattaaagagaaggacctaaactgtttgcaaggtggtcaagaaccaactaacccaacccagcctagctagcagtctaacacaatgcaaacccagcaccgatgagacgcatcctccaaacttcccaaagccttgttcggattgaagggattaaagagggaataaattccacaccacaaatctacgataggtgtagaatagattcccttcaatagggccccaagggagaagagagagatcctagcgcggtggtggtgtcggtgccggtgccaggcagctttgtgggaatcaatggcagtgagggcttcctggactaccctgactcgactgcaaatgcaacttccttagcacaggaggtggcaatggtgacttgtgattacctgccacctggatgaatttggctcacttggcactttggcagtcaaccaattttattgattttattaaaacagaaataaagatgttgtgtgagatccagtcaacaacctaggccgtgtttagttccaaaataattcttcaaacttccaacttttctatcacattaaaacttttctacaaacacaggcttccaacttttccatcacattgttccaaattcaaccaaacttccaattttagtgtgaaataaacacagccctacaaaagtgatgatagtaagtattaccgcttcatcacaaagcaattgacttttgggatcaaaatatagctcttttcccaagcggcccgtttggttggagggagtttttaggagggattgggagtttagaaggatgaggctattaagagttttgtttagttgaaagacatgggaattttggtgggatgaggatggggaattgaggaaggaactccctccttttcaatacctgggtaggggcaggtaattgagagggaattcctcctttactttgtttaagcaaatctccatctatttttattaatgacctaatctccaactaaattccctatcaatttccatcacctctaccaaacaagatattgggattaaaaatcaaatttccatcttaatctcatcatcaattccctcatgtaaactcccaatcctcttccctcgagttaccaaacaagccgtagaggtttcactaacataaagcatatatggctgtgtttagttcagcgcaaagtttggattttgcttgaaattggagatgatgtgactgaaaagttgtgtgtgtatgacagattgatgcaatggaaaaagactgaagtttggatccaaactttagatctaaacacagcctatataaatcggctgctgcaaattccaagcaaaataaaaaaaaattaagtgcagacagccatgttgcgttgtgcgcttttggggtacaaagtataaggtgctctttaaacaacctatcgagaccgaaacaaagatcggatgtgtgggtgttgacgacaaaaggaggagaagaagaagaagaagaaattcgaagatgaagagaggagttgaagagccaaaagctctcacccatgcactgtagttgcggtgaccgggagcaccctcgccggccatccccatcagctgcgctcttcggatcatcgccgctgccatgatcactgcggtttttttgctccttcgattcgatccgctctcgctcgcgtcggcatcgcctgcttgctagggttagctctcgctctcttttcccttcttccctgatccccgattcccgacccgacccgacggtctccctccggattttgtttgggttccttttttttcttgggctaattaaatccataccattacaactgctgtatcgattcagataaatgccactacaattcgtttattcgtaagcgtgccatccgaatacacgataggggcgaaactcctaaggcgattgacggtcaggagcgatcgggttttcctctcctccacgtggtttccttttttagcaccgtattactttcctattttagtaaatttatgcacccaaagtttatacacctcaagtttacacatctaaagtttacaaacccaaaagtttatatatccgattcaaatttgaatttgaattcaaatatttttatatataatatttctatacatctaaagtttatacacctaaagtttataaatcaaaagtttatatacccgattcaaatttgaatttgaattatatccgattcaagtttgaatttgaattcaaatatattttatacatagtatttctatacatctaaagtttatacacctaaagtttataagtcaaaagtttatatacctgattcaaatttgaatttgaattatatccgattcaaatttgaatttgaattcaaatattttttatatatagtatttctatacatctaaagtttatacacctaaagttgtttaggtttatagacccaaagtttataagtcaaaagtttacgtacacaattcaaatttgaatttgaattcaaatattgtttatagacccaaagtttataagtcaaaagtttacatacccgtttcaaatttaaatttgaattcaaatatttttcatatatagtatttctatacataaattttttcaactttgtttttttttaatttatagtgtagtagaaagagaagaaggggatgagaggagaggtgtgtaaagggggcatggggatcgctcgcgatcgatcgcccattagccacaccccaataggggttccaattgctatccaaataaataatgttcgagcatccttagttggagaaggattatgatgatattggctgctggtatcctttttgaaaacctgtacattcagtcacctggtaatggtatgcatgcatgcttaatattttctcttaagacatctgatggcaaattaatcatgtccatctttttagtagtactcagttcagctttcttaatgatgagagcaaaattaatctgtggatttgatttcagtctactatttctttgactaacttgtgagcatctttgttttgctgagcagcatgaagagaatccttaagaatttataattgttccaaagatttttaattcccgtctataagtttgttgtttgtttatagtgattgtgagcatttgtgtttgaacaatatgaacacccaaagctttgttatagacatgtaactatgtaagaatatgttggtgcccttgcatgcagggtactgtacttcttgcaaattaagtagcaatgcttggttctggagccacatccatatatactgtactgatgagcaacagaggtatgtatacacactagtacatatccttccaccatctgtgatggcctctaatatgtttggaattaacgggccgtcacaagaaagtcatctcaattcgaaaaaacgtccgattgaaatatggtcatacagacatgttacatgttagatgggtgcaaaactcaagcccgtcacagatgacatctatccgtaacgggccgtagtttaggcctgattgagatatccgtcacggatgaccatcatccgtgacgggcgccaacttgggggccaattgagataacaactaggcctgtcacaggtgactcatccgtgacaggctctatactaatacccgattgagataacttaatctctatcgggttttaactaatgcccgtcaccgatgagtatttttatatgaaatatttatatttataagttgacatgtagtaaaataattaactgcaatataataattcattttattagtcaaaataatttttcggatagtaaatgatttcaaatcgaaaaattgtcaaaaacaaaagttgtataacttatcaagatttacaacttttagtttggtcatttttctatataagttttttttaacagtttgaatttgaatttgaaaatatggcaacttcaaaacaacattttcaaatactaaatgatttcaaatggaaaaattgtcaacaacaaagttgtataacttatcaagatttacaacttttagtttggtcatttttctatataactttttttttgaacagtttgaatttgaatttgaaaatatgacaacttcaaaataatattttcaaataataaatgatttcaactaaaaagtcattaacaaaaaaagttgtataactcatcaagatatataacttttatttttgttatttttttatctgataaaatattagtaacatttataaaaccagatgagagatatcatgtggttccaagttgaaggcattccttggactattctgtcaaggaagacgaaagaaaactgaaactaacgtcactgcacttttttgtgtgcaaatggaaccacgctacttttatcagaaatatcttcagaacttcttcagtgttcagtattcgtgtgtgcttctcctaatctcttcggagaaaacgttcctaatcatttacttgttcgtctcattatttttcttttacaagcttgcatgcaccggcggcctgacgctgccgagaagagcatattttgacgttagagatacaaacaacttgatggtgatgattgaaaaagcccagcatacagacatcatttccgttgagtatgtagtactaaaatcgagagaagcacggcacaatcatagtacgcaataacaaatcatcaattactcccaccgtttcatgtcataagacattttaactttaatcaaagtcaaactgttttaagtttgatcaagtttgtagaaaaaatagtaacatttttaacccaagacaaatttattatgaaaatatattcaattattgatttgatgaaactaatttagtattataaatattactgtatttgactataaacttaatcaaatttaaaacagtttgattttgaccaaagttgaaacgtcttataacctgaaatggtcgaagtaataacaaatcatagtatacgttgcctcatgttgcctcatgttgcactaaggacaatgtggtagccattccgataaaaaaaagttgtcgcaagttttttaagtggaaaactttcagatataaatataatataattggagtgtaactatattgtaattgtattataactacgggagcgtatcctatgtacacaggccctcgcgtgtacacaccgtgtacaccaactaaaaattatcacaaaaaattctaggaaaattcatacatgtactttcaataatattacatctacgtgcaaaatcgcatcttcaaattcattctacatagagaataacaaaaaagataaaattctgacaaaattacaaccttaaaactgtcagattttttgttttttttgttacggctaaaatataatgaatttgacgttaagattttaaccctaggtgtaatacaattgaaagtataggaataattttttctagattttttggtgacattttttagttggtgtacacgtgtgtacacgtgagggcctgtgtgcataggatatgttgcctataactacatcgcaactgtgcaactgtgttgtaacttatatgtactgctgtggaagacacagaaaagctgactggctagttgcacatgcttgtgtacgtgatcgcacggtgtcagatttttaatcaacttttttttcataaaaaccataatactgtgaaataacacgaagcaaccccttccactgctagctttcaccctgttataaattttgtagaaatcctatatacttttgagaaatgtaatatgaagaagagcaaattccgtttttaaaggtggcgatataatactaagaagcacaagggtcttttgcaaaaaatcatccaaatctaatctcctgtcctcctcttccgccgcccccgccttctaccgttctccaccaccgcctatccttgccccagccgccagcatactacccctcctccccctatctccattgcccacgctcgcccaaaacgttctcccctccacacggtgacggtggcggtgagacaataggggtgttgcggggccaggactgcagcctagactggtggtggctagtgccgcccagccaaacaagccggcactcgccctcccatccggtcctaggttgaacttatattttgggagagaggtagtactagtgcaccaccacatcaaacaaccaactcaaacgcataataaaccataaacacaatattttagccactattacaaatgcacatgcataaaacataaagataatattttagctacatgacatgatagtcagaaacacgagtcatcacaaagagttgtgtcaagtgcaggtatatttttttgtccctgacagcaacggtttgctttccacaactaaatagaagcatcagtagcaaactttgcatccttatgtggagcatctcttccagctttccatatcccaactgcactgaatgcagcaaataactcaactacatgacatccaaacactagcttatctcgaaatgcacccctgggcatcccgcaggaagtcaacagcctgtgtgaatgacaaaacatatgtgaagctgaaaccgagatggaaaacaaagatgatagtaattgtgagcaaccacataccggttgagcgcatttctatcttcattctccagcctttttaccttctccacatcttcaataattgccttcttcgtcttcgtcttcaattcatcaagttctttgaggatgttggcctttttgacgtgattaggattcacatgtttgaacacaaattaagacaagaatgatcaattactcatggtatcagaggacggaaagtcatcagcattgctaatgttgttagagcaggtacaatagcaggctataagccaactataaatatattttaaagagaaaaaataagatagagaagagcagcgggctgcagatctatagtcagctgcagcacggactccaagacgtaatgtgtgtatgataggtgtgaccatgtattaatagtatagtaagcaactattgtatgaattgactattatattggctatacatgatttggagctagtagtgggctatactattaaacttgctctcagtgatatgcatttactcctcaacattgccagctaattaatttaatataataaaaaagtatagtggaccacctatttaattgacctattacatatagatggaccacctcgctattgtctccatattataatataatctccaaacaaagcaaacgcagaaaataaaacagatcgattcgactcccccaattagtgcagccgaagagaagagaaagatagccgagagagagggagattaaagagatgaatctccctcgatcgaaccacacaaggatgaactggaggcaggggcagcattgcagttacctcgtccgtggcgctgatggtggagaagggtcgacggctgcggagaagcatccgcgactgcatcagcacggcgtggcggagcgacatcagggaatccacctctctctctgtctctcgtctcgtagaggaagaacaaggctagggtttcgatcgtgcggaagaagaacgggaggatatagtactatttgtttcttttcctttttttccctttatctcttctttaaattaaataaaaaaatatataaaaacacttatccgtttcccgtccctaataggagtactaacaaacagctgtactgtcctatcctatatatttaatgtattactgctatattattaattactagaaaattatctgtgcgttgcaacgggtaaatacgttttcttagtgattgaaacattgcgatcactatactttatgattaaaaaatttaatgaaaatcctaacactgatattgctatccattataattaaaaatttaatgaaaatcattccttcgttttaaaccgaaaactcactcgttcattcctttaaatccctaggccattatgtaacctccactcaggctgcctccctttgaaccagccaacaagtagagccgcaggctcagaagactattgtcttttaacctcccaaagatagaccaatgcccatacgacgtcggagcagatctttcccatcaaatctgactgaattttgctcgatctcccaaaattggttgagggctttcgatccactcgatctactctttccgtcttccaaaatcagaggtaaaactcacgataaaaacaaccggggaagatcgtctatagtcggagattaaatctggtaaattaaaagtcgcatcaaaaggggaaatcatgtagaaaatgatgagagaagagcggggaatcgattttttaatcaattagagtagataatgcgcaatcgacatgaaggcggcatggcgctagggttcggcccgagcagcggcaggaggtgcgcggatggcgcggtggaatagatcggggaataaaacggtcaaaaaaaaacccagacagaaactgaaaaaaaaatggaccaaaaaaaaccagacggaaattgaaaaataaatggacaaaataaagcggtgcaatagatatcagttgggatcgggaaaaaaaagctgcaacaaaagaaaagatagaaaccgaaacaaaacaaacagaccgaaataaacagaagctgtgattgtggcgtgttcgccagtcggacaatgggcgggagtagataaaaaaaattaaaaacctaactcgatacctaatccaacacggatgacgtaccaaaattctggcaaaaatatctttaatttttataatagtaaagattaaaaaaaaactcgtggaaataaattatatacttgctcactgatatattagtacaatttttttatactagaaaaaatgcccgtgcgttgcaacagttaaaaacattttccagtggtacaaccgctattagaaactgagctatattagtaagttgtttggattcaagggttattttgagagctatttgacctttaatgtacctttccatggagagatatagagaaaagatatttttttagcgggcccacccaaaatagccccaattagcacctcttgggtgggatattttttgggtgggttatttccaaatagccctcaaatagctcatccttttggttctttttgggttatttgggctatttgagggagggctagccattatgtagtactagtgtactctctccgtccaaaaaaaacccaacctataatgaaatgagatatatttagcacaatgtgtcaacctcgttgtattagaatatgtcacaccacatcttaattttttttttactgagggagtaattagtagtagtactccatatttgttttgttattattcttttgtgagagagaattaaattgctactagaaacgaagagggagacgggtaagatgggccgtgctgagcctgggcctgtggcagagagagggagagagagatatatgcgtcagatggaaccctaactgaaaatccgaaatccatccatgtccatgtccatgtccaagtcgatgtcgttcgccggaacaaggatgatggccgcggcggcccggcgcgccttccactcccagcctccgtccggccccctcaccgacatcgcggaagaatcgcaggttgagatcgtctgtttgtttggttggttttggggatcgatcgatctttggttgctgctcatcagttgattaattgaattgatcgctaggtgatcagctccctttatgaggtggcaaaggcgaagaatctttcccgggtgccacggcagttggatccttcgacgcgggtgcacatcgctctagatatcgagcacaaaatcagcatgatcaggatcggtgctagtccttccgaaccgcaaggatttatttatttcttaaaatatactaatactctctctattcctaaatatttaacgccgttgactttagattactagcaccctgcccgagattttatcgaggaaaaggggatggcgtcaacgaaatttcttgacatgggttaagataaacatcaatcttccgtgcgatattatgtaggaagttactaatctgacccaaaagaaataataatactccctccgtcccaaagaataaatcctagaaacggatgagatatttatttgtactacaaatctgtactgagaaatatcttatttgattataggttcttatattttgggacggatggagtaataaaaataagctttaatgactcactcaccgaagcaacaggttcaaatgatcgacagcatagatgaaacccatttgtgattgattccaaaatagaaacctgaataatagataaactgatcagtcattagcataatctactactattctaccttgaattatggcgctggtcaaggaccgctatataggtgtatgctagtactgatcgctgacatttacaaactaagtaaaatgatcaaactcctttctgaacctaagccagcaaaacagacaacgttgatcattttctgttgaatagcgtcctcaacaagcggtgcattttcggtcgagcatcttgagagaacgcaacacaagagagagcgatgtttcaggaccgacaaaatctgctgtggatagcaactgaatttctggagaccgaacgactgccccatctgatcaggggctgcctgaaagaccaagagcctgcttgcctaacatcgtggccgtgggccaagcagttttctctcatagataagaatatcctgctcttagcaccggttttcacttcgtgtagcagatgccatcactgaccgatggtttcccagtcaaaagctccagcaagttgtctccaaaactataaatactggcagccatcgccaacctcattgtgtatgcatattctgcaatcataattcaacagaatttagtttcagtacatatctgatatcccatagatttcggcaagtgttatccgctagatgacgggagggggatgggggaagaagaagggcgggagaggcgctgggagggggaggggattaggtgactggtgcgcgggtaggggtggcgctggcagcagaggacgtgatgtcatgataggaatcggatgcggatgaagctcagagaaacgacggacggaaaatctgtggcaattggaaaaatacgaatttttttaagtatatataggttagatatgcataataaaaatgatgatacgtatgatgaactaaaaattgatcttggtttgcgttgcagatcactccgtggggacatttggtttgacaactgttgggcaaacaatctttctttagtttgtcttttatccacattgtttggggtgtgtgaggctcgagccaaggagaatcaacagtctgaccatatgtcctcctcgtcaccaccctcgtaataaattattatgtgtaaaatcatgagttcaaatggattttattagattatagtataatatgtacgtcttgttatcttcattatgattttacctcttgtggtatttatgtactccctccttttcacaatgtaagtcattctaacatttttcacatttatatatatctagattcattaacatcaatatgaatatgggaaatgctagaatgacttacattgtgaaacggaggaagtattattagtaccaacctccttaatttaaaccttgtgtgttcttaatgcattactacctccttaaatttaagccttgtggtctttattattaatacctcagtaatttaagccttgtggtcttgatgtactaacctccttaatttaaaagccttgttgtcttgatccattagtacctccttactttaatttgtaggcagtgtcacaacttaaagagttaagagtaactttaagtggtacaactatatgtttgtctcgaacttttttatttgtgcatgactccatgcacccaaatacaacttgctcacttactttcatgatgccttgtggtgaactgtttgctatgttgttaagattgctgaaatatttgtggttaagacgcatctttgttcattgttaccgacagttaattgatgctttatgaacctcctattctcaaacagcttcctagcaagatgatatcttgttacttttttttttttgcctataagatgtgcttgttttcctaggtggctgggctggtgccaagcgcctagtcattcttggtggctgccaagcttcttgtttggtgttattcgtgttaagtgatgcataattgcgatgagcaggtgcttttgttcgaataatggttcatactgcaatttccatcgggtgtcctttcagcatatatttcagtgctattagttatgattacctgttattattttgctccgacgtgtacaataaaatcgccgaggctgagagcctttatgaggcgcaagcacaagtatagcaatcaccttatagtatcacccttatactaagtggaaaaacaaaacttgtacaccgtaataacccctcaatttttttctttaaaccgtctgctttatatcctaataactcaattttagtatcacgcttactatggcaaatgctgtgacgagaaaatgtggagtgaagctgagatttgtaggtcagtgcctgtttagcacagctccatctcttttaaagttagagctcaactaaacagtttcagctccacctaaaatgagaacggagttaggtagagctttatcataaaatgaactagagatgtgaagctagatttagacagctgtacaactccacttcaaaccaactcttatagctaaatttaaaaatttgagctctaccaaacaggctgtctgtactactacccgcttgattttgcaaatgcactgcacgctagctgctttctgttccggggttcgaacgcgagctgctcgatcagctgcgaatgactaatgtaattttggaaacggatgctgaattcttgtctgcgcgcatgccctttgcgccatgtactgcttcctagtactgtcctcggtcttgtaaacttggccaatgtttagattccacctaaaattttacatcatgttatatcgaacgtttgaacacctgtataaaatattaaatataggctaaaaataactaattgcatatattgtgaataatttgcgagatgaatcttttaaacctaattgctctatgatttgacaatgttgtgttacagtaaacatttgttaatgatgaattaattaggcttatatataattagtttttttattagtgcccaaacactctatgtgacatcctatacaatatccgatgtggcatgtcaaaactttacacccctaatctaaacaccccctttgtgtagcacatagttttgctgcatatggaatcatgtctgctgactcgcatgagtacaggcacccaactttgtatctgatcgtgtcttcagggattcacctggagttagtctctgtatacacggtgaatttgatgtttctatattaaattacagtgatttaagattttaaattttttatctatattaagattatttaaatattatccacgtaattgtaggaatacccagcttcaaaaaatcttgaaataaagttgtgtcaaagaggactctgtagtgatggttaacgaagggccattttggtttgataccaaaaacatgccctactaatttattggcaaatgtaaatagtttgtgtgttagtttagattgaggtcaaatatttggtagtgcctctatcctatttggttatattttagaagtttcttcactaaactataataatattactttatattggtagcaatccaaatgttagctaaataattttaccctatcaatattttggtagtgccaaaatttacctagagtgtgatattaccaatgaattgatagggtaaggaaccaaacaagcccaaaaacctcagcttcaaaagaaaaaaaaaagaagaatagacttcgcatacatgatgatcatcacctggtaatacaaatcgccaaaggattaaagcatcaccaacataatgtatataatccaccccaaaattttgttttggtttcttaaactgaaaatagaaagtgaactcatctctttaagagaaagcctaaataaaaactaaaaatggaccattcttttaaactaccaatagaaatctcccattccatcaaagatcaacgctgatctccctccccaacgccaatttcccccaccacaccatcccatgtcagttgttctttccctctcccctctattccccactgttgctgccccacctctccctacttgcagggacggatctagaaataaataatagtgggggctgaataaactacatcatcataaatcaaatctccagtccccacatcttatgaatctatggaaaaaaatagtgggggcttaagggggtctgcactgtcccgggggcggtagtggggtctcaagatccccccccccccaattgtgagtccgcccctgcctacttgccctcgttctgctaaaaaaataggaatatgagtcgtcgaaacaacttccttcaaatgctactagacgatgagtcttcgtcggatgacgacgatgaattaatttttgagatagttgaaacagagtatgatagtaacagttttacatttagatgcaaaattattttgcatctaaaatgttgaaaatgattttcataaattagaaataccaaaattttccaactaaagacctaggtgagtctaatataacttgtgcctatatgaaactttgtgaataatttaaacatttttcctttctaacccaaaataaaaaaattttggattttacttgcattgcataataggtcttataaataaaatgtagggagtggcaaagttcttcaatcatggccacacctaggaggggaagcaaggagttgaattgaagatgggggaagagaagctgtgaagtgttttacaaggatgtcgagcttgccaccgtagaggctggcgacctcgcggagcatgcgttccggctggtcccggacggagacgtcgcggactgagccggtgacgcggaaccccctgccctcccactccctgaggcgctcgcccagctcggcctcgttcctggagcaggtatgcacggccgcccccagcgccgccagctcgtccaccaccgcacgcctgcgcatgaattccccgcgttgatcgtagaagcaacagaaggctccgcggcggaggtctccctagccagcgagaaggggataagtgtgttggggtgagtatccgatgccgccggcagggttttaaatttcgaaattgctatttctgtcgaggacactgaaattttagaaatttcgaatttttttgaccgaaattatttaaaagtttaactgattttgaatgaatttgaatacaaattgacaaattgacaaaaaaattgtaaaaaaacgaaaatttcgggcgagatatgagcttgccggtgggagggcaaaattaacgaaatttcaaaccctagctgcaggtgtcgccggtaatgagggtcctcttgctggccgaggggccatcttcccgcatcgccgctggccatcgccttagtactgtggttcctctttgctctagctatggcaatcctgtcccatctgtttgcaggaaggatgggggtattttgcgaagaagtcctatatcggatctgttcttcggaaaaaactcttcgaaaatatatactgtaaagtttatatagtgtacaaacttagaaactaacattggataaaaattggacatataagatttattcacatcactcttagtaaatttttcactatttgtaatttttttattaagagtataaattttactcacgataatgtggagaaatttcatacgtctattttttcatataacgattgttttatatttacactacttatcggtagttattcggttgttttgtgaaaagatcagaacgcggtaagcctgtaatgatcaaaaattttcacataaggtctccagactcgggagtccggccgctatgatcgatagcggtccggtctctactactctctccgtttcacaatgtaagtcattctagcattttccacattcatattaatgttaaagaatctagacatatatatatatatatatatatatatatatatatatatatatacatacatatatatatatatatatatattcattaacatcaatatgaatatgaaaaatgttagaatgacttacattgtgaaacggagaaagtatcaagcttcctccggatgaaccgtgggatgctggtcagagagagttagcctggagcgttggccagttcggacttcggaggatacaaaaaagtatctaaattcacaacacaaccattctattcatgtcttcttcaccagcaacatctgttcaatctccaaataataataataataaagaaaaaaaacctaattaaacaacatcttcagttcacctgcctttagcgaggcttcggttggctttgtctgtaagagcttggtcgatcgctgctgtaatcgctgctagtgtttccctgactccccggcgctcttcttgatcgtggcccgatggactcacccgattccatgatggaactgtaggtatcttctgcgtacgtagtcctaaatatagagtttagatcttctccatgcgtttgtccttgcaagtgcttcaggatctgaaaggagaaaaggaacttcttgtcacatataggagtatcaaatatcagttatttggttatgtagttattgttctattttattctggaacaaggcactaccactacttgtacagttgtactgaaggtttagcagtttcgatgtttcaaactcaaaacttttcagggaaggaaacgaacctgaaccatggatggacgcagatgtgctgattggcgcacggcagcggcggcacactccatcattcgcatcattttgttttcatcataatcatctccaatatccggatcaacaaggatatcaaagttgccttcctccatagcttctgaaatcaagggttttgcctgaagaagcaaattcagaaatgttctatcaggctagacatcaaagttcctcttagaactacatttattggagtgaaggaaatgtattagatgtcaaggaatgaattttgtcaagattcaagaacttctttttgttagaaactgacccaaccaactaacgtgctgtccatgtaagactcagatgactgaaccggcagccttccagttatcagttccaagaggacgacaccaaaagcaaagacatcggctttgtcagtaagtttcccgctagacaggaactctggagcaatgtacctgcagaaaagaggatttgctatgaatacaatgagggataatatatacttgtgctatagatattcatgttcagaaattagaatgaacaaactcggaatacatagggaatgctgaagagaagtactgacccaaatgtgcccattattcttgtggaaacatgggtgtggtttcctggttgatactttgctagaccaaaatctgcaacctgcaaaggatcaagacatactgagtataggactgtgcaatataatggcatattgtttgcaattcaaacttgtcctgggattgcttcaaaaaaaaaacttgtcctgggaaaaccagatcttcttgaaacgttgaataatatgtgcagagagagtaccttgggctcaaaaccatgatccagaagaatattggatgccttgacatcacgatgtataattttaggagaacctgaatagtataaacggactttttcgtattaaatcacagttcaacactagatacgaaactgaatataagtgtataacgcgaaatggatgggtggagtagaactaacagtcatcgtgtagataggccaaaccccttgcagatcccacagcaattttccatctttgctgccaatccagaggtggccacttgtcccctgaattaagttcaacagtaacatgatcagatcagagtaaaaaaccaagactaaaaaaacattgactaaacagtcaacggatgcatttgacagaagaaaaaacaaatatgtaaaccattattttttttattcattttagatgtagacataggttttataccgtgtaaatgcgtgtcgagcgtcttgttggggacgaactcgtaaaccagcagcctgtcgttgccggagatgcagtatccgacgagggagacgaggttcctgtggtgcacgcgtgtgatgatgtccgcctcggcgcggaactcgcggtcgccctgcttgctctccgtcttgagcttcttgatcgccacctcggtgccgtcctgcagcctccccctgtacacgcacccgaatccgccctgcccgatgacgttgtcgggggagaacccgcccgtcgcggcggccagctggtcgtacgagagcgagccgccgtcgatggagatggagtgcgggcgctcggagccggcgtcggagaacgtgccgccgctggtctgcggcgccgtcgggtggtggtggtgctgctgcatgaagacgaatggcagcggcggctggtcacctgcaagcaccaaagtgtggtggatatctccgacgacgacgacgacatggacgtacgtacgtacacgacgtcgaacgtgacaagaatcacaagatgcgcgcacctttgtagtaggggttggggttgtataacattggcggtggtagcggaagcggctgggcctgttgccgccgccgccgccgcctccatcgccggatccagagcgcgagcacgcacaagcccaaaaccagaccgacaaccccagcggccactttgacggccacggaattcaagaacgagggcgagcccgtctggggtgccgcgggtgccgggtcggacgccggggccgtcgtgatgatctcggtcacggcacggcgtgctctctgcccgtggccggaggagatgacgacgacaccatgcaccgtcgtcggtccaccggtgatggtcaccagggcggccttggcgcgatccaccacgtcatagagcctcgcgaaagctgaaggctcttcagggggtacatactgaggcggtgggggtacgaacgctgccggccgtgccatctcggccggttgggaataccggaaacgcgcccacatcaccccgtctgcggttgtgcgtgtgcgcggctcggtgcgcgcgaaacggaggcttttatagtgggttatggcgagagatttttaggtaaaaatatgttaaatgtaattatagtataaatatagtgtaattacatactaactatgtttttaatagatcacatcgttgacttttgaagatatgtttaatcaattcgtcttattaaaaaatttatgcaaatgtataagatataaataatgtttaaaatactttcaatgataaaataactcgcaacataataaattataattatgtaatttttttattaagacgaatgataaatgtatggcaaaaagtcagcggcgtcttctattaaaaaacagaaataatatatatgtaatttagcttcttagggcatccacaatatagtctaaaagtggtccataagcaatacaatatttgtttcagccacctagcaatattgtggaactagtccatagcaaagaaataacaaaaactacccataagcatataagcatatgggctaccttccatactcgtaaaggaagtcgtttaggataatgtttaagtcaaacattgggaatataaatcatgaataactctcaagttgttgagtttgaaaatgtaaaaaatatatgaatagatttgtcttgaaaaatactttcataaaagtatacatatatcactttttaataaatatttttataaaaataataagtcaaagttgtattttggagactgtgtcgctgtccaaaaacgacttcctttatgagtacagagggagtattatttgtctctgtcctatctatatggactattttgatatatacattgttgttgccattacaatataaatacatgctgatacctttttcatgaaaaatttgatgacacagaactccgtttgtaagctctcactccttctgtctcgctgagctgggctggcggttttctcctcaactatgcggcgcgtcatgcctctgtttccgcgcgaaaacagagtgcaagttgccacgggctgcacacgaaagcggagacgaccactcggttttggaggtgggaacagcagagacccactggaggcatccaccaatctgcggtgttggtaacaccgtaagtactcctacgtaacaatgacagaaatgagcgtggcaaatccgtgggccgaacggctggagacggcagcacggaccgggacttgtgctatcatccaaagtctaggtttaatgtgttggctagtgtgtataggaatgaacagttgtcgctgtccagaacaatgagttgacgttcacttttcaagacattaaacgtgtaatgagtaatcagggcgctctatcgtgcgagggttaagtattaacaagtcaaattcaatgatgaccttcatcaacgttaaaaactggataagttaactagctggccattgtcagcccagcagttgtgccagtagatcagatattgccaatatgtagaagcgtgtgtttatactacgtcgtacaattgctcgtatatatatatatcttgagcagcccatcgttttacaatttaatatgttgatgaagtacaatactctctcaatcctaatataaatataactttgtattgatgtgactgtatgctcagatttataactatagaatataccatatttgtacaaggtttcacttgtattgagacggagggagtagagttcaactactttagtaggtaaaactatgagaataatatgtaggcctagaatgagataagttcatggggaaggattgggatcctttgcatcagagtacaaaaatttgcaccatccattcacaatcaattcactaaacgaagcattttcgagacttccgtgaaagtcttcttttagcttgagttcatcggcctgttggcgtcccattttttttccgcttattaccatcttctgaattaggtagagtgggagcactcgacgaggcatctacgacagtagaggctcttcctcgttttcggccggacaattccataaatagaataaaaaaaaagtaaataagatcaagtaaccagaagaattgtgagaaataaatcaatttattaagttgagacacatcgagggataaaacatttcatactatcatcataagttgattccatttacaattgaatttatttattttttttgtttctttttatgtgagtaaattttattttgggccatatatttttacccatgttgcagcttgggctaggttttagctgagtttttcaccttggaccacttaatataaccatttgtttcatcctggaccatagccgctcatcttctccgagtccaacaggcgataacccatcaccaacgtgctcatccgaacaagcgttggcggcagcggcggttactgatgcgcttatttgatttgatcacaacacattagcttggttgctccatgctccacaatcccagccggccagccaagttacacctacaaccaaatgggcaatggaacatggcttccgttcactgaagcaacaaaaattgatgcaacatcattaaaattagaacaactcaaaccatgcatttgtgttgcctctgtccctaatgtaagcatcaacaaattactagttgctatttgaatcgattcccttgcctcacctcgctgttgtcgccgatccgccatgagctcgccggcctcgccctcgtcgacggctggcgtagtgcatctcgacaacacggcagctgagagggacgtgatctagcaagccaaaatggccctcatggcctagagctaacctgccgtcggctgaacggagaagtgcgccgcagtgcgaatcagctgtgcgttgctgctaaactcccctcggataggactaggagctattggcattaatcaagcacttatcctcttgtgctcaccacatcctcctcccatcgatagcccaaaatgctattcatgatgatagtgatagcaactcaagcaatactaacgcactgcccctggtccaaactgctatattttgataaagttagatggtgttaagtgaaaagattggtaaatccctggtgcattgtacaactaggctaataaaaaggggtccaagataaaccgaatcgaacaccgaagaaaaaaaaccgatatttaggttcggtcctttgattttcgttttgtttttatttggcccaccacaagtcaatcgcgcccctttcttctccccaaagaagcacaagaagaggaagagcttggcgacgatggcgagcggcagcatcgtgaagaaggaggtcggcgagaaccacgacgtgctcctcttcggcgtcaacaacagcgtcaagggcgacctcgcgccgcagcacccgatccaggccaccgtccacaaggtacccgtcgctgattcccctctcctcgccccctcgaaaaccctaacgcgctgaatccgggtgattggtggtggggcttgcccgcgcgcaggaggccaagttctgggcggataagaagaggttcggggcggaagccatctacggatccgctttcaacatccgcaaggatctcgatgcccaaatcctctccaagtaatttcactatcctatccccccatatgatttcgctgggaaaacgatttgttcgagtaaataatcacttgcggttcatgttaacattagataactgtgtcggtattacatagcatatattggaattgttagggtcaatgacaattttgggtggaattcctcacactcaaatggccttattgtgggacgagatatgtttctttgaatttgatgatggcatgtattccccctgtgtttgtctgttagataaccctcgcagtacataaaaaaaaaacctcgcatttacataattttctgtaggcttcaattaaaaaataaactcaaggtctcgaaggatcaaattaaatatgtacaaatgaaaaaccccaaacaaccagacgttacgtaatcattagcatgcaaatcaaacgggaaattaggggatttcgtgggttagggaaaataatctcacccgatcgctcgctggctcattgttgcttctcatgagacaccagccatcgcacttgctgtgtttgtgcgtctacccgaggacagtacaaggcaaagagacaaaccaacaaacaagttagtttcaggttgcgataacaggcatgttagctgctgttgtgtcgggtactcggatgttgtttatgggttgagcaagagagcaaataatggaccaattatgtctgagtattggtgtcaaaagacaaggttctctggcgtcacccatgagagaatagaatagagcacttggaacaggccaaagccattggtatcatgtgacaccactgctataacgttggatccacccctgttttgtgtgtctagttgtaaatccgttagctctttgcatttactgcaactattttgctcttattgtcgtatgcatcaagtgtcagtgatgttatgtttagtggtcatcagcggtattctgctaactgttactccctccattctaaaatttaagtcacaaccacctttaacctaaagaccaaaaaacaataatcacctcattgtttgaatcatcataataaatactaatgcatgcaccctatagaattagagatcttgagggtgaaggatttaagaaataataatttagtggagaggaggtgctagttaacagcctcatcttttggcttatgcttatgtttataagccaaaaattgaattttcaaccttaaatttggaattgattttggggttttttcatcatagtttattttccagcctttgtcttttagatcgctaaaaacacggatataaaaaatttatttgcaaattattttctgtttgcaaatatgccatttcacttattctgtcaataagcaaaacgatgggggtcctaatttcaatgcatgcatgtacaccttgtataatgaaacgtgaaaaaaagtagttgtgccgtatattttggaatggaggtagtagtttgcaagttatttctgaaatttgttctcgtggctatgtgcagtattttgagcactgtttttaaggtgtttaattaggtcctgtttcttcaagagcatttccacaaatcaaatattaggactgctaagaatgtattaatgctttgagtatgctaacatggatggaatgtctggattccttggtctggttgaatacacaatcatatcttgaggttgctcttgtttgtctctccgtctctccgatgtagtaacaactaacaactagcacatcagcgcaactgtgcaaataagggaaaaacagcgtgcgcaactcatgcccaggctaacattcaagatgttttggttgatgatttatctgtttgcaggttccaaaggccccctggtgcattgccatcatctatgctaggatacgaggcgctgactggttccttggatgatttcgggtttgaagattatctcaactgtaaggcttgttgtcctttgatttcctatgaatcttcttgctggcctttcacatttacgtgcaactatttgctcaccaacttttgctgatttattagctgcatgtttgatgcttatgttcttcattggaattatggaatccagtgctatcaagttctcattacctttatattaattctagtttttttattttagtagaacaaaaccatgtagtcttatgattccttgggagtttagaagttcttgggaaaccaagggtcatgaaatgatacttgtttttcatttttcatacttctagtcggtacatcttgataaaattttgctattaggatatacttggaggaatgtataataattatcacaaagtggttattttattctgtcctcatgatatgatatattaacagcaaattacatattttgctttgtcatccaagcttggttggccttactttgcatggcaaaacatacatctcatcaccattttcagtgatgagatgtatcaccagaaatacagcctctatagactatatatatttcagtcccacttctgccctgggaacattttttttcttatttacactcgctgagtgttcttcctgttgttggaaatgttacttagccttgtgttaattttctttttaccttggatcatgttgcagtgccccaagattctgacagcttccatgctccagacatgcaccacggaatggaggttcgccttggtttgtcaaagggaccgatttgccctagtttcaattgatttcacaaaatgtatttctcgtcttgcactgttctcctcattcaatatctatgtcgctctttagactgagatttcgatgcttgttttggttcataaccacacttgtgacgagattccttatccatcatgtagacctcacatgtcattgagataaaagagtgtgacaagagtgtctcatgctagctaaagtgtggctccaattttgttagccacacattaggcaagttggtcaaaacattgtgtcaaccttgcataaatagaaatactcaaccaaacagtccattacgcttatacactgtcaaatcaaaatgggacagtttcagactttggccgtggcttccatccatcgtcaatgcttcaagtgtggggacttcttcaacagccccatccattgtcgtaccatgtggttgatctaatataaaggcattccgagttgagctatttaaacaacccaactaaaatagtactccctccatctacttttgatagacatatttccaaatctgaaaaatttacttttgataggcatatttcaattcaatcacctatcctattaatgactttctatgatttaatgcgtgactctccattcttccacacaagattggctacatgggcatcgagaaatgtaaatattaatgaatcgtttgtttacgaggaataactagtagcatgtttaaatggatgataaatagaattatttttccttggtcattgtgacaagataaaatatgactatcaaaagtagatgtaagtagatggagggaatagtattggtaaatctctctctgcgagtaaagttcggcggcatgagttcttgctttctttggaccctcgttggtacatgcaaatacagagcagcgagtaatgcaattctcgttccctcattgcatgaactacgttccaaaatcatctcgatcggtgcaggtgtaggcctaacctttctgaaaaatcatttgcgtctctgaaatactccactccaggcagcacccggcaaatgctagttaggtccatcatagttttcacttgaaaagaagcctgccgaaggttccaataatttgaacaagcaaacagaacactggaattgcatgtatgtctcaaaatcgcagagtattgactcctttttcggacacgttttatttgtcagttgcgactgaaaaggacacatagaagaatggatgtgctaaaaatgatcgtccgtcatatgaaagatacatttaatgtgaagagcacttggggcacattgagttgtttagagattttgcataacacaaggaaatatttagtggaaatcatcaaataaatgaaaacccatgaaagccatacttacatattctctaaattcaagaaaaatttgctaaagataggtatatgcaagaaatacattcatactagatctagaggcgatagtggaggccgcggggtgcggttgccaaatctagccccctctcgttcggatccggcttgtccggcgctggaggctgaccctcaagccaccaccagcggagaggtgacggcgcggacgtggaggtggcagagtgaggtagaaagggcgcgacgacgcgccatcgatggagggcatgcccgcgcggtgcgatcggtggagaagggaggaagtggggcaccagctaggagtggccagtggcggcggtaggctggcgtggtgctgctaggaagcccacctgacggtggtaggactatggaagtccaacgcggcgtggcgatgcaagaggtcgatgcaggcaggtcgatgcgggtggcaccagcggtagcagaaggctggcgtggacggcgtcgggaggttggcgcgacaacgacaaagaagccagcctgactgatggcgtgaaggtcgacgcacgcgccaacggcaaagaagctggcctgactgatggcatggaggtcaacacagtgatgacagggagtccaatgatggtggtgtgtgccacaaggcatgctgagactgactgacggggggtgtcggtgcagcagtggccacgtgcctacgaaggatggccggtggtgaaggaatggagcatagctatggatcgataggggtgagaggtaggtgtaaaatctagcttggtcttaacggcttgggaaaaacacaagggttaacgtgctcaagtgaattaattatacttctatctctcgataattcaactgaactgttgtcttccttgtaaaatcaaacttagttatgctactttctccattttaaaatataaaaatctagtaccgaatgatatattttctattactatgaatatgtatctatagaaaatgttttatttaaatttaggttattatattttaagacgtaggtgacatctaaataccgttagtatggatttattgcttgaagttgccaacgtgtggtacgtgtgtgccatatgcttacgtcctcgtctatttaggcgaacggaacagccaaaagaagcaaatggaagcccaaaatggaaggcagaaggaagattatacaaatccattgtgacttgggtttaatttgtgggagcgccggagtagcctgtcgatttcagtaatgccggccagggccagtgtgcactgtgcagcgatgaaactccatccatgggcgcggtcaaatccggggggagagagagagagggaatgggaatgcgtttacttggccgggacacgacgtgcagcctcgtccacgtacacgcgagcagagcagtaaaatcgcccgccgcgacaacgagtggatcggaggggagccaactgtgaagtactagtactactcaagtgcggtacacatgtactacctgccaggccgcgactctctcctttttttaaaaaaaaaattacacaactacaacagagacactcacaatacacgcgcactcacctttataaacacatacacgtaaaacctacccctatgagtatctttgaagactagaccatcaaatccttaagattgacgaagtcactacagacatctcgctatcgacaggtacgtcgcctaccactgaaagcacaacgccgataaatcctagaaaatttgctaccatggaaagttaaacccaggacctataagatactactgagtctctcgtaaccgtacaggttttttcgcgccgcgactctctccttcgcgaaagccgacgcttgtatgcatgacacgcgtttgtgacagcttacccaagtctaagtacgtctttctgcccttttaactagttcaatattctctcagttcttaaaaaaaaaaagacaaatcctaggtttccgtgtccaacgtttaactgttcgtcttatatgaaattattttataattagtatttttattgttgttagatgataaaacatgattaatactttatgtgtgacttgtttttttaatttttttcatataagacggacggtcaaacgttggatatgaaaacctaagtttgtcttttttggacggagggattattgaacagttctcatttccatacttgttatcgtgcaaaagaacttttcgcacttctaatcactagtttagtattcagaagtttggaataaattgaatttaagcttattaatagatatgaaaattagaattcttagacgtatgtactttgcttctaagttacacacaaaatatatcttaatgttttttattatattatatattgtggatttgatttttttggaattactcaatacaagattgtcatgtggagtcttaataactattattgttttattggctgtttttaaaatactccctctatttcaaaatacaagcatgtctaatttgtttaatagaaattaaggtttaatacaaaatactttgatgcccctcatgaatggttggggtgagagggtatttaaaggtaagctggaaagaaatttaaatgatagatgattgatggaataaatagtaatccgaacagtattagaattgtttatatttgataaatttaaaatgtgataagtgtttatatttttgaacagatgatgttagaaccaatatatacataaaaaaagtttctaggatatgattttaacaaatgattcattttaagaagtttgttttttcttggatgaaggggtagttaccatttactagagtttggattttctttttcatgttcaatatttacattactgatagtgtgagatggaatcttcatttatttttatgttgtgttcgaatgtgtcggttcggaacctatttctccaacatgaaaaatgagataggttgttagcacatgattaattgtattaaaacaacttaaatataatttttcaaaacaactttcctaaaagatgtataaaaacacatcgtttagctggaaagtgtacagccaaaaacttgagagcagaagttgagaaaggagacatttgaacgcagccttggtctccttggacaaatggccagatttactcaattttattcgattaacgtggacgttttaggaaatataagcatggatattatgcatataatgattggaatcagtccgctggctggcaggctgatgtgcttatctgcgctataagaggaggatggagcacaggtggaacagtgactggattcatctacagaaagaaaattcaagatttaacaatcaccaattttattctaaataacattcattttatgagacggagaagaaataatcccgcagatgcacacctgggcaccaccggaatctccgtcccccgctccgcggcgcttcagaagtctcgtccccactcccgtgccgcactggcccagccgcctgagacgacgtgaacatgtggcgctgagccgtcgcccgagttccacacgcccaccccatccacaataatatatccaatccacccatccatccgatcaaaatactgggagaaaattggagttgggacgcgagattctcaggcgagcacacgatctcgcggcgcgctcacgtccacgccctcgcatccacaagcgccgcggttaaaaaaccacgaggcaccgtgtgtgtttgtgttgctgtggtggttgccttggctgctttggagagttgggaggagcagcgagagagtgggggttgatggcggcgatggcggcggccgtggcctcgtccccctccccctcccccgcctccacccgcctcctccgcggccaccacccgcccccgtcgtgctcggcgccgtcgctgctccgcctgaccaggtcgtcgcggaggctacggctgcgcgccgcggcggcggcggaggaggccgacgtgctccccgggcctggggccgagggggagatggcgacgggcgggaggctggaggagcaacccgaggggccgatcgggggcagccaggtcgacatcggcgggctcgccttccagggcgacatgggcggaggagggttcgccggcgggagcgggggcgccggggccggcggcggggacggcaacaagatgctcgaccgcggcatcaacacggccatcgtgctcggcgccagcacctacgccctcaccaagctcctcaccgtcgaccacgactactggcatgtacgggaaccttcgtcgattccccccaaatcgttttgttccattttgtcttctcttctctgtgctgttcttgatttgattcgattcgaagctaacatcgttccgggcgggctgttgttcatgattggattgggtgcagggatggacgatctttgagatcttgcggtacatgcccgagcacaactggtcggcttacgaggaggccctcaagaccaacccggtgcttgccaagatgatgattagtggcgtcgtctactccctcggcgactggattgcgcaggtgtgcaaacgctttaattttcctcttatttagagtaatagcttttatgcagctgcgcttgcatatttgctgattctgttgctgttgatgcttgcagtgctacgaaggcaagccgatcttcgagttcgaccgtgctcggatgttccggtctggcctcgtcgggttcacgcttcacgggtccctttcacattactactaccatttctgcgaggtaaacatcgtggtcttccatgctctactgcctaaagctttgtgtcatgttcatatatggtgaatgatatgaagccaactgtttttcttggctcaggcactgtttccattcaaggattggtgggttgttcccgcaaaggttgtgttcgatcagacggcctggtctgcgatatggaacagtatctacttcgtggtcttggggttccttcgtttggaatcaccggccactatttccagtgagctcaaatccacgttttggcccatgcttactgtaagcactgatatttcctttgttataataatgccttaattgagttcccatattctatattcttcttttttttttaagaattgaaagtttatgaaaaagctgtagttgtgcagttgatttgttgtcttcagtgttcttgacagcaaaaccattgcctgtggtcatggtttttggtactatgatccttaatttgttgaagggattcgatgaattcattgctctgtatacaagtaaattttttaggttaatattaacattttgtcctccaattattcttgccacatctattttctcaaagttttaggtctagaagccactattattgaattaaactagtatacaattacaacaaagctatgagaagtcattcaaattttgaactttttaatgttcaaataattattcaattttcccttctaataattccatccataatctttctataatcactgaattatttcttaatttcaaaacggtttttacagtgttttactgctaacagagaccttatgctgggtttcaattattattataggccggctggaagttgtggccttttgcacacttggttacatatggcctagttcctgttgaacaaagacttctgtgggttgactgcgtggagttaatctgggttacaatactgtcaacgtaagcccaaacatgtcaatttcactttattactacggcagcctgattaaatcgcgaaagataaaaagagttcttcatttcttataacaagagttcttcatttcttgtttggcagttactccaacgagaaatctgaagcaaggaactccgaggacgcatccacatcaaatgcttccaatgtatggaacagtttaattaaaaattcattctgtcagacatgttatcgttcgttctaacacccaaaattcattgcctcttctacaggacaattcaatatagcgaacggtatagccagccaagctgccctttaccttcatcattttgggcttgtatatattgtacaatttgtagctgcagctctgcaggtgtaacctttttgcaaagataaattaaacatataagatgtgtagcaactgccaaaggcaatcagaacgaaattaccttgcactggatcaactgttgacgagattatgagctatgcaattttggtagctattcttttgatctttgaaaccccttttcagtgaaatcaaccgtcttgcattgaaccttatatgatcgacaacgcaagcaaggagcaaaacctatacaatattttggggtggttacaatttacacagtattctatagacgctagcaaacaaacagcttgctcatcatcagacagaacatcttaaaacaagttttcccttgatgcgaacaaaatgctgtctgtacattttttcgtttttgctggcatgctttctgtacaatctgatgctatgagtaatatacaactaatgctactatttcgaggaaaaaaaaaactactgcatggcatgggcaggtgtgctatgcccgtatttgtaatttacaaaattgcgatacttgtaagtttgaagcatgaaaacctaccagaattcatgaggccgttcacacgcatcgtttgcgagcacacaaaaaggagcatttccaaattacatgtatgaatccaaccaaaacttttctattgtgcgcaactatctatatcaattgttagctactgttgcacgcttaaatagttaagtatcactatactgcagcagcctctgtatctttgtgaccagcaatcagatctttaagcacagcctttgatgccaactttttcgccaccaacttgcagggacctgattttgttgcggagtatgtagtctctccagccttcacccgagcaatgaccgatgagactccatcaacatggtttttttcgtaggttattttgaatgatctacgatcacaaaattcttgcagccctttcaccgggtcaggctcgatggtttcgggggtggcaagaggttccaatagccgcttcatgcttctccaaacaacctccttgtcacacttgctgtcgagataaatggcaccagctattgattcaatcacatccccgagaacctgtttgtttgcaagtaaagcaatagatccagcttaagctattcgatggaaaatattacagaagtgcacaaaaataggttagtccaaacatataattctcctattccagtttacagtcagactaaagacattttgtggtcgtcatgctgtgatgcactatgcatcggaacctagttaagactatctttagttctttttataaattctctagcaactctttaatccaaactagaaataatggatctgatgcctggttaaattttgatgtcatcactatatggcatagactataatgtatccgaggtaatggtagacctaggaatactgagtaatgactaataagatttaaaataaaagacaaacaaattaactgatcaaattttaccataccagctaggtgcattttcttttgcagaaaaggagaaacaaactctgctatcagactttcagaatatatgcaatatagccacctacaccaattacaccgtagagaatacacacctttggtagaccaatgcccgcttcccagccataagatggacctgtaaatgactgcccaaattcctcaaggtagtagctcatcttcctatgcagttctgatgatgagtgaaggatatgcttgtttaatcctgatttaacagctgcatgcgcgtaacaattgttgttcacagaggcagatctaagatctgtcaacaattctggagtacagtcagggtatttgctgtagtaatattcagtgaaaagatgatccaaaatagcatctccaagaaactcgagcctctgcaagggacacaaacttgtcattcaactcaaaaaagatcccaaactaacaacagctacttgagaagtttgattcagataaaaaagaagctagacaaaaaggcaaaggcctcatcaaaaatcctaagccttcagagcttcaagccgatgcatgaggccatcaacggtcaccgcagtatgacgaaggttctccaaagcagcagcgcacccatggaggatgtgacgtgtaaacgccaccaccactcggcgtaagctgaagcaaggttttcacctggagatcagtatgggctaggtggaactacaccataacggcgcctccaaggaggggaacagtgcccaaaggtgacgctgtcattcaaccagccaatggctcgacaaggttttcaccagttgattctccatccagcccacacaaccaatccgcagcacaacggcagtcgccggatcaccacaccatccctctagcaaccatgcccatgccatagcccgacagctcaggcatgctcataggactaccctgtttccggccactccatcgacatctcctgatgatagccacaacttccaccctccaatcaaagctccccatgaccaaaactacagtctccagccatagaaggggaggagctccaagaagaggaagatgcttggccggcaaaaacggaagacacgccgtcaccactacccagctgcttcttgatcatcgcagatgcccagctttggtcgttgtcgtacctcgcacctccaccctgttgccaccatccatgcaccacaaggagctccaaaacgtccaagcggttgggaggagtcctctcgctgctcggatgctagcacgccccgtggctcggatccctacccctagcgaggacgcaccagatccagtcgctcaccacggcagggctgcggtcgccgttgatgccaacttgaatagccaggaacacagcctcaaccaccgcccacgcggcccacttttgcgactaggacgaccgccaaacgcccatgcagccgctccgccgactgcactcgagcaatcaccacagcgttccggcggatccaacccagaagccccgcatcctgcctaaccggtgccagccactgttgcagcctctcctagcgctgccggctttggctaccatccaaagccgtcccaccgctgccgtagcaaccaacgtcacgcttagatctagctgccatccatcgtccgtgcgagagcccaaggaaaggaggcccgccgccacacggtttccggcagccagctccagcggcggcaaggggtgggaaggaaggaggtggggtagggccggcggctggaagcgccgcccgagtcgctgaaggagcgaggctagtccttcagttttcaggtttcagataattctacagcaagttaaactcaaaaggaaatgaaacatatagaggattgctaacatagaaaaaaaatgttgttgcaatactgtttaatcatttgcactttgttgagtaaagatcaaaaggcataataaagccgtgacacatactaaatagagatgatagatgcttttatatcaacctgatagcatgaagtagggccagaagtctgatatgagccatgtgtcaatgcttcgagcaataataaagaatcattgaacttgtaaccaagcattccctctaagctcctcacattaatgaactcttcagctttcattgaaattttcctttcaactggaatttcagtgtgaaattctatattcatccctaatgatttcatcaaaagaaatgctgccttttccccagcagtactgaggtaagccccaattaaggcctcaactgaatccgcaatcctcttacttttaatagacattttcctttggctgtacataccattgggtgccagaaaggaaatttttttgttatcacgctcatcatagtccaagcaagggatgatccaatctcttggattaaactcctcagcatgaatgtaaccctgccaaccaaacataaagggcaagagtatcatctagtaccagtgataaaagacagataagtcttctttgaaacatgaaaaggtgaatagaaatattttctggtacttgaaaaataacacaattcattttgtgatgaacaaatttgtatgcaaagcattattttatttcatgacatagccctagccacatagcaccagaaacaaaaattagacctttaaaattgattggctgaaaggattacaagtcggttgagcggattaaagaaagctatttactatctcactgcacacgccgaagatagaatccgtttcaaggataggcagatgctaccattcttcccgccattcttgcttgccaggcaaagtaccgctgcttcaacggtcatgaaagcagaccacgtcaagccaacctcagatctgactacaggtgccatgtgacctgagggctaggtgttggcccaacaaggagtaatatggtctgagccacagccttgtattaacttagggtcagcaccacaaggttttggtcacctacaatagtctatattggcaacttggcaaacaattcaatgcaacaatagagttcccattttcctaaaaaggaaatatgtggaacattgcctaattgtgatatagcagttgcacaaaagaattgaaataggctgacatggtatgaaagatactgggagatgtaggactattaatattgcataaaattagcaaggatgtgcatgtaatcagttctgtagtgtgtaggtgtgtgtttctaaggtccttttacccttctttaacgcaatgatatgcagctgtcctgcgtgttcgataaaaaaaatttctacatgcctagctcaataagaaaaatacagttagcaacaggatctagagtaccacaagattactgctgcaggccagctggcacagagctgcattggagatcaagtttttcttcatttttgttaatatgccttcatgttgaagcctgtattcactaaaaaggtgccgagttgtaacatatttgaggaaagaatccccaagtgtttctaatgattcctgtgaaaattcttcttggcatttctttgttgttaatgcttccaggatctgcaactcatgaaaaaaatgcagagaaatacacatgtaagaaatatgcataggggaagtaatttattcaggtaacaggtaagaaaattcagattgacatgtacattgttaacagtggggcatccaaaatattaattagaaccataaaatactccacggattcaaatattcttatatcttatttttacaatataggaccatcaatccatacatggttctatagagtacaacacaccatcaagcacctccattggagtgttaatgaataatgcagacagctttttgtatgtgcttatatagttacattacgcattaattgaaggtatttatatgcataagaagttattaagtaccactgcctcatcaattgctacaaaaataaccaacttctacatggcaacaaaaggaattatttctttgctaagtgtccccgaaatatcttgcattatacatgacttaagacctgtcatgtttgcaagtagaaggaaccaaaacttatgtttgcctcattaatagatagtcacttcgaagtgctggacatattcttactaaggcactgttgctgcattaaacaactaaaaaaatcagaacctttagttttcactgtcaaatgtcatcactcttcctacaacacctactggtgtgcccaagaatgcacttatatccatttttattttaaattcttcaaaaaataagggaaatatgagttttcttatatgacgacatctagttgatctaggtacttcaataattcataaataggaaactattgatgagaaaatcaaccttcaaaaccggtacgtcaaactgctgcactgttgggcctaattggacctttaatttcacagaaagaagcatgcactggatgcggaacattatggaaggaacatatgagaagatgtgcaaattattggcggacactggtgacatgataattctgcagagttcaggtggcaactcaacactatatctatcaccaggttctgaaacaaggaaaaaagatgaccaaatcagtgatttatgcatatgtagctctgtaaagatagtacaggcagtacattagttggaccattgtctaagagttcagctataacccactgtaacatgcctcattgatagcgatgcaaaatacacatgtatgatcaagcccagcaatatgtgtgggatttaactgtccgattgaacatgaactcagggtatgtcaaatgtaatcttccaagtcccaaatacctcactgcctaattttatagaagctaagctacaagcaacccatcattctgtgctaatatactacaattttgatagtaatatgaaaagtacatttactgctcctgaaaacgaatatagtgtctggccaaataaagaaggattaaggaaaagatgatagagaagcaaaatatatttaaaaaaggcatagtactccaaaaggttattaaactagaaaaaggaaaatttaatagtagcaaaaaatatgtctacaattaaaacaatctgcagtgccaatatttatatcaaaagagcttattggtatgatgtacactctcatagtaagtactcacagtagaatgaaatctaaatttcataaaagtagcgctaaaacatataccatattcagctgaggatattaaatttggaaaactttacattcaaatattggaaaattttaaattcaatgtcaagcaagagtttacattttgggctacatatttaagaattcaattagatgtacagaaagttcagaagggtctgtaactcgtagaaactaaaacacctaaaaattttgtcatcaacaaatattaaaattcattatctaatcatgtttataaatgttctgcataatttccaacttagtaacttcgagggttttattacagataattgagtcaacacatgtagtcaaaacggaggatagctggagaaaacattatgtaatattactgcaaccagagaaaaaaaaaacctttttcttttttagagtagcagttgtggaggaagttccgcactttcacatgtttactg

SEQ ID NO: 9772 - DNA, 4797 bp, Oryza sativa
acttcttattgcatatgccagccttctttggcgataattagttcaacaaagagacagagaattttagtagcacttttaatgtatgtttgctatgtgcttctctgtcaatttgtaagagacaaagagagacaaatctgatgtacagtctaaaggttcctaaaattgatattgcatccatcaaacgttacaaacatcagcacggctggcataccaaatgtataacagtgtaagagacccaggatatcctacctagtctggccattatatttacatgaccatttcctggttcaactattatggatgctaatctcatactagcatcattatattagagttactagctatgctagagtagtgttcgtcatgctcagcagttcatatgtacatgattggcttggtcgttataactagtaagcaaaccttacaaattcacatacattgcacagaatgtctagcaatgtttgtaaataactctttatttctcttgatacaaaaatgcgctccttgcgtattcccaaaaagaatgtctagcaatggatcagacgcttgtgtagctcatgtgtgacacatggagctaggaataggatgatttgctagtgctacttcctccttaattcatccctaaaaaatgactatgatgagaaaaaaaatattatatgctagcttttaaatggggacaaaagaagggacgaacaaatttggtgatcccatactgatacaaattgtccatctagcagtattttgaccagcaaaaactcacgaagtggcatcagcacagcaaagattacttcaccaaaaataactaccacgcattcacagataattggaacctatactccaataccaagccctaagaacgcagatcgagccctcgtccatatcaaaaacccacaaatacgccagggcatgaacaggaaaacccttagattcagcacttggcagccaaaggttgacgcctttgggccaagaacactaccccggagctaaattcacgcgacctgcggcctcaaaacaagaagcgacgctcctctagggccagagagaagattagggggacggaactcaccagtggcacccggacgcggattccggccgcgggccgcggcggcgcgcctccggcagccgcatccattgccggatcgatccgggcaggcaagaacccccgcgattcggccccccaggagccaagaacccgcctctccctcctctcctctcctcctcgctactacaggaggaggtcgccttggtttcaaaccagcagcagcagcagtgggatgggggaggccgcagatgcaggagatgctctcctctcctgggagcttgggttggtttggcttcgaatcttgcggcgtgttcaggacttcaggtcagtacggctcgagctcgagacgtcaaggttctcaagactcgtgtggactctcgggcacatgagacacacgcacagtccacggcgtgttcagacccgtgtactgcactacagcaagggctaccaccctgaatgactggcttcttctgttgaagcttggaaaattgttttgccctgatataagtgattttaatattttattggtgctgtttgaccactcgtcttatttaaaaattttatgtaaatataaaaaaactcgtcttatttaaaaattttatgtaaatataaaaaatgaaaagttgtgtttaaagtactttaaataataaattaagtcataaataaaataaataataattttaagttttttaaataagacaaatagttaaacaatacaggtaaaatgtcaaaatctcttatattaagggacgaagggattacgttttatcttcgaagaattgcagtctcagtagaccccattgtaatgtttcttttcctcgactctaaacttccgtaaccaaaacctagttagtcatttattggcaaaaaaaagttcgcttaagggcctttctagtttttgttagaacatgagtgttctttcataacacatcttgtaagtgaagatttaattcctgagtaatatatccctttcccccaaaaaaaattcacctcccttatttttcgtttacatgttttttaatatgtaaaatagtgtattttttgcaaaactttatatatataagttgtttttttaaaaggtaaatgagtccactttataagtttataatagttaatgttcaattaatcatgtattaatgttttttcgcatgcgctaaaaatcatgaacacagccttagcttttaagtactactagaataaatagaattggggataagaaaagtcgtactagttcgtcgtataacggaatccaaacaagataagaacgacataaaacaaagcaattatcatccacggcataatagcttgaagatgtactttcgtgtttagtttgtatggtatatgattttctgaagtgttgatggaatttataggtaaattataaattagtaaagatggcttgattactattttgcttatgacagatatgactctataaaagttaatcgcacggctataataaaataagaaaagtaaaaattagatctaatagactctttgtaaccctcaataaaaaaggctaaggcagccatggctatggtattggtgtggaatcatgttgatcaatgaaaggtgacgaaaacctattgaaaaattttgttagcaacaagagatctaagaatggtgcaggagtttaactggatcaaaccgattacttaatataactttttatgttaaaacggattcatggtgtgataataaaatgcctcaaaagttctattcatatgaacattgaataatgtttcacaatttatttaaaaaattcaaacaaataaaaggtacccttcccaaaaggtttaggcccctttgattcaaaggaaatttataggaattttagaggatttcattcttataggaattttttctacaaagccctttgaatcaaaggaatgaaccatatggaatcctatgaaattcctatggaatgcctcttcacataaaagttttggaggaattttaacaagaggtagaacctcatggaagaaatcctttgagtctttatctctcctcaaattcctgtgtttttcctgtggtccaatcaaacggtcattattatgtcttttctgtgttttgcaatcctctgttttacactttcattcatatcagaatcctatgtttttcctattcctcagttttttcattcttatgattcaaaggggcccttaacagtggcatatctacatgttgagaataaaaggcaatagctattaatccgatcagatatgcaatacacattttttatcagtacatacgttagctcattcctttatttgttttgtttatagccataaaaacaaacttcgtgcatgaaacagtcttaaactctctagaattttattaagaaaaacctccatttcgggcccctttaaattttaggaatgaaaaaacggaggaatagaaaaaacataggattctgataagaatataagtgtaaaacagaggattgcaaaacacaggaaaaacgtaggaatgatcgtttgattggaccacaggaaaaacacaggaattaaatgagagataaagactcaaaggattttttccatgaggttctacctctttgttaaaattcctccaaaacttatataggaagagacatttcataggaatttcataggattccctagggttcattcctttgattcaaagggctttgtaggaaaaaatcctataggaataaaatcctctaaaattactatgaattttctttgaatcaaaggggaccttcaaatggtactcctatacaactgcaatttgatactcctccatgtagaaacctccatttcaaaacagtgatcctattcgaaaacttcacgcctccgacacgtggggcccaccgtccaagtactcacatgccacagcagcccacgtactccgtttcctctccagtccgtccatccatccacaaacggctgacatgcgggccccacccccacccccttgttgtccaggaagctccgcgaacgaacaaactatccgtgggcttccttcctctccagtacgcgtcgccccgccacgtcagcgactggcacgtggggcccacgcgccggccaacctgtcagcgacggacagcgcagtcctcctcccctccaaccacacgcagcgaggggagaggggatgggcccacgtgtcaggttgccctcccgtccagtactctgatactctctctctctctctccctccctcccgtgtccacagtttctctctcttctcttctcttctctctctcagtctcactctcccaatccgcctcggcccgagcgcgcgcgcgctttccccccctcgccgccggcgacgagctcgaggcggcggtgcgctcgcctacctccggagggcggagcggggggatggagcccatgagcgtggacggcggcgggggatgcggcggcctggacacgcagatcgagcagctgatgcagtgtcgcccgctcgccgagcaggaggtgagagcgagcgagcgagatccctctgctgctgctgctgctctggcttttccgcgttctggtctcgccgttcgtcccgccggcgatggctccgcggggggcgcctcgatctggggaatatggtggcgctttgatctgttcctagggttttttttgttcggggatgttgggttggggggttcggatttgccgtgtgatccggtggttcgcgagcgattggcgcgtagtttttgttgtgctgggtgatttggcggtttggagaggggttcgagtgcttgtttgttgtggctggcgagggcaacttggaatttggtg

SEQ ID NO: 9773 - DNA, 8939 bp, Oryza sativa
ttacgtaaattttttgaataagacgaatggtcaaacatgtgagaaaaagtcaacggcgtcatctattaaaaaatggagggagtatcttttactgaccaagaaacccaaatctaacaactgacgaggttaggcagtcacctgaagaacaatgtctgagcatgccttcgcgctcactaaagcaaatacaaccaaagctatcgcatataaaccaagatttgccacctgcattttccatttgtagtgactggtgagcatcttcctcatgagaacaatgattgcagtggtacaagacacaggagactaaacaagtaggaattatttttgaagcacatatcaggccaccttcaatcagataaaagatggcagtaaaagaatactaccatctttggtatagaaacaatgcactttgtcatgtgcaaaaggttattataataacaagagttcagtggaagaaatttcccggagataccttaagtaaaaaaagagtattctagtaataatatgtttccatgctaaaactgtagtacttaccatagtgaacgcatttctgcagcttgctaaggctacccggcttgtggaattcagtgtcatgcagttcaccattgacctgagaggaagaaaaccatgtcactatgccaagccagagcccaaacatattgcaaattagatagaagcttctgtcaaagttcaagtgatcaaatttacatgtgtgaaacttgtgtggccgcccagccgatgttgaagacggcagcgaagaagctgtaaccaatggttctcacaaggtaggaatcggtccccaggacggtgcagagaagacatccaccgaagacagaggagaaggagatgccgactaggattgatcctccgatgtgccacagcttgaagtgcccaaatcggtcgatctgatcagataccacatacattgctcacagatcagttactgtattttgctaatcagcgcgcattcagcaatagcaaacggtttctcaatttatttagtaccatctcgcctgcaagaatcgtcattaggccatctgcaacctggccagaaagcatcacaatagctgcatccctgcaagaaattgaacacaagccatgattaataaactgagctgctgcagcaacattactttgcttcagacaaatcgaaattccacacagaccactagtgtgattgtgagctgttgtctacgtgggtttaattaattaattagcaatgattaccttggagcaagcccgatttcttgcaagaagaggagcaggtaagtgaaccagcaggcagacgtgatgtcattcagcatgtggccgacaccgtaggacaggatcggccaccgtcccagaggcatctgtccctccgccaacacctcgtcgcccttcgcgtcagccatggcgatcgatcgatcgatcgatcgcagaggcaggcagtacaccagtttcccaatgtgtaatcttcagctacgatctctgaatatgcagaggtgattgcacacattagcaacagacagggaataattccacgcctcatgagatgcatgacaaaaaggaaaaagcgacttttatttgatggcgatcatgcgtaagcttgcgttcacgccagccggcgccgccgcgcgcgcgcgggatcaccgcacgcgagcgacgcgtgccgccccgcgccgcgcgtgcagccgcgtcccctccgctcaactcgccgccgtcctgcgcccgcgctagccgcgctagggctacacgttgccgcgccgcggccgccgtcgtaaaatccccccaagaaaaacggcaatgcatatgaacccgcggcacggcgacgccggcggcaacagcagcaaaaggaatgcgagaatcgggagggaatttcagaatctcattcgcgaatttcgcacgcgtaccgagatgagagcgcgcgcgcttgctgttcgtcgaggaggggaggagagagcgcgggacgaggcgaggcggatccggcggcgaggtatatataggggacgagaccgcgagcgagacggtggtgatggtggtggtggaggtaggctagggcatgatagaggcggcgctacaggacaaggaaagacgaagaaggaaaacgccaagtccgcaaaattgaaaagtggaattgggtgatttttgcgtccttttcgttagtttcctattcttttacggcaaacaaatcgcgctttcagacttcagaccgcatactaaagatgatttaataattaatgcaccaaaatatatttttaactacttttttattttccgaattatcatacaacaaagtttccttttataaatactagcaaaaatgcccgtgcgttgcaacgggtaaaaaaaataatccaatgacaatagacatttttcaagcgtacccatatcaatgataatgtttctatggatcgttgtagctaacacaattagaaaattagagcatctttatgtaatgacccaaactcgatgatggcaatctttttaccaatgcttgctttaactaaaataattggattattcatataacaatatacatataataaaaaaatattctttcaatattattcttgcaaccaataataggttaatcaaatcctacactcaggatcaagtctacacaaaatagtcaccgtgcactcttctctaaataacaattaaaaatatgtttatttttaatactattttcatataatatgttattaaaaaaagtctgataatgataattgcatacaaaaagtgcagggattagatgaggaaacaaatgatgtgtaggagatggaaaaatatcgatggatcttatccgacccaagcgtccatcaattttatctcgctttgagtcggacggtttctcggagcggttctttttataaacggcggttttttttctcgcattgagttggatggtttcctctattttttttttcgaaatgatggtttttttctcgcattaagtcggacggttttctcgaaccttattttgaaacatcggtttttttcgcgtgttgagtccgtttgttttttttggatctgttattttataaacagtgtttcatcggttagttttttcagagcggcttttttttataaacagtttttttttcttgtgtggttttttgaaaccatttttttagaaatggtgtatttctttctgatagtttttaatagcattttttttgtttttttcagacgaaggaaaccgtatttttcccgcgcatttttttggaaattatttttttcttgcgcatttttttcctttttaacggatgatggaaacttctctttctaaaaagttagattagattgatagattagattagagttaaagagatatatacggataacaaggggcgactttaagtttggtcgggtcgttttttcctccttttctttttacggagtttgagttagatgtttttttttctttttttttattacggacgagaaaacctctttttcacgagtcggacttttttttttctctacgggagtcggtccttttttttctttttttacgacagaaggttttttagagatagatatttatttttaattaggtatttattcacgcgtgtttcccttcggatagaaactttttttttcgcactattctttccttttgtaggaagatggaaactcttttgtcgctcggaattttttttatttggaatcggacagaaactatttttgtgggtaatttttttataattaaaaacggaaatttctttaccggttttttttggatcggacaaactggtttttttcgcccggttttttttcacccggtttttttgacggacgatggaagcacctcttatttttttttttaagtagtagtagatttaaggtttgtttagttgaaaacttgtcaaagaccagtgccaaaaaacaaacccatgacatatggcaatatgggacaatgagttagccaagcgtgatttatcatagttatagcaacttactaaacatctactcctacctaatggcatgtttaacatgtggcatgataaactgtaacaatgaaccgtacatgcccgaaaagttgttgttaagcttaacatcaacatttctctctcatttcccctatctatgctatttcaacatttcccctccctcttctatttcaacatttcccctctctcttatatttcagcaaatttacctgattaacgacactaaaagttaactattaattgacgttgtacatgtgaagtggcccataacctagtacctgcagtgatcttagtagcacctcgtgtcgtgagttcaaatccttggggagcgaatttccccctagtcggcatgtgtttcccacactggccaagttttttttaaaaaaaattgatgttgtatatgacttgtggctatggttagattttcaactggagtgaagttgtaacaaggttgccgtactaagaagatgcgattggatcaccattcttgaacccacaaacacaagatgtgtatcatgttctaaaatatggatatccccttatattatgatatttttctcgacaataaatactagcatgttgggtaagcacaatcctcgcatggagaaatgctattcctttgctgggttctctaaccataataaaggacgccatgaacgtggccttaagattgtggatgaattagttcgaataatttatcaaaaaatgcatacatttaatttgttgtcaaactttggtaaatacataagaaatcctatcaaaattttaacaatattgttaacttgccaaaaataatatggccacttgtgtcaccaccttgtcatgagctctccctgcacatcatctaatcaaaagttgcatgctattgctcatttcatatcagcttttcgcctctggttctttgtttcaggcaacagagaagctgaagctgtgtctcgctgtttctgagtcaaaagaaataatgtgaattcaagagcaaatcattttgtcaaaaggtcaaatttgtctctcaaaagtcatggagggcttggtcatccgagaaagcaggaaataagcagcctgccttgaattccaaacgtactaaatatagattaattatcataaggccccttgtcataatcttctcggaaaatcgtgatttgtcaggtcttggtaaagctaatcagaccggcgaaagggagtgctatgcattatttccttcttcgccagtagagtagctttcgtgtgatgtaatattatctgaacttaataatactactacttataagtcaaatcgttggtaaaaacaacggtaatgacgtattgtatactctgatcaatcttaaatagagaccactgtccttagggtagtatttttagtaataatttttttcagttaagctaattttataattcatggttatttatcccgtaaactttgtaataattgggtaaagcttctctgaagtaaagtccaaaataaattgtattattaaaaagagttagttactagctaaactaggtagctaatgtcatttcattactgcgaaaacagtctacctaaatacctaatgcagaatcaattatcaggcatgtgattttgcagcaatcacgcagaggattttatcaggaatcacaaatatcgccagccgaaatcaatgttcatccagcagagaaaaaaaaatatgccaagttgtcaaacacatggaacaagttgggtagcgacaagcatccaagttttcttccttctcagatggatccaattaagggcctctctaaccagatagggtcagtgttctaacctgctgacactcattagccgcccatagtatgttcttgagagtttgacaatgaagggcatcatactgggttagcagccactgacttgtgcagttctttccctggctttgacttgcatgcgagcagagaggatcagcgtgacaatgaaaatgaaaatatcatcattgacgtcatctcctgaaaatgatcttcaaacggccaatcgatttctccataatttgccatgtgctggatgtgatgatattatctgtactatctttcctgggctgatgtttatcagcaattctctgtagctttcatgcatttgttagccactagtgcatttgatagtacctataacggcttctgcatcagtgcatcacaatgctcaaataaagaaaaatgatgagattcgcccacagcaacagagttcaaaggacatacttcctcatttatttttaatatttagcgcagttgacttttaaatatatatttaataatttatcttattaaattttgtgcaaatatatatatatatatatatatatatatataataagtcatgtttaaaataactttaacaacaaaataagtcacaataaaataaatgataactacataactttactcaaatgtatatcgaaaagttaatggtgttaaatattaaagaaagcaaagggagtatttgatacatgcctatgaaatcttcttcagacataacatccttaaatccaccaaccagattccaaaactgttctggtgcataacaaacaggcaaggattttataaagcataaacagttgaacaaaacatttattcatttgttactctagtcggctgatacgatcatacaacacagtttgacatgcctaataagccgaaagaaagatagacatgatgattaggatgaaggtggaccaccttcctatccgaaaatgtagaacatgacagccgccaatgcaaccattactgccgtatcatcagcagtatcagctcaaccccaaaccaggaagcatcagcacactgaaatcatgaataccactggacaaaccaccgatgctatggaatatttcttactctcacaccccaaaaaatttcaccttggtttatagacaaccgaagctcccacttcctctcctgcatggctgcatccagcagccagcatgagatttttccggtaccggagagattgagtaggaacgagatcgctagatgttcattcaggcaacagaccatctctttgctggagttctggcacccatttcagcttccgattgatcggccctttcaaaatttgagaatgttcccagtttccaacttcacatggagccatgctcaaacttggagcacttggcaatggataatgtgagtcttgaaattacgacccgcaatggtgaaccacaagtttgctatgaaagacctgtgctggcccttccgagcaaaaacatcccacatgtgagcattgttaatctcgataactgttggtgtgtttgagacatcgacaagagtgatgctcatattgttgcggataatgcagatctttccatttagggagaccagagctgcagcttcaaaagctcgtgaattgcccagatggcgcctgctgtccatgaatctggtccacgatcgtgtgtccctatcatagactctaagcttgcatccgtcccggcattctgctgaataaagacgtccattaaagcaaatgcttggattccgccagcccgtaaccatttcatcagcagtgactgaccatacgttggatgttggcatatagacctcactcacaacctgacgatgagaatcaagccctttcaggaaccatttgccatcatatacaactccaataaaaggtaccattcccgtgctcatttcactgatgtaagaccatctattcctgtttgggtcgtaaaattcagcagatcttagagttctttgtatcccttcacactccccaccagcaacatagaggcggttgtttatgacacaggaaccaaagcagtgacgcttttgtagcatatctggggctcggagccacttgtttatccgagcattgtaaaatacaacacgcctcatagaccctcggactgggtctttgccaccaaacaggtacagatagcagccactaagaacagcacagccaaagcccacggcctctgaatactctgctggaactggagggagtgacttccacacctggtgaactgggtcaaaggcatgccaagaaatcttccgatcacggtcccttttgaagacaaaaacccattcttctgccatgccaagtttcttacgcaaggaataataatagttcccagataacagtcggttccaccgtttacagactaaccgaagatttgtgtgctcaagtcgagggacccgcatgaggcaggtaatagctaggtcgtcaggaaggccaggtagaagtggtgcctgagttcggcacctctctttgtgtgagctccttgacttgcgcttgtttggtttaatgtcagggtgcatgcacagctttgcaccagggacaaacttcctagcactcacaacagttttaagacctccatctaccctgcagtaacaagacacagactctacctgcaaatgcattggtaaatgaagttaggatatgcttatactaacctgaatgtggaacagcataagtgaaacaaaaccacagttacaagacacagactctacctgcaaatgcattggtaaatgaagttaggatatgcttatactaacccgaatgtggaacagcataagtgaaacaaaaccacaagaagtaactcttctaaagacacaaacgtatctttctgtccaggcactagcaaaatagtgtgacgattgcattgcatgatgtttatctttcttatatatctagcaaaatacccatgcgttagcaacagattccacaaaagtataccgtaagtttctaaactcgaaaattatatgtatattaatcaggggggaatatatataacttgcaaccgagcatcaatccacaaatagccaaaccatgtgcataagtgatctatttgttcactcgcataagatcccaccaactctggaggtgatggtgggatagcaggctcatcatcgtcactattcactatgatcgctctactgtataggaacggaattggagaatgtcttttgctaacttatggatacaaggactagatgttaaaggtacaggctttggtttatcctttctccattaaactccttgtataagccatttttaagtgtgacatgagcact

SEQ ID NO: 9774 - DNA, 16177 bp, Oryza sativa
agtcaacggcgtcatctattaaaaaatggaggtagtatgattttacagaccagagacttacctccatgtacaatagtatacttgttactaagttgttcgtatatttatctgcagtaccgttggatagcgtacgtttcaatttttgtgggatgctgcttcctagtggtgttctatgctggaacaaaggagccgacgtatgtttttcttttttcagcgtagaataatgcattagacttttttttgggccgtgaagggtgttttctgaaagggagtgaatttggttttgcagtttgcagtcgggatctgactgcaagaaatcggctaggatttcctggggctactggttcaagaaggccttgtactaccaagtcgctctgttgtatatgcttgcaagattgatcacaaatgtctctcaggttgacatcgtccccactcagaatagaaaatattcttaattactactagcaacatgaaaatgcacattgcatactctaccatatctgttccactgtgacactgattgccaaatacgcatttcgctccctaagttttctctcaagtctgaacattagtctaaaagaatttttttttcagtctctcatcgcgttctacgtcactagagacttgaagatgaatgagtactccaaagcgattgtgagttttcaaacctttttggttaacctctgtccttagaagataccaatcatctaattctctaatttttgacctgcatatatgcagataccagccatcatattttgctgcagcttcctcgtctctgttgttctccaggtctactcctgtcagttaacccacttatactagaactagaatataacaagttaagttttttctcacgtattttgcaagtaaaatgcaggagataaagtggaacagccgccgcctgaagtcgctcctcaccatcggagcaatactctgggtgatcgctggagccgccgtcttcgtcctcccgagtcagatgcacaaccttatgtaccctctcgctatggtcatcggagctgcaaacgccctcgtcatggtaaagaacaacaagaactgcacttctcatttagagaacaagaactgcaattgtcatttttgcgtgatgggacgaatgatcttcgagttctgcttatgctcatgtgtgctgatttcctgatcaggtgaccacaattgggctagagagcgcgctggtaggagacgacttgaacggctgcgccttcgtctacggctcgctcagcttcctggacaagatgtcgtgtggaatcgccttgtttgttctagaatcatacgaaggtatccgctgtaaaaatggcatatttcagcgcattaaccacctaaattcaggatgctttggtttgtggatacaattgatgatcactcattgaaattatgtttctctcttattgcagattcgattagctgcggcgagacgagggggctgtacacggtgagcaggtttgggacaggtctgatcccctcgtgctttgcagtcttcgcgctgctggtcacctcaaccctgaagctccaggacaccaacccgagagctgccgccgctgcactggaagctccactcctcgtctgaagcacgcctccgagtgtgcttctcttaaactacaggacaccagaaaaatcgactgtatgtatcactgtatgtatcacgggaagaagaagaagaacatacataagatgaaattgcattgcagaaccctcttcagttcggtctgaagaggtaagctgcagtctgaagaggtaagctgcagcgtgatagtgtctagtaagattcagaattctggcccgaatcttaaaccttcgatgcttgtaggcagttagaaatgatctaatcagctctgttactgcttcttttcaattagatttgaaaaggtccaatgcttgtagcaatctgtaccagtgttgtatcaaagattcagtttcgagtgaggtttccgtggaaaacagcaaaagattcagttttgagtgaagtttcagtgggaaaaacacagtaacttgtttcaaacaagttctctacagaatacaaacaagttctctacagaaagatcacattattgtacaaaatgcaacagcatacagaaaacggcatcgtgtggagagctacagcaaacacactgaaaaacatcactgaaaagtgctatgttgacatgggctaatcggtgtccgtacgccggcggctagctcagagctcgtcgaccgtgcggggcttttgcttgccgtcgacgtggcggtggtgatgcttcttctccttgccgtgatcggcggcgtcgtcggcgccggtgacgcgctccttcacctcctccaccttctccttcgccttctccttcaccttctcgtacccctcgttcgccttctccctcgccgcctccgccgtctcccacgcggcgtccttcgccgcctccgccttctcccacgccgcgtccttcgccgcgccggccttccccttcgccgcctccttggactgcctcgccttctcgccggccgcctccgccttctcccgcgccgcgtccttcgccgccccggccttctccgccgcggcgtccttcgccgagcttgtcttctcccacgccgcgtccttcgccgacccggccttctccgccgcggcgtccttcgccgagctggtcctctcccacgcgctgtccttcgccgccccggccttctccgcggcggcgtcggtggattgccggagcgtctcctgcgccttgccggccttgtccctggcggcgtcggtggattgccggagagtctcctgcgccttgccggccttgtccttggcggcgtcggtggattgccggagagtctcctgcgccttgccggccttgtccttggcggcgtcgtacccctcgccggccttctccttggccgtctcttcgaccttggccttgccctgcttcgactgctcgtgcacctcggcgcccctctcgccggccgcctcggcggcctccttggtcttgtgcttggcctgctccgctctcctggtcgcctcgccggcggcgcccttcgccgcctccttcgtcttctcctttgcctgctcagccttgctcgacgcgcccgacgccgtcgcctccgccgcctccttcgcgtccccggccttcttgctcgtctgcctccctgcctctgcacagtcgcgcgcacacacacacacacacacacacacacccacatgttaattagctccaacacacgatggcatcaggcatggcaagatgccgccggcgagcgcgcgcggcggcgcgcggcgagtttcgacgtaccggaggcggtgtgctgggcggacttggcggcgtggccggccttgcgcgcggcgtcctcctcctcgtcgacgtcggcgacgtggtgcttcagcccgagcccctcggtgatcttctccttggcccagcccgtccacgactcgtcctccttgctcgccgcgtcctccgtgccagcctccgccttcgtcgccacggcggccgccgccaccacagcaaacagcagcagcagcagcgtcaccgccagcctcctcgaccgcgacacgatcgccattgctcgtgacgtacgtgaactcctccaaacaagaacagataatcgctttcgcgtgctagagaatacgagaagtcgcgaacccaacagtgcggtgatcacgctggggtttatggggttttatgggggagatgggtgaggacgcgtggagaggttggcgatggcgaggcgggtggccgcgcgacgggtgtccgtctcgggtggcacgtcgtccgccgcgggctggcacgtacgcagcgcgagtagaagcttttttgggttgggcaacttggaatttggatgatgaagagggttctaggcgtttcggctcgacccctttgacgttgcgtgtcgcggaggaggcagcacgtgtggtccgattttgggtcggccggtgtccgatggtgtgatggttttggtttggtatctcctttggttgccaacgcacgcagggagatggtatggtagtagtaaagaaatggagcatgttgaagcatgtttgtcgtcatggagcatcgtcagcacatcacggcaccaggctagaaaagtgattcgtatcactcgatcgtaaatcgtaatattagatatcttaatcttaattattttaatattttatttgttttatattataaatcgctttgaattttcttaagttcaacttcttcaagtatgattaagtttatgaaaaaatttagtaatatctacaacacaaaattagtttcgttcaaactaacatttaatatttaatcttttttataatatgtttgttttgtgtcaaaaatattgctaaattttctataaatttgagtaaatttaacataagtttgattaggaaaaatattcaaaatgacttataatatgaaaaagagagtagttgatatcttgacttcctagttcctaactatcgaaataattggggttaagattttcggtattgatatggaagtagttcaagtgaacttattccgctgggctagggggaagtaggacggcccggttcgttcagtccgtatcagcccagattccattgtggggccgaagttgtacattttatgatgggccgtgccccctgataagttgggccaaattctaactagcccatttctcctccaacaaaaaaagctggtccaaaacgtgacacggcgcgaggccgaccgaccgaacctgactgcgaagcgtgccgaactcagctactcctattacccaccgcggtagaaagatctgccacgagttgccgtgtccacgttccactcttctcttctcccgattttactcccaactttttttttcctctctctctctctctcgattttctcatctccactgctccacgcttccagggaagaacgtagaaatggcagcttgcttgccatccctctcaccgccgccgcatcaggcgccggtgccggcggcgacgaccgcgctggcggggaacctgacctcgtccctcctctccctgcccccgccgctgccccgcctcgccgtctcgcaccgcagggcggtggtcgccgcggcctcgtcccggcccccgcccccgccatcgcgggaggggggtgatggtggtggtgaggaggaggaggaggtggagagggcgatggggatggacggcggcatccctggcacctccggcgagttcctgcgccgcgtctcctcccgcgcgtacggcatgcggcgccacctcatggaatcgctcgactccctcgcctacgatggtaagagttgtcggatcctcaccctcttttcgtggatcgtatccgttcttgatcgattattaaggagtaaaagaaaaaaaatcttcgatcgatttaggggttttagtttttactagggggtttaccgagatcgctcgataaactgcgttctccatactcttgaagtgtccgaagatttcatctttatctgtttgatttggcatcagcaccaacgacgtgaggcttgtacgtgcacgcgtacataccgtatttcgtgatatacgtgtgattcgaggtttgcctagttaagacttaagagcatgcgtgtacgtgacaattaacagtaacaatctctagctgtttccacagtttttggctctgctcaatgtatcgagatttgaatgttgacatgtcattgtaacaaagtgctgaattgacatgtatgctgtagtaaaacataccatcctgcattcagtagtatcagaaacactgatccccactccctagttaagctttatattttaacactttgatttttcaatcaaagatcggttagaaatggtgttcaaaagatttatgcttttagaaatgctgttttctttgtatgctttgctaaactgttttacaagcatggcagtctgaaattttactaactggtgtttttcttctggttcagtgttggagacaaacccatggagagaagactccaaaccagtctatgtactggctagaagagataaccatctatggacaatgaaaacccgtaggagtcgcaggttagagttattttgctgctgttgcgcttacacgtgtaattttgctgttactgaacattctgaacaagtcatgttatctctattttcttcagtgaagttgaaagggaacttggaatgctcttaaagggagggggttcaggagttgggactaaatcaaaatactctggttccaagtttaacatgcttgttgaagatatcagagagggaatactggtgagtagttaaagagaggggttaaattttgtggatgatttctttgagaaccgactaggtgtcctgcttttcctctgggttttcagttgtttacatagctacttgcttgacattctcttgaatcatatcatcctttgtctcaggtatttgaagacgaggacgatgctgcaaaatactgtgacattctacagggtggcggccaaggttgtgaggggattgcagagatagaggcatcatcggtaagaaatttggtggacatgggccttcatagtaccaatttgtggttggcaattgatcatagtagtagtacttatgtaccgggttacactcgttcttgtctgcaggttttcaacatctgccataaaatgaaagctcttgccgtccttttccgtcgtggtaggacccctccattgcctcaaagccttgagcgcgacttaagggcaagaaagagatcattggaagactagagtctttctgatacatagtatagaacttctaattgtatattcgtctagctgttgaagcaaaggccctaggccctgtatactacgtggtatgtagatccacaatagcacgtggtacatacatccacaatagcctaagaggaaaggaagtcaaatctgacagaaaacatgtccaatagctcgagatattaacaatctcagtaaattgattattcttgccattatgtacattctaaatgcttcagtttacaatgaataaatgagatctgttaagttattctctccatcttttcttgaggcttgatgaacaatacaattatgttgccatcatgctgaattgctgatgatcagatgagctccaaacaatttggtgtagtgactgccatctctattactactggcagtgaatgcttggaaaagatcttctatttttgaaatgaaatgcttgaaaaaactttcagggtgtagtcttcttttcagttagcttctccctcctgtacctcttgaaatcggctgccaggccattgtcgaaatcctgcttcatctgcagtgctagctgcctcagcacctgcaccatgatcatcataaacaatcaaagacagaatgttaagattttgcaaagcagtatatatatgttgactgttgttaaattatttaaagcttttcattactctttggatagtttttgaacaaccaaagaaacatccactcgagggatcaaaatagctttccaataaaaaattcagatacccatcagctagggataaaaacagttctccaataaaaaaaattcagctacccatcagctaggatgagtcttttgacatgggtcacttacatgcgggccttttggaaatgtgggacccatataccagtcactcaaaatcagaggacagagtcgtgtagaggatctttccagtttccatgataccatctctttctgcttgcacaaaagcagcgaaggtgctgaaaaatgctcaccgtctcgccgacgcctctgatgacgccctccggcaccagcgcgagcaccggcggcaggttgaagccgacgctcatctcgacgtggcccctcaggctcttcctcccctccggccgcgggtacagcgacccgcggacggtcagggcgaggtgcgacggcatcgcgttgctgtccagcccgtccagcttgtagtccgtctgctcccccgccatagcagcgtttcagagctttcagagttctgaactttctctgacagaaaatgcaggaagagaaaaataaaatgggcggcgaattgttaccacttccatgagcaggaggctggttgccttgacggggacgtgcggcgggtactccttgccgccggatttgcttacgaaccgcatcacgatcaccggcgacgccgacaggaacaggaactggatcggcagaagctgcacgctccattcttcctgcagaaaaaaaaagaactctcttttagcctcgcagaaatagaaaaagctgatcatccttgcagaaatgaagccatgatcgccggagagaaattgttgctgacgacgagacaaaaaaaagagagcaaagcttcaacattttgcatgctttgcagtttgcacaaagtgaagttgagaaaaggaaattggggaagaaatggtgatgtgcaactgaactcacatcactgagcttggttctcttgcgcttatcagggaacacggctccaacaatcctgggcctgttctgaaggtactcatcgatggatgcctgcatcaggaaattcccagggaagagtcagatcatctcaaagagtgttaactgatcatctcccaaatcttacatgctacatgcatcaggcaagaaacctacccctggagtctcggtcatggggatgtcagtgttgaatctgtaggagaaggtgaacatgtctctcggattgatcttctccttcgacttcgacttgttgccataggaaggagtcttgagagtacatgtcgtgagcatcctcgacgacggtgaaacacccagaggaagatcatttcttgatcttgatcttgatatttctcccactgatctggatggtgtcaccctggtgcagatgcactgcatgctcctgctactacctgcaacacactacttgcactgttacattgctctcgtgtattcaagtgtaagtagcatgctgttagaatattgtttccttgaaacggaggagagttaggcacctggatggatggcatgatgagatgagctgacacttagcaatgccatcttcttccctgtaatggtatcctttctcttctttttcttcagagatggaagttgtgagctacacttgttggttgctgggccaataagtaaactccaacgaggtgtgcagaatttgcagagttgagtattcttgcaagtaaacgcaaacggagtctgtaggccctacagggcgtttatttcttccggggtttgttaggagtttctgaattttgtcttggtttttacggcatgtggggcttcgactttcaacttcagtgtttcatttcaactgcggccttctcttctctgacgaggtttgccggcttcagtatttcaggcttgtaactctgaaaacgaccaaagggaaaaataacgaaccgaggcgaatgaaatttcaagatgcctgcataaaactgaaacaggtctaaaaatttgctcttttaaaatttttatttccctttttttcttggctgaagatcatatgtgaacgtgtaaggttacggcctttgtttcatattataagtcttttgaattttttttcttagtcaaccttctctaagttgttattaagtttttagagaaatattagtaacatttccaatatgaaacaaacattgtatcaagtttattcaatgttaaatataataaaactaatttggtgttatagatgttgctagttttttatgtaatattgatcaaacctaaataacattgactaagaaaaatttttttttctttctcgcccccttgtagagaatcagaaaagaaatatattttctcagcataatcaaactctttcttgaggaaaatgaggtgtgtgcaattgtaatctaggacaaacgaaggctaaattgagtcgataaattgtttccaaaagataggctctttcagatattttaacgagtcttcggcgtgcacgtaagctcgaacacgacaaccatccaaaaacactattacacgtactatgtaatagtatgcccgggcataacacatgctaaaatcatgtattgatttcttacttcagatctcctaaaccatagatgcagtctttgtgcccattctatgcagatcatcaaataaacctctagaaacataaaggaatcttccgactagctccgtaagacaagatggtggggctagccagcctaagtttaaagctacactccgggtatttatgtttttctttttcaaataaacctctactacaagcttacttgggtacattctagttatgtagttgtcaagagtattctcagtataattatatcaccttaagtaattgattggattcaataaaaatttccataaccttaaaaaaaacgagcttagttcaagcgatcatatcagacttcagacatccccatgtgatggcctaagtcttgacagtaatagtaggtgaactgccatatttcaatggaagatcccaaagaaaatttgtgcactccactattgccacaggacttgcagtaccacggttattgctacaggaatagcagtaccaaacaatatcggagacaatagatgaaagcgataggcctagacttcacaacggcgagatcacacgtaacgtaacccagtagagattagaagagcagcattaccagcgtccgtttagataagaagaaagcaaacaagtgaggaaatttcgctacaatgaccaaaggaaaagaaaatggcactacagtttacaaatcatataactgcacggcacaactctgaatttacttgcaaaaggtcaaaatctgccatgtgaccttggccattgttacagatgtttttttttgtgcttttttttggaaggaattaaggaattgcattaagctaaaaatggtgtcaactgcagtggttggaaatttgtattttcagcaatctgtttgagttactccattatccgtttctgaagattttctgttgttcagagctcgattcttttaccaaatatgccgaaaaaaaatatcatactgctgttgatcatctcctatggctatacacaccccaccacggcaccacccgccgttcgccttggcggcggcggcggcggcgacgacgacgcagagggagcatcgtggtggcgcagccgcgtgctgggcgcgccggctgggtgattgataaaatggcgaaaaggaaggtttccgatgggagcagatcttaatcccttgagggacgttactttgttatttacatgtctcttaaatatctctgtaaaattttaagaaaatatattaacatgtgatttatcactcacaaatatgtaagttcaaattcatcatctacatctcgcaaaaaaaaacaaatttgagtgtgaatatacgctaactagctgtagtttaatttattttttgttgcaaaatgtagaaattaaatataaacttacatctttgtggagtgatatatcacatattaatacatctttttaatttttttcataaccatttgagtcacgtgcaaatagaggagacatccctcgggagatcaaaatagtttcccgtttctgattgggctgggctattgtctgggccacactgatcacctgagaagttttactgggccgcaggccgcgacgccgcgtgctcccaccgtccctccctccggcgccgccctcatcttccccgccgccgcggcttcctccactcccccctcccgccgccgtcgcgcatcctcctcccctcccccatctccaaagcgccgcatctcctcccaatctccaccgcattagtcgcgggctcgtggcggctgaggcgtcgatgtggcggatgaaggagcggaaagccccgtgagtcggggtctcgccggcggaataccccgtgagttgcctgcgtgggatgattaatccgataatttagatgggcatcccctgctactgctctctcgattaagcaacttagtttttctcttcctcaaaattttcaattatcttagattgattgattggtacaaacgtcagactgcataatcgtgtccatttttatccaggatactgtgatttccaaccagtttagaacttccctgaagtacctaattttactcttaagcaatagaaaaaaatgttatgcatcagtgtcaacaaaaaatggtttgtatagcagtttcaatagatgaactttcaatttttcatccaacatttgtaagtctgttgtacgtagtaccttggtaattgacgttatacagatatactgaacgtgtagagccagttgcgttatacagaattttcttcctctgaactctattaagtagtcatatctttagataggattcttctaaacatagaagggtgtagttcataatgtgatctagattctattaagaaataattaatcatgttgaattcaagttgtggcatgttaattgcttctgcatgttgtcactaggtacagtatatcgcaaggtttactgcttcttataataggatgatgaaatgaaggattcagtggtttggcaaaagtattgcacgctacagcaaatagcatagtattgaaaggtgatcaaatgcttctactcaaaattactgctgtagtgttgtattttactactaccagttgcttttgaccaaatttaagtaatgaagaatccaggattggttgacgatttactcaaagtttagagcaagttcaatagtatagcccactgctagctccaatttatctatagccaatctaatagtcaattcatacaatagttgcttactatattattaatatatggtcccacatgtcatacatacattgcgtcttggagtccgtgctgcagctggctacagatctgtagcccgctgctcttctctcttatcgtttatctcattaaaatatgtttatagctggctagtagtctgctattgtacctgctcttatgatagtatgcccatctctgaattttatctgctgattaaaataaccttccattagacagaagagaggacaactgtgttttttagctaatctgacgctatgttggctggcatagctgcttatgctgctgagttaattttctgcataactgtcagattgtattagagatatcaatatgcagaaagttaagcatggattgttgttagctgcacacagtggatttttttatatctaattcagattcagtatgggaatcatatgatgccaatttaacagtcattgtaccaaattgttctctatgttaccggtcaagactgcagtttgtagttgaagaagaattctaacaagttggaaccttgaataattgatgcctagctctaatcgatgagctcatgagattgttttactgttgacttgcagttctgggcactttgtatttagtttgtttgaactgctgccgattttatttaaatcaagatatattttaacgtcacctttctcgtttgctgctcattttgcttacaaatctcgctagtcattttgtttcggattcatgacttcattctcctcatgtaagttttgtgctgtacattttctacaggttcatggtcatgtttttattgtgcaatttattccattatgctgaattaaacatagaaacgccagtaaacagaaaagaatgataatggtaagaactttatgtcaatcaagattcagtaatctggggtgtagcaacaagcaccccaaatttctctatttatactctgacacagccatacaggtagaagtgttgctctgctacccagtaaccaaacaacatcctacaaggttaagaaatccaggtacattctacaaagctctcaagcaggcctttagggagtagttgattagatgcgctgtgtggcttcttgttcagtgacaggagctttgatcggattagatgtggaagactttgcagttatgcagctcaatccatctccggcggcatctaaggtgagagtgcgctttctagttcaagaactgcatggttgttcctattggtacatgtacactaagtatttcttcttatatgcatgtcaattcccttctgatcgtcaggcaagaacctaagataatatgccatggttatgctaatggtgcttcagagctgaattccaacgcaaggagcttgttgaaaggtgaaatctgctacactgggaagaagaaagagagcatctctgtttccagttcaaacatcgctgtctcttcacagggcattggatttagtttggagcaaagaactggagagaagtgcttagccaattcccatttggatgtaaagctgtgcactggaattgtaaagctggttatagataagtgctcttatatttttaagagtaaagggggcatctttgatgggaactgcagattgcaagatgttcttaagcttggtttctggctctcaccagagacactccgcccattttggcgtgcttcagagctgaagcctgatgatttccttaacatcttgattggctttgggccagatgctgcagaagtgaagaaggcaatatttttgtggaatttgtactggtgggcttcgtggcagagcaaggcattccaacatcttccaaggtcgaatgaaattatggtgtcaatacttgcaaatgctcatatgcttagccaagcggaatcattgcttctcttgttggatggcaacagggttctggctgatgcaggtaaactgtttagtcaggttatccaagcgtatgcagaagctggcaaccttggtaagtcaatttcaatttatgactgtgcacaggataggtgtctgattccttcaggctcatgctaccaggtacttcttcatctactgatggaaaggagaaaaaatgacttagttttaagagtatatttggacatgcttggagctggattaggttcttacacggaaggagatattcttgatattgttgtcaaggctttaatcaagaaagacaaatttttgcaagctattggtataattcggcagttaaaggatttgaacattcaaatgagtaagggatccttatcagctgtcacacaagaattttgcaagaagaaggatattggagatatgatgaatttcttagaagagtggaggtatctacctgacttgcttctcagcaatagaattattgcctctttatgtgcaaatattggtactgatgaggcatggttggttttccaaagattggaagtcttagggtttgtgccagatgcaactacttttggaatcttcatacgttacagctgtagagaattgaagctgaaggctgcatttctatatttatctgagtgcttttctagacatattaaccctaaagtttgtgcttataatgctattataggtggtatttttaaggagggattatacaggcatgcaaagtatgtctttgaagacatggctgaaagaaaaattattccagaactgttaacatacaagatacttttggcaggatattgcagatataggcagtttgatgaaatagaacaaaccttgaggactatggaaaccaatggcataaatgatatcccgtctggaaattgtgtgctttctaaggccttatcattcttggggctagaccacctaggggtgaaagtcaagagagataatgctgcaggctatccaaaggctgagtttttcgattcagtaggtaatggtctatatttggacactgattccacaaagtttgaggcttcattggtacagattatcgattatgctctttacccagatattagcttgaatctagtcagggcatgtcggcaaggtgatatcgcaagtgctcttgtactcaaagatgaaacttttcaatggggacatgacatttctacagctagctactcagaactattaaaggccttaagcgcgagccctgctcgtgcaatggatgccattaaccttattgacgagatggcagatacacctgacaaatttgatgctcaaaatctaaatctggctgtccaaacattgagtaggaatgggaggtcagcttgtgcaaggttggctttcgacagattgcttaaagatggcttccctgctagtcaagatacctatacttatttgatgatagggttctgcatagaaagggacatagcaggattttgggaatgttggagtctggcaacaaagcatggatggtcacctggtagcagggatgtgatcccccttatcagtcacttgagcaaatggggggtaatcgaggaagccttggagtttatcagcgtgttgctggactgttaccctagtttgtttttcagtgcatactgccaacttctcgaacagttatgcatgactggttgcacaagtgttgcatgtgccatgcttgaggctctcatacaaaagggtgtggctgcggatccttccctaattcgtaatgtgatggaagggtttctaaaggagcataacatcgctgaaacaattggaatgtatgacatg

SEQ ID NO: 9775 - DNA, 21637 bp, Oryza sativa
catatgttagtgctggttgggagttgactggcgcaagttgatttttttcttgtaaattttggcccaaagattacgactgtttgtatgtgaaaatggttaaggtgctctcatgcttatgatcaaacagtattcccaacctgctgaaataaaaacaaatgataaatatatgtgtgtggtttattaaattagacaatcttttctttaggttttctagtacttctttaagcaaagctatcattttcctaaccaacctggtggtaggaaatttgggtactgatgtcatgatgtgattcttgaaatctctatacttacctaacattttatttaattgtacagagcagctcatatctgatcaggtctaactgtttgaatgttagatcaatgtgccattgataattgattagttaattggttaattgcttcatttaggccacccattagcataggacctagttgactagttagcagaagtttcaccaatctcacttcagaattccaaaaggttttaccaaatctctgtagagaaagctaagaaattatcatggatggcctaaataaaaaattgtttctgttgatgtctcattttctcgttgaggagcagcatatgtagcttgtctcttagctctttgtactatagtactttgtacaaggcgttttgctcaagagagtagtgaatttatatttatctgcatattgtcccctgtcccgtgccaacaaactaaggagcactgaatgttcttaattctgacctaaatacagatgctagcacaacccaaataattaattcactggtagattgccattccccttactccttacccaaatttcatttcagagtggaatacctgaagattctgaattttcctccattttcagaaaacggggtgaaaatctctccagacataaatacctgaacacttgaattaatgccgtaactttgattttgcttgaatatctcgcagtgctgttgtactggactattatgaaattccccaacattgctggtccaaatgcaccaaacacatgtataatgtagtatgccaactctgctgtgcagagctatccactggcaagctattaattccaattaaattcctactaatataattataatctttatgatatttcattagtgtacgtgcacagctagccatgctaccttgtcaaaatttccatattccaagaagtgtaacacagtagtatacacttttcacccatggaaattttagctcatttactacaccattaaccccagaataagtttatttttcacccatttacacatactagtagtaaatcaaaatgaatttattcttcttggctattctcaatgaaatttctcaataattactcttcttggctattttaaatcatttctctttttatctattctcaatgaatttattttttacttttacaaattccgatacaataattactcaaaaataaacttattttaagataaatgattatgaaactaaaaatgcatttattctagggcagagggtgtacattttactgtaaaactaatgatgggtttgtgcgtgataggggttggatccggtgacgatcgcggcgatcttctcgacggcggagcacgccggcgagaagctggtggacggcgaggactgcttcgtgctgcggctggacgtggggccgtcggtgctgtcgagctggagcgacggcacggcggaggtgatccggcacggcctgacggggttcttcagccagcggagcggcctcctcgtccgcctcgaggactcgcagctcacgcggatccagtcccccggcgccgccgccatgtactgggagaccaccatctcctccagcctcgccgactaccgcgccgtcgacggcggcggcggcgtccacgtcgcgcactccggccgctccacggcgcacctcgcccgcttcggcgtcggcgttcgcgccgcccgcgtcgtgacgcggatggaggagtcgtggaccatcgacgacgtggcgttcaacgtgcccgggctcggccccgacgccttcatcccgcccgaggaggtcaggaggagccgcttctacgacgccatggccgccggcaagtgagatcgatcaacctgttcaagaagagagaaatggtgtaacacgtagagagttagcttcggctgtgtcaacggtcaaccacccagctctgcttgtgtttgtgcatcgaaattcgtgcatgtacatatgtgtaccaacctgaggtaattactccatccgtttcaggttataagactttctagcatatatatatatgttaatgaatctacgcatacatatatgtctagattcattaatatacatatgaatgtagacaatgctagaaagtcttataatataaaatggaggaagtacctaagtgatgagtaataaatagttacacaattcttaaacctgtattctgagtagttctgacttctgagaagataaaaactactgaactgactttgcacagattgtagatacctgcttagccttactacatgtctctaggttattgcgaagtgtttttgacaatcttaatcttcctgtcttcttggaagtatatactactacatgtgagttgcatttgtctgaaactttgtagctacttctgcagaagctctaggcaagactgaaatcatgtgctgctttttgtaacttgtatgttgttttctgccttggtatgtgatctgcatggagatgctatgcgtgctagtacataaacagtgttattcatatgcatgcctagcagaaaccagtggcaactttggaaattggaagttgttcagcatggttcttgaacatgtatgccacttgacaatgtctgcaaatgagcaacactagcaagctgtttgttttttttcccgttgcagaagctttgcaatttacaggtgtgcattgcatttgccctcatcactgtaaaaagtctgcaacttctttgtttgcatctccctgtcctgaacatgtgtcccttgtggtgtggcatcagcacttgctcatgtttctagtgcgatcacgtcacaaaaagttggaggtcacattgggtgtggcctgttcatggatgcctcttgtcttcttcagctgcatatgcatcggcaaaatgcgcagagtttgcaccaatctgtgaagactgttaaccacttgtttaatttgtcctgtccattgttaacttttgcagtattctaactcgcacttccaactgtacatgtaactaactattgcatgctactctctctaaggaggatgtgtcacatcacatcccaccaaaatcccttatattatgggacggagggagtaaaatataagcattttttgaactagatacgggtaactagggaaaatgttttgattggtcggttggttgagaagagaaagtaaatagagaaattaaatagagaattattatgattggttgagatacaaaagtaggtgaagaaatagctttattttgagacaaggcttaagtggtagaaatagttttgttttgaaagggagtattgatcatagagcatcttcatctgaaacggataaggggttaggtccatgcattttccagcttgttgaatctagatgaatatggtaccacttgttgctgctgtctggcggtgaactgaactttgataataagcagtagattttcatgcggcgatgttcctaatatccacatggggttcttcagaaatctgctccgatctgtactcaccatgttctcatcaaggaccacattccctgaaatatacaagcatatcagcaacttaacctcaccaaagggaccaaatttttaacatgcatgaatgatcaatcactacattcaagtactggccatgaagaaggcatcatgacctgatctaccctgtccatgcccttgcattgactctgaatcagggacagattgttgttgttcatccaggacttggctaggctacattgcacatgtctgtcctttgcattcaaaagcaacaatgtactataaggtgaccatgttttactgtcgtctccaacagttgaaagaagcgagagatggatcatctgtcgagcttgacgggtcccttttgattgatgtgtcctaggagatgtgtctcataatgcctgcaatttcttgatttgcatgagctgtaatactgagttgcagtgaaaagatcaccaccaaccactgtcctcttgcgaagaaagcatcactgttgcatgcagaaatattagttaaggttaattaatactctgtttaagtgtttataatacgctcgtgtgatccttcctatggtcccagggaatcgaagtgagatcatgcagtgccaaattggcaatggtaatggcaatgcaacgctggagaggggattaaacaaaagggtacagtctgtgttgaggccctgcactgcaatatgctactgtacaatatgtataccatcaaatcacaaagtgatgtcacaagcaaataagcaatgatatgactaagttggtgatgaactagctatggtttgtttagtaatagtagtagtagtagtatcctactttccaatgggatcattatactgttctgctttgtcccctggttccatggatctctcgtttggattctagtaaagcgagctgcattttctgttgaatacttcaagtgaaaatgactaccttttctttttgtttaaaagagttagctgagaaatgtcgtagtaaggaaaagttttgcttttttaaaataataataataataataatggcatgcatgccttgggagttcaactgtagtagttgtcattctgacattctgatggctgcattttcttctggtgaccggcagtctccttaaactggttagacctgcatggcttcatttctttgattgattaattaattcctaaagtggatagagattaggaccagaagaggatttaatcttttggcatttagactctgatcacaaatggaaactcaggaagtacaggagaatccattacgatattatccctaaccgctgaatattcagaaagctggttgtcttctgttagagcagagtgtccttttgtcgtgaaaaacataatttaagacggcattcaaggctaattccagccatatgttttgcatagcagaatcattaaaataagctagccaatgagcttgtagtgtaacaataacctaaaaggagggggtgactggaacgtctaaaccaatactaacaataaattagttggataaaaggactctaattcgaaaggaaacacgggtgtttggtttcttggaccaaggacagtgagcagaaaaaacaggtggcatgctgacgagagcgctcaaccaaaaagggtcagtgctgctcgcgatgttaatcctgcacctaatcgttcaacaattttgaattagatgcaactaaccatgcacacgatacgtcgtggtcagattcagaccggacatgactgatttcatggtacgaaatgaaagagaaaaaacagacatttactcgcaaaaagaagtttaaaaagggttcagtttcaggcaacttgtttgtcactctctcggagtcagctcagagctggtcatctttttaacttgtggtcttgtttagtgctgttcttcagagttcagacagtgtctactacccagggttcacgtttccgttcgaaaactcgaggttttgatgcgggacgaaagaagattttcaaggcaacttcgaattgttctcgagaaattcaaatctaaaacagtattttcgaatgaaatttagtcgaaatttaccgaaaactgtcgtaccgccggggtcaggatccctctaaagtctaaagcccgaacctgttgtcttcctccctgacgcggaacgaactggacgcccatttctcttgtgtcattgggcccatttgggagacaattagcgggccgaatctcgtaggcccatgtgaaaatcagacaaaacgcggcccgtggggtttccccttctgtggagattaaaactgggccaaaacattatgaagcccaacttctatgctgagttaaacataatgacagaatcaacgatggatgttccgtgtaaagcttgagaatatccattcggaatttcggattatccaatgtacgcctatactaatacagtactctcactactcactatatattttatgcgatttaactcttgtagctgttttgtttttgcataggtttatattcattttttaaactcaatattcctagctacataaatctttaaatttagagataacattaaatgaattattttgtttttctttataaaaagtacttcctctatttcacaatgtaagtcattttagcattttccatattcatattgatgttaatgaatctaaatagatatgtatgtctagatacatttattagaaatgctagaatgacttacattgtgaaacggatggagtaaaactttccacctatataattgaacttacaacttacatcctttaaatatgacgtagatcagagatatgacgacgtatcaaatacaacctagtattattaccaaattaaaagttcagcgagataaacgtatcttaactggttagattttttctgatgaaaccaattataaaaccctaaactcagcacgtgtacttccgtgataggtgtttagaaaaataaataatagtgccagtaatcagtgcagactgagctaaaactcgagaaaagaaagcgataatgattaaagaaaaggaaaaaagttccgatttttggaggcgcacggagacttctcgcagcagtttgttggcggccggataaacgagacgaggcgaggcgaacgcgaaagctccccatctccctccctccctccctcattattgattgattgattcgcagattcgccgctgccaccgcatcccgcccacccaccgcgcgccaccgcctccgccgccgacgagcccccgcggccaccgccaccgccacctcatcttctctcccaccaccgctccacagccgccctcccttacatggaagtcgacgtctccatcgccacgcccgcaccgcaggtccgaccacgattccccttcctctagagctttcttcttcttccgttctcgtcaatatcccgtgaaagctccgacctttccccctcctaggttttcttttctttttttttctttctactgccctagtcgctgcgaccgcgatggatgcgatggctgtatgctgctctggttacctggtgatccgatccggcttttcgcgttcgatattacctggggattagacgcgcttgttttttttttttttgtgccttcgatctgttgcttcctgtcttaggtttccgctggtggagctgagtagtattacatcgttttctccaatatatcactctagttgactcgctgagagaataatctgtgcgttcttgtttttgttcgtgccttcgatctgttgcttcctgtcttaggtttcggctggtggagctgagtagtatagtacatcgttttccccgatatatcactccttttgacttgctgagagaataatctgtgcgtacctctttaaaaagatactacttttatcgtaccactgatgatacttgattaggactcagggatggtatctttttggatgcccagttcaggagaaatagggatcctttgttgcgtcatagcttttcgtgattcctgagattaggaccagacctttgggtctcctgatatttgtttatttcgtcctaattctctccactcagtagacctattctccaattgtttcttagtactacgtagttagggaagatacctcctctggggctttatttcttaggagaatcatcattgcttgtcaagtaccatcttaacattgtttcttttccaaccattagaggcattaagagtaaatttttgttttggaaaacaagttaccatgtagtatttcttttttgttggtttacttgtttttgcgttgctcagtagtatgtactattccagggtctttctgtgcgaaagccctactctttggcttaatgttagttgacaggatcttgacgattgtcggttttcattgcaggaatcttagctgattggtgctttggactgcaggtctggacacgttgtccgtttcctgcttgtgcagacgtaggtttggagtctttctgagtgttaaggtggctttcctttttgtccttccatggttgaaatttgtatgaacaaccttgactttctcgaagatctgtgttggtcgataagatgaatcgaagaagaacaatgctattgcttatctgtctctgtgcaacattttgcctcatgactcagttaggagctgcaaatgtagtgctgatggggacaaatctgactttgtcgtttgatgatgttgaggcaagttttggtaagttctggacatcttatcatattagttttgttatagtagagtactaatagattctatttgtcgggatctcagtctccctacctgtgaaactttattacctaaaatttcacataccttgtaagccagttgcctatggtcattttggtcttaatgttttggttttcaaaaccttgtagttgtgctactgttttatttatggtagtgtgcgaatctgttgctgtatttcctattatatctttgtgttagctctctgactagaattagcttcgattttatcccattgattgtgccatgctgcattttcttgaaaggttcttttcttctacttcccattttcctaagtctatattgtcttgtcagaaagattcattatgctgtttattcaattggtttgcagctccaggagtgaaaggttcaggttttgaaggcgttgtttatactgctgaacctttggacgcctgcagtccgttaacaagtaaagcagaaaagggtccaccatctccatttgcactgatcataagaggcgggtgcacatttgatgaaaaagtaaaaaatgcacaggatgctggattcaaagctgcaatagtatacgacaatgaaaatagcggggttctgatttcaagtaatgtaccttatcactcccacttgttttttttttctgcaacatcttagttccactgtcagggttgggcatcatacgctccattcatggcataatagattataattatgtttcttttgtctttatattctcccttatgtccatatttgaggacctgtatatgtggcatgcattaagaagagatggggccatgtgagaggcacaagagaatgcttttcaaacttttccttgagaacggatgaaacaaaaatactgtctaggctgaaactttccaaaataagtaaaaaaatatgaaaaaaatagaaattgatacttttaaaagtcataccactttgatgcttttcactagttcatttagcattgtttagactttgggggcatatggttctgcattatctaactttgaagtttacagtggctggaagctcaggtggtattcacatttatgcggtgttcatctcgaaggcctcaggggaggtgttgaagaaattttcaggccatactgatgtagaggtgtggatactacctgcgtttgagaactcagcctggtcaatcatggcaatttcattcatatctctgcttgccatgtctgcggttctagctacttgtttctttgtgagaagacatcatataaggcgggaccggcctagaattccagaagcccgagaattccatggaatgagcagtcaattagtcaaggcaatgccaagccttatcttcacgaaggtgcaagaggacaactgcacatcatcaatgtgtgccatttgcttggaagactacaatgtcggagaaaaattaagagtgttgccttgccgtcacagtatgtttttctatctctgcaacaccacaactaccttttctagttcaaattgatacgttgaggacattcccatagcctattggttttaggaaagaaaatagtcatgttcagttgctaacttaactcttcaatccttggatttggaactgaaaacattctatgcaagtttttttagtctgtcatcacaattttgtgtaaagtactacaccactctgcatttttgttttatttgtttttgaatgtctggactaagtatgggtttgtgtatttcacacacaattagtacttttgtgtagtatccactttctgaaccttggaaattccacagtggcgttcactattgcagatgttttaactggacatttaagttatacttatgcacaattgattatttgaagagagatatgtgttgaataaacttgtataccttatatacaatctgctatctgaataatggtattccagtactctgatatttgtgcatattactttgcagagttccatgcagcttgtgtggacctttggctcacaacttggagaactttttgccctgtatgcaaacgtgatgcaagtactggaataccagatcctccagcctcagagactacaccattgctttcttctgcagttcgtttgccttctcagtcatcttcgttccggtcaagcgtggcagcatcgcctccaagaccaataagtcgacgaccttcatcacagtccatatctcggattatgctgcttctggtacccccaactctcctaaccccataaggtctttcacaaactcaactgccatgagcataagtagaagcaatgtggacttatcaaacatgtcttcccgccctcgcgcctcacacctcgcctccgcacattctttggttggcagtcacttgtctccaccaatcaatataaggtacgcatcgccgcatatgtcccactctggctatgcatcacctagtccacatgttagctcatcctatgtctccaactctgggtatggatcttcaagctactatctcggttcatccagccagcatcggtcatacctaaggcgctgtggggaatcagggcctagcttgtctaccatggcccctcagtcgccgcaacagtcccagttacgtcatggcggcgaatccgacttaaatctagcaggagcatcctcaggccagtctttccggcaatcctacctgagacactgtgctgattcagaggtaaatctagcaggagcatcctcaggccagtctttccggcaatcctatctgagacactgtgctgattcagatgcaagcttatctgccatggcatcagctcaatccttgccaggatgctgatttctctgggatcagatcagcttctgtctgtactaagacctggcgtgacttgtgtatacatttgaggcatgtactataggctattggttgagagaaaatggtcgtatttgtttgtgtttctcctgctgccctgcccttttggttgtagtgattgttagcgctctatttgtttcaccctagagtgtatagtacaattgtacagcaactttcttttaaactaagcaatatcatccgcgcgttgcccataaattggatccattgccattactaatttgtccgtttcaaaaaataccattaataaaccgaggctgtttagattgttgtcaaaataaaacttaacaaattttgttaagttggcaatattactaaaattttagcatgattttttatgtattttttaaagtttggcaaaaaaaactatatttatgcacatttttgacaacttaaaaaaatggtatagtttgacatggcatcaacctgaacaaacccctatatgtttggacccatatgtcattatttacccctatgatgtatttgtcaaattattattttttaccatattcctcttcttcctttctcctctcctttcttcccgttggtggagcggtgggtggtgttgttcacttcggcagctcctccccctctacttaccccgatgaggttgggtctcatggttctctcttcgtcttcccaatttactcactccggcggtggcgagtagtgaggtagggctaatggttcccttctcttcctttctcccttcggcagctcctccccctctacttacccccacgaggttgggtctcatggttctctcttcgtctccccaatttactcactccggtggtggcgagcaatgaggttggaccaatggttcccttctcttcctttctcccctcatctcttcctttccctctcctgtcacttcgggcgtagctaaattgacgttctcgcagccgtaggacctctccactattggatctgcctttcgtcccgacctttgccttcgtccctgatggttagcccacctacacccgcttgacaactgtggcgtctggagtcaagacaaaatcggtgtccggttgaagaggaatgagggaggtggccgagcgagactgacctcaacctttgtcccctttccccaatgcatgcgccaaaggaggaggcgcggggaagcatgtggcattggtgaggtacttaggggaaattggaggtgcagagggtggccggactcattggaaataggtgagaggagagaggggaaaggagaggaagaaggataaaatggtccaaaaaattttaatgattgcactgaaaagataagtagtggtatctccaataactataaagtaatgatatggttctaattaaccctatagttctattgtcaatgaattttacagtactctataagtacatgaaattgtgtacaactatcaatgaatatcttgtagatatgtaagcaataaaagttcccaatattagtgaatatcttgtagatatgtaagcattaaaagttcccgatattattagacttgtaagcatctaataattgaggaatgatgtgaacgcttctatgacgtaggggtagggcattgggggatacagccatatatttcttcatctagaacacacatcacctcaaattacgaaccgtattatggctgtgtttacttccattcaaactttaaacttttccgacgtatcaaatgtttggacacatgtatggaccattaaatgtggatgaaaaaaaacaattgcacaatttgcatgtaaattgtgagacgaatcttttgagcttaattatgccatgatttaacaatgtggtgctacagtaaacatttgctaatgatggattaattagacttgatagattcgtcttgcagtttacaggcgaaatctgtaatttgttttgttattagtctacgtttaatacttcaaatgtgtgtccgtatacgtcaatttttttttaccaaaacaactaaacacggtttatgtagagacaggaacaaataatccatgacaataatatagtgaaatagttgaaaagaacatgaccttgaagttcaagtacaagtgttatgtctccactatttactctttagcttatcaaccgcaactaagatttaaatttcaaaacctattatacttatttttagagttgatttaatgttttattatcatacttcattgcgatttccataataagatggttgctatcatcaacaagcaactttgggccgccccagggaactgaatcttttgcatgaaccactgcatttccaagaagtgcacgagctttgcatgccataagcccaaaagactcagcagcttagcgtcccttattataaattgcttcactgaccagcggcaaaaagatggcctcctcctgcaatctgcaagactgaagctaagcagctttaaatcctcctgcgtcatttaaccccctctctgcctctctgagctctgagctgctcagctacagctccctagctgttctgttcgattaattcagcttcgctttgcttggattaatttgtaggtgactaactcgatcacagctcaggtgattggcagtttgatcacaaggcaggaaggaagtagaagtagattgctgtagcacacgctcacctaccaagcttctacactcgcagccaagctttgatcgtttgcttgctttgcattgcttgggctttgtgggcaagaacgtgtctatcttcttcttgttcgtctcgtcaggcggccatggggatgagttcatgcgtgaacctatcccgtgtcgccgccgccgccgcagggagacggccgggatttgccggtgagctgggaggtcgccgtggtcatggcagaagcgtgcttccggttgttgctgcactgccggtgaggaggaagggaagcggttgtggcgtggcgtgctgcgtctcctcctcgtcttcctcctccgtgcacggcaagaactcggcggcggcggcggagggtcacgccggcggcattgggatcgcggagttcctcggcggcaagaacttcctcatcaccggcggaaccgggttcctggcaaaaggtagtaaatctatcttcttcctctcttaaatttggatcatccaacgtacgtagctcgcgtctcttcttgattttgcttgatcatctggatcagttctcatcgagaagatattgcggacgaatcccgacgttggcaagatctacgtgctgatcaaggcgaaggacggtgacgcagcactgaaaagattgcacaacgaggttctacttgcgatcattgttcgatccatttcagagaaacatttgttagtacctatctgttcatctgtttgactgtatttttccttttgttttaactgtgtgatgtgcaggttgtggacacagaattgttcagtcgtttgcaggaaatccatggcaaggattaccacagcttcgcggcaagaaagctggtgcctgtagtcggagatgtcagagaagccaacgttggcatcgcccctgagcttgccggcgtgatcgccgacgaggtcgacatcatcgtcaactcagcagcaaacaccactttcgacgagaggttttgtcattctctgaactgcagtgttgctccaaagatgagttcttaattggatcacttcatgtataataagcatatgaattgatcactgttgctgcatttggttcgattttgcaggtacgatgttgcaatggacatcaacaccgtagggccattcaggataatgagcttcgcgcagcggtttcggaggctgaagctgttcttgcaagtgtcaacaggtcagaaatgcatgtcaaatgaaaagctcttgtgctgaaaacttgcactgaaattacctccaaaaaccttagatatatctctctactgtggattttgaatttcatgtttggcaatcagcatatgtgaacggacagaggcaaggtgtggtgctagagaagccatttcgcttgggggacaccatagccaaggagttaggatctccagattcttcacaacacaagaacaccatgcttgacatcgaggcagagatcaagctggcttttgaccacaggagacacggtgatgattcagcctctttctctgaagaaatgaaagagttaggattagagaggtatacacgcaatgccagaaacgtttcaagtctgaatgtgcagtggcaagattatgcaattgcacacatgaaacagcattggttaattcgcttgatttgggtttaatttgtagggcaaaactccatgggtggcaagatacatatgtgttcaccaaggccatgggagagatggtgatcaactccatgcgaggagatataccggttgtcaccatcaggccaagcgtcatcgagagcacctggagggatcccttccccggttggatggaagggaacaggtacaaattgtaaatcaaagttcaccaacttaaaccaattttagttcatgagataatttagtttacgatgaattggcattgattttggcgaaatgaatttgagcttgattaggatgatggatcctgttgtgctgtactacggcaaaggccagctgagcgggttcctcgctgacccggagggtgttcttgacgtggtaatgattaagcagatgattaaattcgctaattgcgattagtggttaatcgattaactatggcgatttgtgatggaaggttccggcggacatggtggtgaacgcaacgctggcgtccatggcgaagcacgggcgcggcggcgcggcggcggcggcggcggcggcggaggggatgcacgtgtaccacgtggcgtcgtcgacggtgaacccgctggcgttcggcgacctgagccggttcctcttccagcacttcacggggtcgccgtacagcgacgcggcggggcggcccatccacgtgccgccgatgcggctgttcgacaccatggagcagttcgccagctacgtcgagaccgacgcgctgctgcgcgccggccgcctcgccggcgccggcgccggcgccggagacgagagggtgtcgcagcggctgcgcgagctctgcgccaagtccgtcgagcagaccatctacctcggcagcatctaccagccctacaccttctacggcggcaggtttgtttcctagatcgttcgttttatttaaaaacttttgtgaaatatataaaactatatgtatacgtataaatatatttaacaataaattaaataatataaaaaaattaataattacttaatttatttctaataaaactaatggtcaaatatatttaaaaaagtcgatggcataaaatattttaaaacgggggagtatattcgtatatacccgccatggataatgcattgtgaatttgagatgctgatgagctcgatcgccggccatggcggcggcggcaggttcgacaatgggaacacggaggcgctgatcggggagatgtcggaggaggagaaggcgcggttccacttcgacgtgaggagcatcgagtggacggactacatcaccaacgtgcacatcccggggctcaggaagcacgtcatgaaggggaggggcgtcggcggcggcagcggcgcgtcgtcgtcatcgaacgcctcgctgctcgccggcgcctccgtttgaatggccaggccggcgccggagaagaggaggatgcatgcgcggcgtgtacactaggctagattgttgttaacttgttctgccgtggcagtctgacagatgatctttgtgctgcagtaattaaggttgatagtatgttatctctatcactatgtaatcagagcaaaaattggcaatcaatttaacagaatttacaaaagatgcacataattcagaatataatttagcagagagaacatcggttgaccaagtttttggctttgatcaagtacatgtctagaacagtatggagtactagtagagtagtgcgaaatttgaaaaccagaatgtcagatacatgcgaagaaaaacatccaactagagaaaaaggtgccatggaacactgcactgtagcacatcagggtaaccacccccaaaattcggaatactacaccgaaagatgattaggttgccttgccattgatgatacaaattacaagactatcgatacaagcttacgctacaaaatacaaatagaagttcagtcttgccactagatttcctctgtaaaaatgcctaaaaaggagagggtgaggatggatgggccttttttatcacctgaaaaactcaggcatcgctgcatgagcatgacactttgtttcaggatagcagcatctcttgcattgaccaatggagggtcaagttttacgaagggatctgatgttcccttgttattgttggttggcctatgcgcaggtttcacagtccagcaaagtatcactgaccagcatttgactatcgcaaattcgcagtacaaggtgacaaatggtagcaccattaactcaaaggaaataatcgggcgtcctccgtgtcacgtcaggctcacctctcctaggagctggttcgaactgcaacaataggaaaccaacatgattagccaactacaggatatgcaattgagctaactatcagaattcagaatgcgtattttaaatgaattgaatgaaggaaagagcaaaatcaagttatcaacattctaattcagatttccaacaccttactttgacagttaagccatgaccagcacgtattacatgaacttaacgaaccaaggaagccggaaagttgttgtaaagaataaagttagcagtaatcacctgaataaaagtatggctgttgcagtcatcaacttccaaaatggatgccatattcccacatcggtaacaataatttggagcactgaatatagtaacaactttttgttcctgtatgtgcatagtgaataattatgacatattacttgcacaacacgcctgataaagtatccaaaggttcagtaaacttacatgagcccaattatatccttccataactagttgatgagcccgagctacaagtttgagattgttggtgtgattgaattgctcggatatatcctggaaaacaaaagaaagaatgaacaaactataattaaaacatctgcaactgaaaaagttcaagacagtgtagtacctgcccaaaagtgtagccagcaccacgaggagatatgccccaaccacagcggtcatctggatcagaccatagaagatcacacattggtccctcatgcggaacctcttggacacgatctaagctacgcacactatcaaggttctcaattgatggagataaaccaccatgcaggcagaaaatttcagattccaccttcaagaacataaagaaaatattaacatggctcatagatgcataatgctgacaatatgggtttattgaggatggaatgcagttattgtatgtacagttaatgattttgcagtaaaaagagttatgcactacattaaacgtttattgatgaccactttacatgattcaagtaatgcatccatacaattgaaaatccaaagatctaccagagagaacatcactgttagcaacttggtatgatgtcacacaactcccaaatggccaaggaatttcaattatgcagctgtaaatacataatgtatgatatgtcgcattctttcacaaggtaaagacactagtcatgccccatcgatatgttcccagctatcaagtctgcaggtggcgatatacaatcagtagttatcatacaggtgaaaaacaaactaggcttccatattgaaacagtgtaccatgcaataaatgcaaaacaaaaaaataaagaaaaacaagagatacttagaaatgacagaacaaaccaacttaaagaaaaagaggaggtcccagttcagagcacataccagtgctgtcagtggaaaatagtcaaataaatccgtgaatatcttccatacatttgcattgccatacctggtttgaaagaagggtcaacaacacaaattaaaaatatgactccatttcaaacatctagtagcaaatcattgttgcaaatttcacttctataaattaacaaacaatatcactgttttgtttgaaacatattgaattaatgatatgtactaccacataggttcaaaaggtacagaactctaatatacaaacaacacaaaacctatatactaccgcacagaaagaaaaaaagggcacatgataccaaatagattccacatatactaaaactttgttcgtctgtctattatactgagacaaggacaagaagtaccacataactctaggatcagacagaacatgcatagagtttctgccatggcagcaatgatgcagttcatactgaacagcctacaaggctagacctggaacaggattaagattaattttcatgaagcacctaaacaaactcactttcgtaaacattcgtcgtagaatccataaacctgtgtgatctgcaatcatcataaaataatattttcagtttaacatagacataactaattcaccattatgacagacagacgataataaaacaaactgtgctaaacagaaaccagaagaattcaacaaatttgctcaaatttctaatcaactgagaaaattgcggccaagtctgcacatagtcattgagaaaagttgaacagcacctgccggctctcgtgatttccgcgaaggattgtaatccgatgtgggtgacgcaccttcagcgctaccaaaagctggataaggaataccactcagtagtgcttacacataatgacatgatctcaaacataaaacaattgaaatatttgaaagaattccagtaatcgaattttgttgctggccaataagaacaaataaatctggtatgtgaaacttgacagcttctgtaaaactgtatataaatactcatcaaagaaaataagtaggttaactcttacagtaacagtctcaacagagtaatagccacgatccacataatcccccataaataaataattagtatctgggcactgaaacaaagaagaacaaatatattaagtatctttaagaacagaataacgaaaggaagatttcaaagtatggtagcaaaagtaaatgcaaatagtaccttcccaccgatccgaaaaagttctacaagatcatggaattgtccgtgaatatcaccacaaatcgttactgggcttttgacaggctgcataacccaaaaaaaaaaaaggcaaaaccttaaaaccagtactcatctaccttaccaaattaccatggaacagaacatgcaaatattttgagaacgtcttagcagaattgtatgtgcacatactatgagctatctgaatggcatgtaaaagagggggtaaaaattaaggtgatgaaaattgaatggaaggaggaagacttgaattcctgtgtttattttagtcatcagcattggcagaattatggttggattgaaaggcacagaaatgtatgactaaaacatatcaaaggaccaactaacttgtgtaacactatgaagtacccttgctcaaatacaatgccaaaaccatagtgcaggttcaatcaactgttgaagaagcaataaggaaatcctgtcacactcacacctatcctgaaatatacccagcataacagtgagaaaagaaccggcagtatgcgatacctgaacattgctttcctccatcaatatctccttggccttctcgcacagtgctttaacctgcaattgagggtccattagaacacacgtagattccaggaatataagaacaccagttgtgtagacatttatgcccatcaaatgttcctatttttggtcaaccgtccatgcatatccacacatatgtatatatcctatcgtattctacaggttataagcatgtgaacctaatttgcgatcaaaacaaaaggtagcagtgactacgtgtgcttgtaaatttccaatttttatgctactttccgcgaccatctctagggatctactaccatgaaccaaatctggatcatcacatcggaaggcaccaaattccaagttgccctcgccagccacaacaaacaagcactcgaacccctctccaaaccgccaaatcacccagcacaacaaaaactacgcgccaatcgctcgcgaaccaccggatcacacggcaaatccgaaccccccaacccaacatccccgaacaaaaaaaaccctaggaacagatcaaagcgccaccatattccccagatcgaggcgccccccgcggagccatcgccggcgggacgaacggcgagaccagaacgcggaaaagccagagcagcagcagcagcagagggatctcgctcgctcgctctcacctcctgctcggcgagcgggcgacactgcatcagctgctcgatctgcgtgtccaggccggcgcatcccccgccgccgtccacgctcatgggctccatccccccgctccgccctccggaggtaggcgagcgcaccgccggctcgagctcgtcgccggcggcgagggggggaaagcgcgcgcgcgctccggccgaggcggattgagagagtgagactgagagagagaagagaagagaagagagagaaactgtagacactggaggtagggagagagagagagagagtatcagagtactggacgggaggg

SEQ ID NO: 9776 - DNA, 28604 bp, Oryza sativa
tgctgaaacaattggaatgtatgacatgttgcttaacagaaacaaagtattaaatgtgtccacttaccaatctgcattgtcttcagtggcaagaattgatgcagaacgagccatggacttggtacaatctgtgatgaacatggaatctactgatttctcaacgtgcagttctatcgtgaagaacttattgcaatcaggaaaaataggccaggtaatgtcagtctttgaggaaacagttttggggaagaagttcaatgctaccttgctaaattcctttctacaagcatattattgtgtaaaaaattggagaaaggcagatgcagttctttgcatgatgttaaagatgcagaatagcctttctatttctagttaccgctttcttgtccgtagaatgtgcgagcaaagtcggatttccagcgcattaagacttaaagagctgatccaagatagggacaagtcaacagaactaattttatacaatattctgattttttatcttttccggagaagacacattttacaggttcataatttgttgaaggatatgaaaagcaatggtttttctccagacaccaccacttatgacttccttgtcaatgggtttcacaagtctggagatgtcgatcattcaattaatatgcttgattcttgcattgctcagggattaacgccaagcaatcgtagtctcagagtagtattgagtcaccattgcaagttaggaaaccttgagaaatcactagaattatttcatctgatagaaagcaacggatggaagcatggtttagtcattgagacaaccctcatttcaagtcttctctcatcagggaggttttctgaagcaacatcttgtctgaacagcatgaacaaaagagagctgattgggtttgacatacattttgatgtcctaatcaaggaactctgcttactgggagatgtggaaatgtctgttagtctgctaaatacaatgctaaagaaaggcaaaattccgagtgaagttagctacgactctgttgtgtacaggctatgtatgttgaaagaattcgatcaggcacttgattttcttgctgagatgcaatttgcgaacctaaaaccaagcgacatgtcctgcgatgtgcttatacagggcctttgtgccatgggaagaacctgtgatgctatgaatattttggaaatgttgaccaccattggctcttcaccatcctatcacatgtatagagttgtttttgagaactgttgcaggagtaacaatctacagaaggctgcaacacttctgcatgacatgcagcaagctgggttctcacccaactttgagatgcactggtctgttattagcaatttaagtagtaatgctaagaggactacaggatatgagaagcctattttgtccaaccttatttcttcaactcaagtgaactccccgtgaagtttatatataatagggcaaaaggccattcggagcgaagatataagcaatgctgatgtctggttttccagaaagtggtgaactgacgattgtcaagttgaactgtagacaccagtggaactgacagaactccatgagatcaagctaatgcaattgaatgttccattcacatctgaaggtcatgataaggtaatactactgtctattctaaaagtggaaacaataatcccaaactttggctgtaatcttattatttttctaaacaggatgtactttcgattatcgtttatgttggcggagataatgctgatattatatcactccatcaaatcagaggtgattcacccctgcgacttttctcttcaattagagcctgtgtaatcgattgctttcttgaataacccaatatagagtgtgcactcaacttctcattaattttttttcaatcagtgttactactagttgtgcttgcgcagacacttcttctagccatgaaagacacactggagctcacttgagttgccatgaaagatgcactgactccacaccagtacgatttattatgaaaaaagtaatccacaccagtacgatttattatgaaaaaagtaagcggaatacaagaagcttaaaatgcttcaatgttacaaaactagagacacactggcgcattgccttatccttttaatatataggatttttatgagcatctatgggcgccaatattcaagattatcacacccacaatcagactcttggcttctataaacatacatccaaattataaagcaccaaattgtgcaatttgcatcataaaattgatgcctattcattgttgggcacgacagcacccacacctccatccatgttatatgaagcgtcaatatcagagttctgaagttctgatttctccaagcccttatctggtccaagattctctagctgaaccccatgccttttcaatgcatctttgatcttataaatctgaaatagcaacaaaatatagcttgaaagagcttaaaggtaatctgttcacaaatgggcttagattaacggaactcacagttgaaattgtacagctgaagctacagatacggccttctgcacctctgtaaaagcggaacattggcaatacatgaacattgagcctgcggcacatctccttttgttcattggagttgaccataagaaactgcagttccggatgcatgccagccaattgacataccttttgggacattatgcaaaaaggtgttataactattcaaagtatgaaatgctcttttttcgttaatttatgtttgagaaaattgtttaataccatgcatgtgttcttttaccttagggtgtagggccttgcaagctccacaactaggggaaaagaagtgcaccacggtgagcttatcgctggccaacaggagctgcttgtcaaaatcgtcttgtgattcaatgtttttcatgttgcaggatttcatgttcttttcccaccatttagtcttcattggggtgtgaacagcctaacaccacgacaatatatctcattgacatctcttttgtgcttgagcatgtattgtcaatgcatatttgagttttgttatttgtgtatttcgaatgagaccaacaatttcatcttctgtgcagatttttcaaatacttttggctgtagagaatgttttaccaataaaattctataattttaagcattactaaacatggttagcgaagcaaccaaatctcttaatattaaatgcacttgataaaacagcgatcctgtttcaagaatagttgggctttgatttagtcattattaggccagaaaatggtacctggagcaaatacagtgtgtcagtgattagtgtcatagaacacaaaaaaagggttaccttggattgtgaatggattgtggtgccccttgatatttgaacaacaaaacaaacaaaacatattttattcttgagattaaatagcacttgcaaatttgcaatctaagttaaaatttagcctgttgattttgaaacctgcatattcctttctatttaacataacaaggaaacattctgatttacttgtagaaaaattcagatgaccttctacggaaatgcactgaatatatttttacaaagaaagcatcttagtttgcgcttgtcatagcaagaatggtttttctggaggtaaatgtttttgtttgtaatttaattagttccaaacaagtaatgttcaagattttatactttcatagcgtgtaagactttcttttacttcctccgtttcacaatgtaagtcattctagcatttcccacattcatgttgatgttaatgaatatagatagatatatatgtctaaattcattaacaataatatgaatgtgggaaatgctaaaatgacttacattgtgaaacggaggaagtagtgtataaggacaaagtttcatatgcatgctcaattgcaatgtggtaagaaattacattggtggaattttctgttgcagctttggtgatctgccaaccagttgaagcatccttttctcggagcaagaggtgctttctgttgatccgattgtggttccgagctggcaccatgaaggaaccatcagaactattattcttggatccacgctgagatgaacgagaaatagcccaacagttcgtcagagcagaagccattgccatccttcaactgaaaaagaaaggatgaaacagatcagcactcctgaaatgatgtggaaaatgggaaattttaaaagcttacatgccacaacgtatccacacgaacttttcaagagctggaaatgtttgtgatggtgatatgggaatggtccatggtatggtatttatagctgaagaaaagtttgcttcagaagcaaaggatacctcatcctccctaaaacagagcccctttttgcttttttttttcagttcatgttcgtgagttcatcactctaagaagcaaagatgattatccaaaagaagatatggacagccacatttgttgttacctgccatcatatctggactagctaggtgctttatatactcagtttccagttctccagcaaaagctttggtgtttcttacactctgctgatttctatctaaggcggcacggcttgtgccatggactggatgaagccgatgtgtatctggataaaaagattgtcaacatgactcatctcttctgtagtgtgtcaatcctaatgcattgtgtgttctgtgagtcatgggcaaacttttgatctaaatcttaatctactttactcggatgtgtatccatgacatgactggatttcttgtaggagtgcctgatattgcagctatgtggtgtattcttcttggttgtgtatatctaactgttgatataaaggtcagatttttatccattatctaaaaaaatgtggtgtattttacttgtcctctacttgctcttcatctgcttgtgtgtatgctctatccagctattggaatttcagaatctgtcacgcgatgaacacggcctgtttggaacatcctgctcgatctgcgtgcgaatctatctgtgatttttacgttttagtacatactaatactgagttactgactgatcaaactaacatattaaaggggcagtaacacctgctagtcagaaaataatactctatccgttttatattatataaattgttttgactttttccttagtcaacttttttaagtttaaccaagtttatattaaaaatctagaacatcaaattagttttattaaaatgaacatttaatatattttaataatatgttgttttatgttagcaatgttgctatatttttctacaaacttgatcaaactttaaaaaattgactaggacaaaagtcaaaacgatttatagtataaaatggagggagtatttacagtatgctgcttgataattactgtattccttttgaagtaagaagatttaggtaggtgctaaaattgataatagaagaacttgcattgaacccataattccaaaatggatgaactaaaatacttttcttcaataaaaaaggagatccgctggacgaaatcaagaaaacaaagaatctaatgtgaaaattacaccataacatggtcaaaagaaaaaaaaaaggaaattacacccatagctacttaccagcatacttcttttttcccacagaaaccagggactggtttcccatcaaccttccaaggttgacattgctacagaggttacaactaggacatcttttgagtttttccacccttccacttatagatcttccacttacaccataagttgactacccctcgatggctcgaagggtataatgtatatatagtcgtgcaatgtcggtggcatctttgtgtccgacaccatgacctgatatttttcgcagagcttgtcgcttgttgggtcgacgtgtcgtttaagtcatggtatttgtcacgcaatgcatatccttttatgctcttgctctttttcggctacaaggattgtgttttcaaattaattaatgcaaaaatctagatataatataaatttttttgcaagggaaattactaaataaacaaaacagcacattcttaaaatcgttttatcccactgaagagttgtatttagatttagaagacttctttcttgagtgaatagtggagatactcctttgctatagattataattataggggaataattacaatagagggcatggggagtagagaaaacaaaaaaaaactgttaaactgtaaatggattctcgattgaggaatttaagatacacaattgtctccaatataaaaataaaccataatatttgggctgtgaatttattgtataatagaaaaatcaaggacacatggctaatggttgctaagaaaaaaaattgcaaatattctataggttctcagagagaaaagggaaatcattcaatttgattgactccaattacaaagaatttcttttagtgtcttagaaacatatttaatgatatgcagtttggaaaaaaaatagaaaataaataccgggcactatgtttaattaaaaggtaaaaaaaaatttactacttggggtgtggatttacattgtattcctgcacataagaagtttcaaattcaacagatacaattttaatattgaactctgtccactatacagcaatgcagtacaccgtgcatctgataaaaacagtgatatgctttattattcatggttctctttcttctggggagaactggaagatccaccttttggcaaaacaattcacagctttcataatacaattggctgctacagagcaatggcaactgagcgtaagtgcgtaacactttaacaaaattaataaagctcaaaacaattaatattctgcaggcatattgcacaggccagtattggcttcagaatacacagaaattgtaacaaagcaaactgcttttgttcttacccaagaataaccattatattctgtaaaataatatgggtaatttggccatttctttgcaaaggcaaacatgcaatttcgcacagttcagatccttgtccacaatttgttttgatcattgcaatcccttcttgcagaaccatcaacttatgcttatttacaaccatacaggcatcgatgacagcatcactcttttgtcgctcatgtagcttttttcacttgcacaaacacagtgccatactcccattgtacaaatgatgtgcaaactgatgtttggatggattgaagatgtttcacatatttatagccacgatccacgactcattaccttgtttatataattgagttcaggaaagggttgcatctgtactaaaaaggatatcagaagataacacaatggaggatatgtataaccacaagccatggctgcacatcttgttgttacaaattgttcacctttatgtagcttatgcagcttgggctgatgtttatctgcttgactagaaatccaaacaatagcctgtgatgcaacctctctgagtctgacaagattagacccatttcattaatatatcatcataagtactagaattcactattcaggatagcttgttgttcttcgcgcacatacatctgcatcattttctttcccatttcccatatgtgatattcagtttctgatccagaacagagcttcacaactgatatcctcaaccaatgaatccttttctttcagaatgtgatctcgactgtccaaaagactgaattatatccttcacactgccatctacaaacgtttgacctgcttctttgttgacaccactgtcatccattaactttctcattttctctgacccaaaccattctccaacagatgcatagatgtttgagaggagaacataatcaccgctttcatcattccttgcctttagcagttgcctatttgcatgtttagccagttcgatctcaccatgaaccctacaagccgaaagtagtgttctccaaatgacagaattaggctcacatttcatcgtatcaatgaactcaaatgcttcttttagtagcccagcacgacccagcatgtccaccatgcaaccgtagtgcttgatattgggttcaaccctgtacttatgctgcatcaagttgaagaattcacgtcccttgtcaaccatcccgccgtggctgcaggcgataaggacagcaacaaaggtgatctcatctggcctgaccttccccttcagcatcttctcaaacatatctatggattccaggacatgcccatgcagtgccagtcctcctacaattgagttccaagttgagacgtccttgtctcgcattgaccagaacacctcatgtgcacttttcatgctcccacattttgcatacatgtcaatcagtgcatttcctagaacaactggaaacccatttcttgaaaacatatctgaaagagaggaatgcagcctctggccaacgtccagatcaccagagtcagcacaagctgacagcaagctgagcattgtgacaatatctggcttttcacccatgcgctgcatctgctcaaacaactccagtgcatgcaaatgcgagccacatctcacatacccagaaatcatcacgttccaggacacgacatctcgctcgggtacctggtcgaatagctcccttgccaatgccatatctccccgcttcgcatacgcggtgatcatcacattccaggacacgaggtccttcacaggacattcgtcgaacaggtcccgtgcagcaccaatgtcccctcgccttgcacaccccgtgatcatcgccgaccaagccacggcatcctcacgagctctgccatcgaacagagcagccgcaatgcccaaattcccgcagctcgcgtgcatgccaatgagcgcgttcttgacgaacgcgtcggactcgcagccagccttcacaacgtgggcgtgcacctgaaccccggtgtcccccgcgcccatggcggtgcaagcgcggagcacgaacgggaacgtgagcttgtcgggcctcacgccgccgccgccgccgcgccgcagcatgcgcgtgtacagggagacagcgtcccggggcgcggccgtgtgggcggcgccgcggatgagggtgttgtacatgaagcggtccgggcggggtatttggtcgaacacgaggtaggcgtgcgcgatggcgccgcggaccgcgacggcggaggcgaaaaggagctcgcggagctcggagggatcggagaggaagccccggagcgccatcaccgcgtgcatctgcttgatgtgtcgcaggctccggcaccgccgccacgccggcggctgccgccgctgcgtccccgacttccgcaacatctcagagtctcagtccactagccttgtccacgtcgccaatgtttaaatccagtcccattttaaacgcatactaattgaacagttctccatattttttctcaaacattcatgtaaagttttgcaaacatggtgtcatggtacattcaaattcaaaccagattacaggtttaaaaatgtgcaaacatggtgatacggccttgtccacgtcgccaatgtttaaatccagtcccaccatttgtagcgtagaatggaacagctttcgataaaatttctcaaccatttagatgaaattcgcaccgtttcaagcagggtctaggaccaacaaatcctagaatcaaacatggtacattcaaatttcaaattcaaaccagattacataggcttatttactactccggtaagcgatacgggcggcggcggcgcggctgccggcgagcggcggcgggggtcagacggaggtggagacgcggaccttgaggccgtgagccatggagaggatggtcatcatccggtacttgacggggtggtcctcgacgaggtcgaaggtgtagaagcggaagaggatggcgagcgccatcttcatctggaggtaggcggagtccttgccgaggcagatccgcggcccggcctggaacgcggtgaacttgaacggcgacgcgttccggaacgcgccgccgtcgccgctgagccaccgctccggccggaagctcgccgcgtcggggccccagttgtactccatcctccccatggagtagggcacgtacgtcaccatcccgccggcgcgcaccttggtgccgtcggggagcacgtcgtcctccacgatccccttggggtcctgcggcaccgccgggtagaggcggagcgtctccgtcacgcacgcgtgcaggtacaccagcttccccaccgcgtcgtagctcagcagcgacgcgaactgcgccacgcgcgccgcgaacgacgcctcgccggcggcgtcggcgagcgcgacgccctcctcgcgcgcgcgctcatcctcgaacgcggccagctcgcgccggagcttgtcggcgacggccgggtgcgtcatcgccatgtacgtgaaccacgacagcgtcgtcgccgtcgtgtcacgcccggcgatcacgaagttgagcaccacgtcgcggaggctcttgtcgtccccgaagctgccgcccccctcgtcgccgccggcctccccgagctcgatgaaccgcgacagtatgtcgtgcttgatctgctcgccattacaaatcaacgatatcaagaaacaaaaccttttccgatctgatcatcaccattaccatgtcagttcagttctactgattctttgagcaagagaggaaggatcaccttctcttgcttgccgctggctcgagcctgcaagatctcagccttgcggcggcggatcacgctgtaggtgaagtcatcaaccagcttcatgctctgctcgaggagagcctctgatccgacgtgcaagaacttcttcagacgccacagaggatcgatgaaccgcagcgtgacgatgatgttggcagcgtcgaatgcctgggcaaagctgttctccgggagatcaggtgacagcgtcccgatctcaaccccaaacccgaccttgcagatcgagtccagtgtcatcctcatgaacaattcctgaattttggttagttcttgcatcagaattctgaacaatttggtttctcaagaaatgtttaggtattaggcaaggaattcagttggttacctgcatgtctacaactctgccggccttgcatgcttggctcagaatgcttgatagcttcagggagtactccctgaacaccacagtgctgaagtctctcaagttcttggaggcaaactcgaagctcgccgtcttcctttgcttcctccacatctcgccgtcggcattgaatatgccatcaccgagcagcacatccatgtaagacctgtacacttcaccctgcatattttcagacattttttgtgtcagtgttagtactgtgcaaggcacattttacagtacactgaagatcctatggttcttttaccttggggtaattggtgaagttggtcttcaggacatgctcgacgttcaccgggtcggcaatgtaggtgtaggaggtgaaaggcatgtcgacggtcaccgtcctgtccttcgacaagtactcgacaagccagtcatgcatcctgtggtagttcttcagttgctccactgtcgcgccgatgattggccatgatcttggccctttctggttcctcaggctccacttgtggaccaagatccatgagaggacaacaaggaagatagctatgagcttgtggattcctgctactgggaagaatgatgtcactggcattgcatgagcttcctccatggggctcttcatgaagggttcagtctacaagagatgctatgtagcattttggatggcatagttaggtgatatattgggcactgatgctaccaaccttgagacaatctttgtgtgaccaagaattaagattgtctcattcatatggtgtccctaacctaacacccttaggagttggatcttagctttagttttctttttgtgatctgtccacctagaaaagaatcgttactcatgtaaacacaaaatgaatgctacagtatttttttcccctgctcagccaagttcgttgttttgttcagataactgaagcgtttgcagcgactaaaggtatgccaccttctaatatcagaaccatatccatctgaattctgttaaattgtcaccaactgaaaccaggcttaccattttctgtcgatattgtctagtctttgatgacaactaaaatgaaatggggtatcctcaaaagaaatataaattgtgaacccaaagtagttggtttctacttcacctgaattctacttcatctgaataggctattttaatgaagagaaaatccaagaaatgccatttacaaacacccaaatccaagaaatgctatcgacgagtacgagttccataaaatgctattgtagaagcgattttgtcccagaaatcagttgccatctagttaaaacattctcacataaacaagcaatataaaatactattgccaagatatatccaatactttgcatctctaaagcttctagttattgacaactaatttcttttccagtcaatacaaataagccatctatcaaagatttgagaaattgcagggcacaattctacagaaaattaaagaacatcacttgaaaaggaagattttttctatagaacttatcctttgtgatgtaacaacaaatactcgaatgaattgagaaataaccaatgtcaacactgaaacaagtctgaaaccaagatcagaagagcatgaaaatagtgctcttatggattgaccttgattcttgcccacactcttattacaaccttcgagcaaaccggagcatttgctgaataaatctctcatctgttactgaagatactaggtaactaaataaacaatcaatcaagagtatcaaaacctacaggcttttgttactgtcagcatccaatgtaagtctgaagagagctctcattgcctgcctcttcactaccctgccataggtagccctcccaatcctcaccaccttgtcttccacctcgagccgattgccgcagccgttgccattgtcggcacccctcagcattgccctcagcacgctctcgttcccgccgattgcgccggcgacgctctctgcgacggcggcctcaccggggacgcgcctcccccacttcctcaccagcttgtcggagtcgaacagcgcggagtacgcgctccagaacgacgcgcgcaagaacgccttcctcctctccttcaccatggactttctcatcctctcctccagcctcaccaccagtgctcccatgtctcctcctcggccattgaccaattcgttctcaagttttgtgagttcttgcccaacaatggcgtcgctggcttcgaacctgcaccgatcgcattggcattcgaggccccacgctctcgctgcctccctgcgcttgctcgccggggtgagcacgtcgaagtaggcgaatgtgatctcctccccggctttgatgtcccttgacgcgtggacaatggcgtggtcgccgacgtgggtgcgccgggcgttggggtggcacgagtggttgatgaacgccggcaagatccacagcccgacgccgcagttgacgacgccattgctgccgagcagattggcggatggcgctgcgtcctcggtcaagcaattgacgtcgagcactttcaagatcttgtccacatcaagagatgccttcggcgccatggccgtgccgtcatcgagctcctccgtttcttgcttgaaatgtgccatgtccgggatggggagctcgtcttctggctcctcgccggtggagagagtgtagatgagagatgccgtcctcgggcacttctcggcggcgtcgagcaccttgtcgacgaggtccttccacaccaccatcttctcgccgctatcggcggcgtccggaattactccccttccgatcgccaccgccttggagatcaccaggttagctcccgcctcgatgttcttcaccgcgaacacccctcggccgccgtgcgcggaccggcgcacctccaccgccccgacgtgctccgcgaggtctgggcacttcccggagaacccggcgagcacccactccgacagatccaccgcgccgctcctcgcctgcgcgtccaggcgcttacactgctcgaccatctcccggacctcgtcggtgccgctcacggcgagcgccgcgcggaagcactcggcggcgcgcgagtaccggccgaggccgcgcaggacggcgcccttggacagcaacgccccggggtgcgccgggtcggccgccagcgcggcgtcgcagtcggcgagcgcgccgggggcgtcgccgaggcgggcgcgggcgtcggcgcggtgggcgagggtggagcagaggacgcggcggtctttgcaggcggcggcggcgtcgaacgcctcgatgatgagggagcacacggcgatgtactccgtccagttctccttgagcagcagctgcgtcgcgcggctgcgcagctgctgcagcgagtcgtcgtcgaggccgggcgtcgccatggctgggcggcggcgtgagatttggctggggagtggtggtggtgcgccgcggggcggcaatgtcggaggtgtttgtttggctcggtttcgaaagctcgcggctttacagcgtaacggtcggatctgatttctgaatagtttttcgaacgaaacaattctgaattttttaaactcactggagtgaatgcagtagcaacggctatgagctgtcacacactcacagtagtactccgtaatatagacgtcataatggtcatcttgtaaaaaacaaatactccgtatgtaggttatattggagtgaaaaaatatgtattggtcatcttgtacaatgcaatggacttgtgctcggtagagaagaagtgatgaatgaaataaatctagggcttgagaccgggtgactctctctctctcgaaccctccctcgcctgctacagtaaaattcccctttctcgacccctcttcctcctcgattccggcggccttgtcgccggtgacgggagggagaggggtcgtccccctcccctagtttagtatagtagtcgggctagtctcgttaggtcgggtttttcccgtttctcgtttctatggcgatggaagttgaagacggtggcggtggcgcgattgaggccggtgacggtggaggcgacaaggttggcgacggcggcggcgcggatccggttcgcggcggcggcggcggcgcggatccagtctgcggcgacggcggtggcgcggaccagctccgcggcaacggcggcggctcgaacgcggcccgtggtgacggcggcgcggatccagtccgcggcagcgccggcggctcggacgctgcccgtggcgacggcggcggcgcggatccagtccgcggcagcgccggcggctcggacgctgcccgtggcgacggcggcggcgcggatccagtccgcggcagcgccggcggctcggacgctgcccgtggcgacggcggtggcgcggatcctgtccgcggcggcgccggcggctcggacgctgcctgtggcgtctgcggcggcgcggatccagtccgcagcggcggcagcggctcggtcgcggcccgtggtgacggcggcgtcgccgatccagtctgtagcggcggcgatggtgcggacgtggcctgcggcgacagtggcggcgcgagggctgtctcccacgtcgttgcttccagttgtgtcgttgtttcatggtgcaggccatctctttctcagccatctccatcatctcagcaggacagaagctgatttgcagccattcaagtgcttcttccttgaaggttggctgttcttcggattcatctatcctgttgttccctaacagaagaaaccatgttgggtttgtcattcgggttgagctcggaccacctgatgagccccgtggggatcctttgctgagtccggtgacgcacacaccaaaatctacggctcagcatcaaacctcggtcttgtgccgtttccgtggaggcagccgatggggattaacggtttgtcaagcggactgcacatcttttgaggcccagggtagcagtcgtcgcggcttcgccgcagatccctgtcgacttgctcctttttctgttctgatgttaggttatttcaggaaggttgctttcgtagttcagttaactctcctttcttaaggatggctcttttgcttggatatgtaatggggtttattccctagatctgttcctgcttaataaagttgatgtgttttcaaaaaaaaaaaaataataaatctagggactattgcggtttgcttgggaatggcaaagtatgaatatataaacttattactataaaatcaaaagaaaatgatttataagattttatacaaccttacatacaagtagtagtaaccaggaagaaaaataggagaacatcaaggggtaatatttttcaatacagtcattttgccttcacagttcatgtaatattccccctggcctttgattttccatttaccattgatgagtaatggtaataaaaacgcatagaccagactgcattttgccaaatcttactttgaatttgcaggaacctaggcactcacagttcagagagtttctgagctttggctttgtgttaatgaattgctgtttttcctatatttgaaaagggagctgctatataccggtatcccgttgggatactgtcccaacgggatcgctccctgtccacctccctcagacgctagagaacgaaggtcactatgggagcagcgtagatgaggttgacgtcggcggcgcggacgcggctgccggcgacgagctctagcgtggaggacgcggccaccggcgagctccggcatggagctggtcgcatggacggcggaggatcctgcgtggtgacagagacggcgccggcgacgagctccggcgtggggcgtggacggcggaggatcctgcgtggtgatggcggtggcaccggcgacgagcttcggcgtggaggacgcagccaccggctgaggcgtggacgatggacgtggtcgccggtgtcgaggtcccggcggaggacgcggtcgccggcgacgagctctgatgtggaccatggacgggggaggatgcggctgccggcaacgaggttcgggttcagtgtggagcgtggacgggggaggacgcggccgtcggcgacgatacctcgacgcccaactcctgtatctagtaggtatcatatgatacctcgcaagtatcaccccgatacatcgtagaaatcacgcgatacctgataggtatcacatgatacctcgcgagtatcgcctgatacatgataggaatcgtctgatacctgatacgcggtagaatcacatgatacctggtaggtatcactcgataccggctaggtatcaggacctgatacctcgcaagtatcacgctctacgtggtaagaatcgcatgatacttgataggtatcatctgatatctcgcaagtaatcacctgatacgtggtaagaatcgcatgatacctgataggtatcatctgatacctcataagtatgatacgtggtaggaatcgcctgatacttgatggttatacctgatgcatgttaggatacttgcgaggtatcaggtatctataaggtattaggcgattcctatcacgtattatgtgatacttgtaaggtatcaggtgatacctgtaaggtatcatacgattcttaccacatataggtaatacttacgaggtatcaagtgatacctgtgaggtatcaagtgatacttgagtatggtcatgttaaacctaggaggtatcatgtcccccttagtatcatgttcagtctcaccaggtttcataagtgatactttggaaggatcatgtgatacctgggaggtatcatgatcctcatttgtatcatgtctgctatcatcaggtttcacagatgataccctaggaggatctgcacgaccctacttaggtatcatgtctggtaacacaatcgtatgaatttcatagatgatactttagtaggatcgtatgatacctgtgaagtatcacatgatcctacccaggtatcatgatacatgatcctcaaaagtatcattatgtgtgatacttgtgaagtatcacatgatcctatctagtatcatgtctagtacagtggtttcatgcaagtttcacagatgatacttgagtaggatcatgtgaaacctgggaggtataaggaggtaggatcaattggagtataaggagtacatcatcctcctgaggccgcggccggacgccgccaccgtcggcatggacgatgacgacacgtagcagagatagtacttacccttcctccccggcaacaccatcgccgacggcaagccgtggctggtctgctcgtacaatcacgccgttgacggcttcaccgctgtcgccgtgtcaaagaagcccagctccgacgctgcttccaggacggcatcgcttgcttgtattgctggtttaagcaggaaggaggatgtcaaccttgcggatccggccatggcgatgacgcgctgcgcgcagcggcgagagcacccgaggcggagctgctgcggatgcgccggggtagcggcgacggcgacgcgccgcctgcgcggtggaggtcagcgaggtaggaggacgcgagggacgacgtcgccgccattctctctccaagccaatcccttcgtctcgcgctgcagcggtggatgacgcggtggacgaaaggggatcctgtcccgttccgatgggatcccgttgtttagcattcctttccgtattgaggttcgaagacgtatagttgcactctccgctttcaggttccagtctcgcgccatcctatccacccgattaaaactggacggtcagatcagcaagtccttccgctctctagccttgcactcccgccctaacccttcttccccgtaaccccacgggaaggcgatccatggcggcggcggcgggttggctccggcgagcggcagcggcggcggcggcgcctcgcctgccttcaggccttcctatactacctactccccctccagcccctctcacagaggcccaatcgttcgtgctcccgggcataggcaccgccgtcgccggcggcatggacctcatggccgttcccaagaaaaaggtatcctagcttctccccccactgtatctcgtggtttttggtttgttaccttcatagtcatggtctggtcgtgggtcgatggtgcggtatggcgcaccactgcaccgtgcccggtggagtgcactctaggtgttcgtcggattgcctggagagtagaaaggtattatgacctatggaataatggaaatgtcctaacggtggaacacggggtgatagtgcacacagaagattgcctctttttttctcgatccattgcttggtaggttagtgatagatgttttgtgttttgagcccattccatttggagcataatgtcagcgaggtgtggtcttaggggtatgcttgtttaagctatctttgcaactatggcaaacaatatagttctcatgaaattcagttccacttataactgtgacgaaggctgagtttgttctttcaatgtctaaaaagctctttaattgtagagtgtatactgaaagatgttgccaagactagtggtaagttttcacttttgtttgtaattagcaatgcacaagttgtttgttatgtgagtggatttggcagatgagtcaatacatgtgtaactcatcatgatgatatgcaaatgtgataactcaggaaaaatcagaaaacaaagataaccgagcaagtagtcagaaaatgtctggttaaaggcataaatttcttgtcacatttgatatttgagcatttgcagttatctatatgtaaatagtgatagtcttgcggtgagatcaactaattctaactactagcatagttacttttgaatatgtactttttatgtgctctgttgaagcatgtgcttcatctcattgcctcagcagcttcagctgctttttgagatttgagaattattatttgtttgtttcatgttccatgattgttgcttcttgaatgttgcaggtctcaaaatacaagaagggtttgaggaatggaccgaaagcattgaagccggttccagtgattgtccgttgcaggtaaatttgaagctgaaaacaacatgcttgttagttattctgatttgttctgctatgtctaaagacaacttagtattagtaaatatcatttttttatgtaacagcatactttattctgattgtttcactactcatgtggacaattattagactgttcagattgttgtctagcgataccctcactctttacaatctagaatgcaatagtatcaatagccaccaacttaggttttagtggagcccaaagtgcagacacagaaaacatgctatgtgatctagcatcacaaatgctgtagaacaacattttggcgtgcatcagttcttcccagatgattcagaaattgcgcgactcatttcagtttccggatttgtcatcctttgctcattgttgttttttgttccatgaaatttatttacataattgttctggagtacctttccattgtgctgacgctgaaaattgttcatcttgaatggcatgttgcaaagtttatataacctggtatcctttttgtgcctgtcaggtgctgtggccgagtgaagctgccccacttctactgctgtagcggagaaaaagggaaccccggcgactcaagctcataaacctgttctgtttctccccaagttcagtctgcactcagcacatcaagcaatgtctgaacactattccaccatgaacgttttcagatctcattttgtgttcggccgctgttctgttttcaagctttttaatcagtgtacacactttaaacccagcttggatttcaaaactccccttgtcaaaaactcaaatgccactcgtgacatgaatggatgcattctgtctgagacaagaaccaaatgtgtgcatgtgccttgctagaagaaagaaataaagggcctcatcttttttttgcttatgcttatgtttatcagctaaaatttaaattttcaaccttaaatttggagttgattttggggttttttaatcaaagtttatttttcagcccttgtttttagatagctaagaacacgtatataaaacaattaaagttgtattcacgaattatttttcgtttgccaatatgccgtttcgcttattccctggtagagccgaaaagtgtaacaatccagcagcacggacaggggcgaagctagcatcaaaataagaggggtgcactaccattgagaatctagaaaatttcagcacataactgcacattctagtatttttaagtccgaaattaggaatctggcacatagtatagtttcgccactgccgcacggaaggtgggcgaggaagactggaagagagatgccagttcgagatgcggatgctctttcattttcgtgccgtttccggtgcggtgcaggtgcaaaaatgctgcaaccacacgcgcgcagtggtggtgcgggtttggtagaggacgaaaccgcggtcgttggcttggccttggctggctcgcctcagagccgccaccaactaaccaaccaaaaactcctccccaacccaaaaacgcgacgaaattcgctggcccccacgctgcgatttatgtggaccggctgcggcttgggtgcagcagcgagcagataacgaggcgaagcggagccagatttccctctcctctcctctcctcctacgcgacgcctcctagccgccaccgcttcaccaaatcaaaagctctcgctgctcctcgagagggagttggtggagagagaaagagagagagagagatggcgtcgccgtcgtcgtcgtcgtcgctgtgctcgaccttcgcctcgccgcgcgccgcctccctcggccgccgcctcgccttctcctcgcccaggtagttacccccaccgttcgcttccgagattgcgcccccttcttcgctggtatgcgccgcggccgacccgatctttgcgagctctcgcgctgtgcgtattacgtccacatggttaggggtggttgggcttcggggtacctcccggattggacaaaactccattcctgaacgccggatagcatgtcagagtcaaaccttctgggactggatgggttcatgagctttgagctgccggcgcaggttgaacgagctagtattgatgctatttctcccaactgctctcaagctgcaccagttgacttgaggagttcatcaggacggcatttcttagaacctttactgttgctatgatgctatctgttatttgtgttttgtaagtgatgtatgtattgcctagtcatgataaaacatgacaacaaaaggtacaaatgctggttaaacttaaaatcacatgttgaggacttcactgctttcttaccttggttaagtgctgtgatcttaaggttctcattctgtttttcccttgatgctttgcaggaaagcattccgagtgagggcatcatccagggttgacaagttctcgaagaatgacatcatcgtgtccccttccattctttctgcaaacttttccaagcttggcgagcaggtctgtcaagattctaccctccatcaaaccaccatgacatggaaatatatgtaggaggatcatttaggctactatatattggaataatagatcgatatcatgagacaaagaataggttgataatatattgtgtgaataatattactaggtaaaagctgtggaggtggcaggatgtgactggattcatgttgatgtcatggatggacgttttgtgccaaatatcacaatcggacctttggttgttgatgctctgcggccagtcactgatcttccgttggatgtgcatctggtacttcttgagaagccttactgaaattttaggtatttatgtgctgtaatttttctttcacccttgctaatttggcgtttgttatcttatttattgcagatgattgtggaacctgagcaacgagttccagattttatcaaggcaggtgctgatattgttagcgttcactgtgagcaatcgtcaaccatccatctacaccgaacagtcaatcaggtaaagattggcatcttttactagttaatatttgagatagctcatcctcgctctttcagtcattcatgaattagcataccactgtagaagtgtggattcctctccaaattgaatcagtattttgttttatgagttttactggtatgtgaccgggaggaaactggactttcactagtctcctgtcaaaggatcatactgtaatatacttgtatactgtactttaggactacttaccaaattgtttcttggatcctttatatactagataatggttatcgtttgctccttgagctaaccatttccttgacatggtgatcgggactgcaataagttgatttcttacctgtctaattctagttgaacttgagatatactccatattcatttttggcagtaattgcgtttttattctaaggataaaaatctaaaagtgacatagtggtctcacattttttcagatcaaaagtcttggagcaaaggctggagttgttttgaatcctgcaacccctctcactgcgatagattatgtacttgatggtaagactattctcactccaatatttatagggtgttgacacgtgtgtaaatctattgatggattgatgtccaaattctacttggtagtcgtatgaattttgttattattttcaatgtatcaatcctaatattagttgttaagtgtgatgggttgatgttgaaggagcacacatgacatgtttagattatgtttgtaattttgtgaattagacaagtcactcctgttatttagttacctattgcagtttttataagcatagccataatgcaattttagttaagagtcaaaactgtgctatttctggtgaaaatttgatgagtattgactgcattccaatcttgactttcttgactatcctgcctgtagtcacttcgtttccttggattaagcataattattaacagcactcacagtagaaatttacatgtctttctcatcgtacgacactattatttctttagttcatcaatagcccaacaggcatatactccgacaactgacaagctactacatttgtctgcgcagttgttgatctagtattgattatgtcggtgaatcctgggtttggtgggcagagctttattgaaagccaagtgaagaagattgcagagttgagaagattatgtgcagagaaggtatatcctcatttcctgcatgtattctcactgagccagtgctctaagcgtgcatttcattcttttaatagggagtaaacccttggattgaggttgatggtggagttggtcccaaaaacgcctacaaggtcacctgatttctagctttctgttactgttatttttttcactactgaataccaataacagttttggactagaattatggttcagttgggtgttaatttattgtttctttgaataacaggtcattgaagctggggccaacgccattgttgctggttcagccgttttcggggctccagactatgcagaaggcatggcttcttttcagtgacatacacattcaatcatcaaacactaagttcttaaacatgaatttctgacatagtttactaacagatagtaatatgcttatgtttttcctcttgcaattttgcagctatcaagggaatcaagaccagccaaaaacctgtggctgtaccagcatgaggatcctaaagtagtatgctgtgtacgttgtttttgtttaccagtaccgcggtttgtacagatatgtgccaagctgtacgttatattggagaaattgaaggaagaagaaaacgtggagggcgaccgtttttctcactgtccgcgaagatatactacatattctcagtgtcatgtgatactaccgtgctcacgaaattgttcataataaatatcgttctttagcaaatcctataatgatttacacttctagcatttgaaatttatccacaaatatatgcatttttagagtactactttttgccccagtaacaaacatatgctccgcactggagtattgggtaatgtgacagttgaaaatatagtactaccaaaatggtcagggggcaaaaaaaaaaaatcaacacttgcgaatttttttttcatagaaaagcatgtattttgctttggctatcatcatgaattaattgattgtcatgaacacgaacagtaaacaaccagcccaatttacatgctttagaagggcattcatattctgcattcggcaagtgaaaaatgaatcaatcaatcgcaaagcgaaaaggctgacctatacaacaggagatcaggaaaaccggttaaacgatcaagatggactctgcctgctgtgctgctggcttcagtccactgcacgtcgccataataacttggctcggtgaggttacaacttgacttgacgctcaccttacactgattgcatccttggttcggctgcaaaatcttgaattggccaggcattcgtgtgggttagcataaaagtaatcctcttcttttggcttattttcaagtttctgccgacaggacggttgaactacacgatttctatgagtttcctggacagaagatgcaaaattgttccaagagattgtcttattgttgtacagatctataaatccaaccaatttctgtcggtctagtagcacacttctcctgaaacccaggaacctgaaatattgaaatgccaataaaaaactaatgaccacaacatatatctgattgcacgccaacttttggctacatgatcaaatcatactgaactgaacaagaagcttgattttcataaagaggaaatctggctgtgtccatacctccggtgaccttcaacaagttttgccatgttaccatcataagtaggaatgaaaatatcactggctgtggatacaatgaagtcaagtgcagccatctgagaagaatggttctggaattgtcgtagagcttccaagtctagcagcgtctcctttcttacctgaaagatattcaacactgtttatatagcgaagtgagtgaacatttaggcaatgaagtggtatcccaaaacatgtgaaacagtgttggcagacagatagggaaaaaaacacatgcattgaaatttatgaaaactgtactacaattattaccagttaccataacacatggaaaaggcaaaaaaaattggcagcattttgactacaatattgcacttacaagttttggaaatgcagcttgtaatggttctaatcttttttctcccccataaatttcaccggcagcaatgtatatgagagtgtccttctgaaatcccagagctttcagaataaaagatgtctcctcaggtgtaagtgggcatagcccttgcaatctcttagcttgtgaatcaatttccttttctctccaccatggataagcatatctgtttgagagaaaaagttggcctcagttgcttgtggcttgttgtacttttcttacacagaaaacattgagacacttatcttagagacatagacgtgcaattgtgtgtccatactcagcactcaagaataagatagcaattgactaatttgacaatattaagaataaatgagtatttttcctttttcatttcattgaaatgaatccaccataaaaaggagagaaaaactaggtatgaaaatgacgatttaatagactcagagtgatgttttataaactcaaataatcaccaaaaaggtaatacgagaatgttacatagaattgtagaagactgttacacatagtatctatgacatgaacaatcatttctagacgagttaagggggtatagataacatcattaaactattacccctttcattttaaatagatgttgttttgaattgtgtgtagtcaatgacattagtaggtacataggcgaaggaaaaaaggtccaaatcgtcatagctctaatatttttagtgaatatatgactagaaaaagtaatggtcaaaggtgcatattcgaaccatgcaaatgtcctataaacgacataagaaaaaatacaaaaccatggagagtgagagagtgtgtgttttggttgaatagggggatggtgtttgcctcctactacaacaaacgacataagaaaaaacggagggagcaatggagtgtggtatttcctcttatatgcaaggaactacttgggtcaatatctgaaaggctacattttggtatttattaatatatatataagagcacaagatggcttttgacctcattcttttgagctcttcagcttcttcttgagaaagaccatgattgcaaccagaaaaggccagcatgtccatctcatagcgtaaatgcaaggctgcaaatgatcccttggcctgaagtttctgcaccagtttattccccaaggcctcaatttgaggggtgaacttcagtgcatgaaaattaacacggcacctaagtagttgaagctgtgtactgataccattgtttgctaaccgagcatccgtcttgttaaaatggatgacgctatatttgctgaataatggtaagatctgcatagataagataccatgaagagtatataatatatagtaagcatgtgtcaagcaagatatatgtacaaacctgatgcaagtaatatttttcatcagaccagctcacaggtggcatattaagtatattgtttgaatcctctggaccaaacctcttcggaagctgtttaacaatgtgcacttcatctcttaatgtgtcaatgaaatgtttaacatcaaatatatcttcaaaattgctgcaaagtattgcaaaaatatcgcacatttcagatattaacatggtaggtccggtacataacctatcctacaaaatgaaaaatacctttgatcagcccagaatgacctcttgtctagttctgggacaaccattgtaaggtttagcaagcgagcaaccgccaccatgtcacatatctggaatatatggtttcaaaataacagaagtataaaaaagtgagagacaatataatactgagcagcaaaactaactcaagtaaaaaaaaaaacaactgacctctgaacgcatctgattcaaacccccattgcaagataccttcagataaccattactcttatagactcctaaaaacaaaaaaatcaagttaaaactgatatgcccaagtgatgattaatgctgcttcttaagtaaacattcaaaaaaatgaggatgtcaatcagctagtgcatccatttatgttctgccgtgacttctagagtgaaaaccatttttctcatcaatcgcaactgtacttgaagcagccgcttctacaacttcactaacttactatcgatttgggaaagggcaataacaagttcatccacatttgaatccaatacactttcatttgtacaattctactcatccctacagaatgccaccaaatccatacacatcaaaattcaaaactgaacaaaacttaaatcaaactccgcgaagaaataactaaacaaataaacaaataaataagacacggaggagatcacgcacttcgaggcggaagcgcggtgggcggaggcgagggctccgcgtcgccggcgaggccgaacaaggcgaggaggcgtccgacggccacgagctgcccgacgaaggcccacagcagcacggcgctgcaccccgccaggagccaaaccctaggcctcgacctcgccatcgctcccccaccctacatccaccgccccctcctcctcctcctcctcctgatccccgccaccggcattggcagccgcggcagcagcagctcctcctccgcctcctggttcgagaaggttccagaagattcgggagaggcctagctgcgattttttttttctttttc

SEQ ID NO: 9777 - DNA, 38404 bp, Oryza sativa
tcctgcagcccacaccctaattattcctgaactggatcggtcctggggatctttgcagtatcaggcagtggggttctacactgccctgattgatctggttacaaacaaacttacaacacattattcacataaagcttttcacttacacatgaagagggttccagattaaaatagctaaagcatgtgactgccctgttagtgctgagcactatgttaagataatgcatgtgattcctagcatctgtatggcaggcaggcctacttgacctattgtttagtagataggaggtactcttgattctcttgcttgatcaagtgtgcacttaaacaagagactgatctcacttgtgtgtgtgtgatggtgtgaccttgggtggtggtgaaggggctcagcataaataaatcgcctccacgtgacaacctgtacggggtgttttctactaattggattgagctacatgtgacccatgagacatgctgcagtccaaatatgcttagatcatcgcccactagctgattttgattggtgatttgatgttttatactggttacatcgtacttaatgaggtacatagtcatttgtagagtttcttatcctgtagttggtattctatgtaagagctatgagggtaattatgcttggaacatagctagggctaattaactttgtgaaaaggtcaatgggaccattttataaacaggcagtacctaacagtttatgattattttatcagtggcagtggatcttgtgaaaaaaaatacttgagagacaaagagaatttttagcgcatgtatatgctgtgattggctggctaatcagatgtttaccaggctaatatacctattagctaaatcttgtgctcatcctacgtcattagctcgtcatttctaaattatctcttcgttattatagattttcccatcgttatcctagatatcctttaagttcataaatgttgctgcacaataattatttgaatgccatttcaattaattgtttagcagtttgccgatgaacatgttttcgtttaaatgaatacccgcttatgagctagtgcaatgtgtgcattctacagatcacttcgatctgtagcgttgcgctgcttgaaaacttcatctgcattactatgacatggtgttttgctgtgctgcactttgaatgagtcactaatgaaaaaaatggaggagatcttgcagctggaatttgctttaggagcattagagatcttgatataaaatgcaagcacacacgcatgcacatgtttctgttaaataatttattgtcatgtcaacattataataacatctcttatatgcagctgttgttaaatgaagaaagcacttggaatacacccagtagttgcactttacctgctggagagatgcattgactggtcaaattctgaatgattgctctgagttgtgcagcaactgtttcctggaatgattcatttgcttcaagatctatacataatacttaataactattaagtttgtaaacatatagggtgccatatatatatatatatatatatatatatatatatatatatatatatatatatatatatatattttgaagagaatatagggtgccatatagtcccctgcatctagccctccttgaatacagaactaaatgttgtgtaattaagatccacaaatattcagataccttacatttgttagagttgcttggaagctgagattacatgactatgatattcagaattaaatgctgaacatttgttagagttgcatatagagctaaatgttgccaagactaatttgttgcaaatcgtaacttcccaaaagccattacaggttatgttttaaagcctcaatacatggataccatagccataaaatatttatacttattctctgttcccattgtttaacatgtaactgactgaaaagcttgctcactgtattttgttatcaggtctaacttgagcaacagaacaggaatggctaagtgggggtgtcaagactcaagaagttcagaaagtaaaatacttttcatgccacatgtaagaatttacttacaatcagacaattccctagtctaactccaaattacatacccgaaagttgaagcagtgcagggacctgatgcatctgccctgatatcggttctcgttctccctgatagtttgagtaataacacctacagtgtgacccatgcctgtattgattatcaggcgccacaagacatgggctgtggatgccagatgattggagaagagaccagccagcatcgtgacactgctgagtctgatacacatcatgaggtaatcagcactttaaaattacttgatccggttacttatgttaggtcatcaactgatggtttcatcagcaagcatagtaattctatatgacacaggagcacgtttctagaggacagagactttcatgattctattttccttgtttggtatcaaaggtgtttagaaccatgtagcttagttatataaatatgaattaaactataagcaaaataactatacattgtctaggaagcaagtcctgttgactgcttcaccctgcgttgtttttcctctggacggccacgggcggctagccggggaggcgtggcagaccgcatttggccggcgcggcagcggcggtaggagtgctcggaggccagctcgacgcatagaggcgcgggctagtggcagcggaggtcggcacggcgcgaggaggcgcagctggcggtagtggaggctggcttggcgcgaggaggcgtgggcggtggcgggaggctggcttggcgcgatgaggcgtggccagcagtggaggaggccgacacggtgcgaggaggagctaccagtgggtgcggtacggtctacggcgcatgaaggctggccggcggggggtgccggtgtagtggtcccacatgtcggcagaggttggacagtgtggagcatcggggcgccagccatggactcgcaggtggtgagcggcgggtgaaaacccagcccagcctcggccgggccggcaacagtgacgctcaaagcgtcattccccttctgggggcgttatcatgccgtctcatccctcgtgtgtggacgttgggtaaaagtcgagtctcggttctctttgagaccttgacggacgacgacggcagtgttttcgtcgcttctctccttggagacgtcgtttaggtatcccttagccgaaaccccccatccaattggtgcaaactctctctagatttcttcctcctgtggcggcgccctagtctctacaaattggccacgtcggagggcctagaaggacaggagttccattcttctctctcaccctctctccctgactcctgaagacttggatagagcggggctttgtgttgattgtaagggttgggttttgggggatctcagctgtgtttctttgtttgcctagaggcggtcggtcacgcttagcggctgctggcccggtgctagccttttcttggttctgtgttggcactgttgatgtgtggatggtggtatatttttttcctttttcctggttacgaccttccagggttgtaatcttgtaatttttctcctgctctatcaatagaacctcgcacagtcttgtgtgagtcgttcaaaaaaaaaaaagagctcctagtcctgattaggaagacaagaggtgtatgcttcatgcatggctgtatactgaatcctagacatggatacaaagccatccatcaataaatgtagcctcaccattttttttcatatacatatatattattaaatatcaaatgtgggggaaaataataattaatccacacattttttgtaggccaagtaacatggtttgcgtggttctttctgacagtgtaggcctccaagtcgccttctcaccagcactttatctcctgttgttctgagcttctcccacttgcaaggggcaatacacgagtagcagaacatacactacacatcactcctcagtatggcctgtccctctcttccatctctaagagttcctcttcccaattcatgtttctggcatgtgactgccattggggccatattgtagtgtggcccctgttggtcagagccttgagctaggtgacacacttgttgtaaacgggaaggtcactctccctcttgcctgatctcatcaggttcctctatttgcagctagtagtagtctatttaacacgccagtagccacccatttctttctcccgtgcggctgtcttgtgtttctcaaactttgtcttacgccagccaaccgtaaacagacactgtctgcgcgtctctcttgcaagaacagctagctctcccatacatctctcctacgttggctgagatcgattgctgccacctacattggccgatatgtcaagccggaggtcacggtcgaggcagtcaggctcgtcgaggatcaccgacgagcaaatcagcgatcttgtatccaagttgcaggatctcctccccgaggctcgactccggagcaatgatagagtatgtaattctatgcactaaatggttaattgctccacaaattcccagtctaaataacagctcgaatttattctagttataatagattagcattattcaccgttcactctagctttgaccacattaagatgggggtagaacatgatcggttgttacacctactgccttggcaaaagaaaaatagcagcgcaagttgaatgctccttatttctaattcctaagcagaagttgaagatcatatgaactgatgttaccaatcgactaatcgactatgtcaaacaatccaagcatcgcatcattttgcattcctttttccttcaacaattgtaattaagcaccaaatctcaagagctgacagagaaatcttctcttctccaaatccaggtgccatcttcgagggttctgcaggagacttgcaactacatcaggagcttgcatcaggaggtcgacgacctgagcgagaggctgtcggagctgctggccacgtccgacatgagcagcgcgcaggcggcgatcatccgcagccttctgatgtagccgccggcggccgtcgtcgccacattgtcttttgctgctgggcaatcagcgcgcacacaccctcggaatgtttgtagcttagagagtgatcttaattagtactggaggagcagggattcctaattcactctacgttcataagtaatgtaatgttgttgtcatgtcatcttctaaaccagatcaatcttttttgtgtacttaatcaaaatccatcctgattcgtgcaaagttcatacagtaccattttttgtgtgttttttgctgctatgtgtacagtatagtaccaacctcgccggcttaggaattgccagcgagttgcctctttcggcgctggctgaatgtacacactgctgccccttttggcacaggaagattcttaggagttgtctttcagtttggcagcagggtgctttgctaatgccagattcctctctctctatttcctaagtatcttacaaatgcgagctctcaatttgtgcaagagcgacaaaagcgtcgcaattatcagtccatggccaactgattaatcatttaatcacaaacacttgctcggttgctccatattgtaccgtgtttgtcgcaaaaaaacaaaaatgccagtttgatttacactttggaagcacggtttccatatttgctaatgccaaatatctgtagtacagtactccctccgtccaaaaaaagataaaccctgggttttcgtgtccaactttaacggtccgtcttatatgaaatttttttataattcgtattttcattattgttagatgataaaacatgattaatattttatgcgtgacttgtctttttatttttttcataattttttcaaataagacggacggtcaaacgttaaacacggaaactagagtttgtttttttttggacggagggagtagtaattagtaaaccgtgccagcctagccgagcgtgtaacttaaaaattacattggccgttgaaaggatttcgttagctgcaaaaaaaaaaaacaaaaatgcctggttgatttaccctttggtcagtctgtgaagaaatatctggtagcagtaaaccgtgccagcctagccgagattgtaacttagagcagataggatagtagattattagtcaagctataaacatattttaataaaataaaagatgagagagaagagcagcgggttacagattatagcacggactccaagacacagtgtatgtatgacagataagattatatattaataatatagtaagcaactgttgtataaattgatgattagattgactatagatgaattggagccaatagtaagctatactattaaacttgctcttaaagatcacattggccgttgaaaggatatgattagctgcagagccgataagattttcaattgattctaggtgggaagaaagaaccgggagctagatgattcgttaatatcggtagcatcattttagaaacgaaccctagagattctgctatcctatcctccgtgctccccaggctcccggcgtcgtcgtcgtccctacacttcgcacccagtaggcactaccaccctatcgttgcaggtcaaatgaactaggctactaggcgctaggtagctctagtacaagtgaagtattctatcaagagaagatcaataaccctcgtgcacacatgccactagtccactactccactaccagtgttgagcaacaaaccaaccagaagcttttgctgcacgggtgcatatgccgctgtcttatcgttgggattttacggtgtttatttttggtgcagagagaggcttttcagaaagttggcaactccgcctagtgaaaaagcagcgcgtgacgcgtcgacgcacgcgactacgcgacgagagttagcggcgccggaggcggagacaagacaccgaccgcaagatgggccgtgcgttcgatctgcccgcgaggagcagacgagccggcctctatccacgcgcggtgaacggggccggcccgggagaatatctgggctacgcgctggtgtgacgcacgcgacatggagagcggaggcggagtatcgtatagaaacaagtgcaatttgaccctcggaacaatattgatagtagtatttacttacgtgaaataccagttatcaaaagaaaataaagtaaagcccacttgtcatactcccctcactctctctctctctttccttctacaccccgctttcactctacccgttttattgccaatagcaatggggtgcacgacagcgagcaccaactaggtgacagcagcagtaacccgatgcgtcgcatgccttctgtgtcaagcggtgccccgacgaggagcggttgtcttgagcacctccttgtttgcggcacaattccggcggtggagacggtgatggcatggtgggccagtggaaggcatcgaaggatgtagggagcgcgttccacacttccactccttgtccgcgctctgtgccaccactgctgcacccttccatcgacgacgtaaagcagtggcgacgaggagcggcaatgtgggaggcgagaggatggatgggccagcgcatgacttcttttcctcctccccgatagcaaccaggcgacgcccaacacccccaacactggacatcagacgacgcccgacacccctgacacctgacatggagtagaaggaggaagagggaagaatgatcgtggtgaggacaacggggcggaccggtccgacgccatccccaaccgagctagccaccaaatgctagatccgatgtggcgggacaaagcaagcttgcctctgtccctcttcttcgttgatagctcctcttctccccgagcgccgtgcatcgagataggtacgacgagaatcttggcacaaccaatcttcttcctcaacttcctctagtcgggactgcccacgcaaagccacggttgggaggccctaacgcgtgatagcggcctagcctcaagcgaagcggcgacaacttggccttgaggtggaccgatggcacggcagaagccggagcgacaacgtggcctcgaggcggagtggtggttgggtgctcctgacgcgtggtggtggcctggcctcgagtggagcagcggtggctcagcttttgaggcgaagcaacgttgcggcttggagatggagtgacgatggaccggcctagaggcgagacggcgacttgctgtgcccagacactgccgccgttgagagacgtggcacgatggagggcgttgttgaagtccccgtcgtccttggctcgccccactgcctctatcgtcagtggcttccgccgcatgccatttactcacgatcgatgccatgtaggccccatgtgctgacttagctggttggactaggttaatgagccacgttagtgaaaaccaccgaggaagtcattttgaaaatactcacactgacatgtggggctcatatgctgacttaaccggtttgactaggccaatgagccacgtcagtgaaaatcaccgaggaaatcattttaaaaatattcaacatatgggccccatatgccgactttagacagttgaactagatcaatgaatgtgaaaatcaccgaggaaatcattttataatggtttttaatagttgggaacaaagatatcttatatttatggttgagggataaattaaattggacccttatctgcccgcccgaattttttatttatagtaattaataagtcttgaattaaataagtggtaaattttaaattgaatttgtaaaaatagcatgaacgttgtttcaaagggcgtccagacttggacggtgttctaagaagtgtccagaggtggacgctgtaccgaagcacgtccaggctcggtttggggcgcccatgccgccatgcggagaggtgccattgtggactctcctctcctcgggcccaatgttggtgcagggctcgggcaaggtgctgccatgcccgccgttcacctcgactctgggagactgcaacagccgccttccggcttccgcctccacaacgtcaggaatctgccgttgcagttcacctcaactcacctcgaaggctctcgaatccggagaggacaccgccgctttctgccttcacgccgggaggtcgtagccgctatccacgttctggttgagtcatgctggaacaataacccactcgtgccggcttgtgttgcgtcgtctgtccgcccctcttggttcctaacagcaagtccaggcatcgcctcactccaggtggctggccgagcaagtatgctcagttcatagatcttggtattcaggtgtatatgttctgcaatagaaagcttacaaagaatgcaaaattacgaagggtaggacgcaaacatcctccttctatcagatcatctattgcccgatgacttccaatctctggcctgttgcaaaaggaaaaaaaaaagcatcgatcgaagacctcgcatgcagttcatctggcggccgcttctcaagattcagtcagtcgcttctcaagattcagtcagcagagagctcgatgcgtagtaaacaatggaccagaacaaaaaccaaactaatcaaatatctcaaaataaaagtggtggctgttcacatatgaccccgagtagagtgtccgtcatgcggaacagcggaagcattgaaggagggccgggggatggcgaccctgtctggcagattaggtagagagcggtgcctgctcggcaagcaagcaatcaacgagagacaatagtctgcataggagtaacgaggtagagttcgaccattgtgtgattggattcaaagtccaatcttagtccggtgaattggatggctctttgaggtcttcaactgcagcattatggacgcccttgtaagaagcgtccccatctggatgttgtctacaacagcgtccacacctggacgccctatgcaatagcgtccttcctattttcgtaaaaattgactttgttttattatatatttaatttctgcattattaattattatgaataaaaaattcggtctgcccgcactcccgagcggtacacggcccgtcacgggagaaaatctgggctccgcggttccgcgcccgcgcgaccaccgaccacgcgcgcgcccgctcccgctcccgcgtcgatcggccgaaacgccggaacggtgcgcgcgggatcacgggccggctgcccggccacgggagattttgggtcggggtgacgaagcgagcgaggccggccggtgcagtgaaagtgaagcccaccgcgcgcctacgtacccaaccggccgcgcgcggcgcgcgtacgaagaaacgtggctacgtgtggccttcctggtcggcgagtccgccgcgcgcgcgcgtccccggtcgcccgcctgcgtacgtacgtatctcgcgccgtggcaggagaggcaccagctagtaccaggcatgtcatatttgtcacacacaccgcacggtgacgacgtacgaagcgattaggagatttgcaggaataaaggccgcgcccccacacactctgcgtctgcgtacacatccatcgatcgaccatacgaatatgttcaagagaagaatggggtaacacgatcacctggcagggtatatcaatcgtggatggatctaggccagtgggatataggggcgtgtctgaagttgacaacacctaccctgtggcaggtgcatgtacacgacgcatatatatgtatatgataatatataaagtcttctgtatgattgcagcatccgatcctaagagcacttcttacagcatcctttggctttccatcaatcagtgccctcccaacatccacattccacgcggtcaaaaagcacatcaagccaacatcactgcactgtgctcataatacaggccatacaggtataggctgcctcactggttcgatatgcttcggccaaaaccaattcgatccaagggtgtatagttctcaaaggaaaaaagatccaagggtgtataggatctggacctatcagagacattcaaattaaaggactttttgatggtaagaatcgatcatacttttgcggaactctagggttacacgcttcaacacaataaacgtttcgtttcgaatttctcctgagaagacctccaacttgagatacaatgaatcttttctgttcataaagaaaaaaaaattaggttcggatccaaaggtacggttaagaccgattgtagaaagtgggtgatacgtttttgtatttctatgagaaaaaaaatacgacatccacaaatcttagtagtaagtcatcgtcgtcgtatcacgtgtatcaaattcttattaataaggaataataaactagtaaaacttcatagccctccatctctttgcggttatcgaatatttttcggttctcgtgtgtgcgacacgtgtaaacattacacgtaggtacaaaagcttctcgtagttggtgacaagaaccgaatgggttgtctcccagttatttcactgtatacctatgccctagggcttttaaagatggtcatggttgatagaaaatgatatgatatctatgccggtttggtaaaccatatagatcttgtgcaaataaggagtagggctagcttgtaaggcactacttagtactacgaggattcatacaaagttccatgtgtagataaagcgggataaacatgagaaataaacatattctcaactagataactatatggtagacgaccatcttccaatttacaatatatatctttcattgggtaggtaatgggaataatcatgcaatttatttatctcgtaagttgctttgttacacaatcgtctaaaattatgtagctagccccttaatggaaagaaataatttataaacaactcaaacacactttcccttcctcatttccccattccctatatatccatgaccccatcgcgatcgtgccacctcggccccaacaccgtcatatgtcccagcctgttgccgccaaacatcgcaacccaatctccatagccccccagtcttcgccgaccatcccaacccataatcagtggctcctcaccctcaccagcactattgtcttcgtcctctccaatgtctttggtatctccggtcatcatcgcctccactaatctttgtccacctcaattgacacgtccttggctgcgttggcatccccaagtgctcatcggattcgtccactgccaagtcctcgtcctcgtggcagcttccccatggccatgaccttattctccttaacgatgacgtatttctcaagtgttctccagatctgactatggcaccaggttttctgttgcagtggctccacgaaatgcctaccggatctgtcggtggtgggccatggtcgattgcagcatgctcgtttgtgaatttcctgagacgccacgctctttctccatctcccttttggaccacctactttaatttctttgggccttcacgtggcttgcagatattactttgacacctataaagccactctcaaacttcaatttacccgtggcactgcgcctagcttggatgaaaacacactatgaatgtaatatctactgttgctctctaaaaccaaccgcgaatgctggaggagttaacagcaaagacaagaaaggataatcgagatcctctacaatactatatgtgcagtactacttactgacatgtgaatcaactgtcagtgagtcgatatgtcgtgaacagtactgcacatgtatggcactacaagagtacttgcatcgaaggaagaagcgtcaaccccccccccggggcgcggcgagcacacgcgctagtcgcggtagcgcgccctgcgattcttccttatccattcatgcatgcatggcagaccattcctccattccatttcgatcgattttaactcctcggtattgcaaacccgatagcctcggtatgccaaatcttggtgttacggatggatgcatggatgatgtggttgaccaacccgtcgtcagttgttcattgatcatacgcatcggagaaagaaagagactttccgtctttctttaccttccaatccccgttgacttggatcatgtcatgcagctatctgagtgaattgtttaattaagcaagagacattcctcgcttgcactgcaccggccgggcacagaacaaattgtcactgtcgcggtactgaattattcagacaatctggctgcatctcctcattttacagcatcagttagacaagccaccttttttccagtagtatgggttatgtgtaggtttgctgcatactcctatataggagtatcgctttagggaatcaatgtgcaggctcccatagagttccagctgaatgcttcagaaggaattgaatgtccatactgcagatttgtagatgtagatatcgagaagcatagccttatatctgcatgcatggacttggatatttctctcttatctgatagcccatgtatagctctatatctgcacaacactttaccatgcacatatatttgcatctagctacaactccgtcagacatctagctagctaggaggtgtgtgcaacaagaacaatatcatatctcacaccttttccgaaaacttcaatgtcaaaaccgcggcatcatatctccattgacgtggttttctctttttccagagaaaaaaaaacatgcatgttcagtagtacgaattatagactctactgcaaatgccaagaaatattaattgggacaaaaacgacgaaatgaacactgtattaacccgatgcaaactgtctaaaagtagcgtttaattaagctgaccattgcgaccgaccgaccgaattgaatcgagtctccaaaagaaaaaagagaaaatgcccttctcctgcatgcatgcagtccttggtgcagcagtgacctcactgaattttgtttgttcttggctagggactgcttggaattggattttagtctagcaaaatttgactccaacatgggagcatgtgagatatacatgtcattgatcacatcactatactgctgtgtatcttttcataccaactaccataatatggtagcccaagtagtggaaattaaagaaagcacaactccatatctcgatccatctatcccttatcactatatatatctatatcattatcccgtagctattttacaatatcacaaatatataaaaagatttagtttttttaaggagtgaatatgttcgtttcagtttgactataatttcctgaacttttttcagtgaccgaccaggcgaccacccgttactaagatcagggtaaaatgtgaggccgacatgtgtattactggtcaatggcagaactgaaattcgaaaatgtattgatgtattattcctcttttttttttgttcaaattaagatgacacgtaggctccagcaaccatccacgtggcggcaggttgtgcacgtcactccatctccaacacatcagcattttcagcaaagaaagaaaaaactgtagtggactttgcagaaaacgctgacgacgagtacgtacgaattaatgccttaatcatatgatatctccaaagattaattaataagtggcttgcttaattttgctactaatcgctatctcgacgtagccagagagccatgcatgcatcacagcgagcccacggccgcacgagcactcgccaacgaattcgctaggcgtacaccgtgaatgatttgatgcgttgattacgggtattcatattcctttatgaaaggttattgtcagactttttttattccacaagatcgatcatactacaaagttattctacaatagtttagaacacttatccagttgtgttagaatataataatgatggatggatatgtatgccatattaaacaatctaaattccccacaaaacatataaaagaacactataataaactatggtttatccaacatggacatatatttaaatgaagtgcgatctccggtgctctttactggtaggatgaatgatgatagagataaaagcgtttaacaaatatggcctcaagcgaaattcgttatattaattaaatcaatgaaaacatttactggattaataaaactccatgctactccattataaatgaacgcacacctatatatagcaaaattcctatttgccagtaggtccaatacttcggatctgtttttttttcttttaaatatccaaaattgattttggataactactcgacagtacaaacgaattaaaccagctattacaacgtcgagtggatttaaaacactcctctattaaattcacctacagaaagtcgttcccgctgaaataatcgcaccgtctagaagctcggcaagcgtgtcgctaatccgatactaactccattaattccattttcatttcaataattgttgaagttattactgcactggaaataataaaggcaggggggtgtaactgggtgtgtacaaagtgttggtgagcatagcagttggcaggtgcaccaccctttattatattcctcctttctctctctctctctctctctctctctctctctctctctctccccctcttcctccctttaaatgcttcgcctctctcgctcgtctctccaaacacaaacccaccacctcctcctcctcctcccatccagcacgcgcctcctctctcgcgcggctttccatttccatctccccctcctcctcgtacgtctccgccgctcctcacttcctccactcgatttcctttcttggcctctcctcctctgacacaggggtgtgcaggtttgtgtttgtgcgtggcgcgtccgccatggctcgcggcagcggggccggaggaggcggcggcggtggtggcggggggctggagctgtcggtcggggtcggcggcggcggcggcgcgcgtggtgggggaggcggtgaggcggcggcggcggtggagacggcggcgccgatcagcctcgggaggctcatcctctccgggatggtcgccggcggcgtgcagtacgggtgggcgctccagctctccctcctcaccccctacgtccaggtatatatatatatatactgtactcctgtgtattttgcacactctcatgcatgcatctgaaactctgaataatcctgcaaaaaatatatacaagtatctcacgtgtggatttgattttgttcgcgagtttttgctcgtgctagctgttctaatctgcaaggtttcatggtagtagattatatatgtcctggttacaatcttttcaaggttataatcttgtaatttttttctgctttgtcaatatttacttcgcactgtctggtgtgagtcgttaaaaaaatatatatcttgaaagattggggaatttttcttcatgtgtggggagagatttatttttttttgtttgaacggtagatttgactagtgtctaaaagtaccgtaataaattcaatctgcatgccttttgtaattttttttgctcatgtgtttatatacatgtggccaaatatgcatttgatgcactagctatcatttttgtcattttgtagttattccttttcctttcctttttttttcctttttctttttgttgtcactagaggattcatatcctctcgattcctctatgaaacgtcggcgttttctgcctcttttctgaagaatctgtatacctatataagaatcaaaatcttttataagttctttttgtgcactttggatcaatcaggctagccagcatgacacttagcatcagtaccggtctactgtaccgagattcactttacgcttgacacgtttctcaactccttgtttgattccattttacctcaattagactgtttgattccgttttatctcagatatgacactcctttttttaaaattccattttacctcagatgctgtacagtgccataaaaaaatatacatctgctccaactcaccttatccttcttgtaataaccacgtattaggttaatagctactaatagctagagatgtaaacaaaaataagcagacaagggcaaaagtgagcggtaataatggagaattaatctgtcgttcctccgcgcgcagttaaaggtaggcagatgacgggtccctcccctctattccatactaaccgcaagatgaaactaatattcttactgctagatatataaatcatccttcatttagcttcatctccctccttaagatgtgttcttttcttccatttcctaacttctactcccttcgtttgacgtacacatatttcctaaactgccaaacgatgtgtttctactaaaaatttatatggtttaaaaaacatattaatatatttttttttgtctttttagctaatatttaattaattatgtgctaaactaccgctcaattttgtgtaccgggagaaagggttctcaatcattacaaaagaacacagcctagtctccatgaaaaacatcacttttattttaagacagagcaagtggagcgattttataactttactatagtacaaaattaatggtcagaaatttaaaattttgaccgaattttatcgtaagcatcaaatatttattaccggagagatagagtattggttatttgcctctctgtcgtcaaatattctaaacaaagacgatcttcttagtggttaaacttaaatctcagtccttccaggcgtttatttgaaggatttatagcggagataaacagctccttttttttcggaaatacgtaaggagggcacttttgtattaaggggaataaaaagggtctgtacagggaaaaccaaaaaacagcaggggacaggaataaacagctcctcacttcctctttgtatcagtccatactaattaacaaagtgttccaaaatgttctgtactttttctgtagaacattatatgcagttcatcacccctgatggtccatgcatcaggtctagctacctactgttgtattgaagtatttctggcgaagtttatccttaccttagccttctcgagccaagtgccataaagatggttgctgtagaggcaactccaacccactttaaccgcgcacatgaaaaataaaggggtaaaacaaggaaattctaggtcagatatatatgtcctgtggactgtggcacagttgcaacagagcaattgcataggcaaatgagggcagatcatcatgtacccatagcctgttggtgctatgttagcatccaagcattgccattttaactattaagattcttcttcttatatttgacaagtgaaataaatttagtgactgaacatatatagaacgatgaacagtctttgtatgtttattcatgccatgggggaaagagaagtgtgatctgaagttattggatagatagctgttagttgtagcatgcaaggcaatgcatcctggaaccaacagaccaacagagctggggatatttcatctgctaaatttctgggaaaatttattgtgtggtaatcaatatgtgttcactctttgcaactggtacacgctctctgatgtttctgaatatcttccacagtgatgcagatcttgttgacacagcaaactcaacaaacatagtcatttttttaaggaatgaagcatgatcatctattgtcagagtagattacagtcaaagtttttttataagccaaaacaactgattttctaacctctgttatttacagacactcggactgtcgcatgctcttacttcattcatgtggctctgtggtcctattgctggcatggtggtaagtaacaataccaaattatctgctctatcgatatatacgagacaaagcttttgccctcttttaaaaaaaataaatcaaattaattcatgttatggaatctgtactttctgcaatgtaaattcaagttactttagtgtcttcactacaacaaaaacttgggtatcctgaactcctgtatctatcagagtttgaagctgcattttctgtagcttctgatatgtgtaatgtagatcatactgtcataattcataagctttcataaaaaatgtttgtgtacaagtcatattttttttaattcttgatccattatcatctcccaatcctgcaggttcaaccatgcgtgggtctatacagtgataggtgcacctcaaaatggggaagacgaaggccatatattcttacaggatgtgtgttgatatgcttggctgtaagaaccactgaaccttggaactcttattccttaagttgaagtccccaaattttctctcatattgacattgcactttatgtatgtaggtcgtagttattggattttcagctgacattggatacgccatgggtgatacaaaggaagactgcaggtaactgaacattttgcgtatcataattagcagataacagttatctgatacaccatgtaatgcagtgtctaccatggatcacggtggcatgctgctattgtatatgtcctgggattctggcttcttgatttttccaacaacactgtgcaggttagtgcctactatataataatcatgttaaagaaatttgtacaaagaatcataacaaaaatcttaattttgcaatgcaatttctagggtccagcacgtgctctaatggctgatttatcaggtaatttttcatagccttgtctttcagagttaactaccaaatttttattggtttccacagttcactaacacttgattgattccagaaaaaaaaaagttgcccttgtgttctgggcttctggtatcagtgggattttggatttgatctcctaattttcgttctgtaggacgtcatggacctggcacagctaactccatcttctgttcttggatggcaatgggaaacatcctaggatactcctctggttccacaaacaattggcacaagtaagttactcttatgtatcagtttcatacagattttctgtttagcacagtctattcagttgcattcttttctgaaagaaggcaagtgaaattcatattacattagtagagaaggtgaaatttgtttacaagtattgagttgcattctccctaattaattgcgcaggtggtttccattccttaaaacaagagcttgctgtgaagcttgtgcaaatttgaaaggtgcatttctggtggctgtggtaagttctgttattacctcataaactgcctgctgataatactttaacaatgtgctaatattagtctttgtaataagatagtactatactgaaaatattttagcgagtatgagtaatttaacttacatattgtattgctgttcctcttttttcaaccctgtcatattggttgctttttttcacagcctaacatgctcttgtttggtcattttcccctgttttcagattttcctgtccctgtgcttggttataactctgatatttgccaaggaagttccattcaaaggaaatgcagccctcccaacaaaatcaaacgagccagctgagcctgaaggcactggtccactagcagtgttgaaaggcttcaggaacttacctactgggatgccttctgtgcttattgtgactggccttacctgggtatgcaatatacatcagaaaaagaacttttcagattattgaaaaaattgctactagatcatatcttagttatatcttatagtaccttaccttttctatgatatgattgtccttgtagttgtcttggttcccattcatcctctacgacactgactggatgggccgtgagatctaccacggtgacccaaagggaactgatcctcagatcgaggctttcaaccagggtgtcagggcaggtgcatttggcctgctactgaattcggtaagatctgattggtttctgaattctgattgccacaactactgtcaaatctttaacactcaagccatgttctttggcagcaactaaccatgggcttctgatcgtgcagattgtgctaggattcagctcattcttgattgaaccaatgtgccggaaagtcgggccaagggtggtgtgggtgacgagcaatttcctcgtctgcatcgccatggctgcaactgcactgatcagcttctggtcactcaaggacttccatggaactgttcagaaagccatcactgcagacaagagcatcaaggctgtctgcctcgtcctctttgcgtttcttggagtccctctcgccgtaagaatcactgacacttcaacttaaacacattgctaaaaaaaattatttcctcaagaatgccttatcctgatgaactgtctgaaaatttgcgcgatgcaggttctgtacagtgttcccttcgcagtgacggcgcaattagcggccactagagggggtggccaaggtatgaatcccaacattcttgcagcttttcttgacataattcggtgttgtttggatgctggtctaatccatggcgatctgcagggctctgcaccggcgtcctcaacatctccatcgtcatccctcaggttaattagctgccaaattctaatccgtttcccttgaaaccgaatcagatatacttcatggattattagaatttgaatgctcatggattcatggttgcgtggtgttcttccctcaggtggtcatcgcgctgggagccgggccgtgggacgagctgttcgggaaggggaacatcccggcgttcggcctcgcctcgggattcgcgctcatcggcggcgtcgccggaatattcctgctgcccaagatctccaagcgccagttccggtcggtcagcatgggcggcggtcactgaccgccccgctctcgccgccggctgcggcggcggcggcggccggagcagcgccgccggaagtggtgagctttgtagttctcgtttgcaatggatcaaaggagccccctctttttttttacatagggtaattaattaattaaggctgttaattaggaaggggtgaggtggccctgcagctggggcccacgctttgttgccacctcggtagaagagaataagcagatcatgcagataatatggaactgtaaaactgttttgtgttgtgtgtgtgtgcagtgtgcttggtaattagtgtgtaatgaatggtcaggagaagtgcagtgaactaagtgaaagtgagcttccatcatcatcatcatcatcttgtgttgtgtaatacttttgtgtatgtagaatcaaatactacaaccaaaccaatcagagaagggtgaatggttcgaacactaaaaattaaaacttttagcaaaattaaaagattaccctcaaacttgatgaaattgcgccaatcgcaccgccatattgccaccggtctgaccgcagccttgccgccggttggaccgcctccctgctgtcggtgtgaccacccgccggttagaccgcacaatgaaccctggccaactcgtcaggatctagaaaaacacatatcgatgaaactcttgaaggtaaatcaattttgttgcatcaatatgtgtttacaaaatgtatctaaatcacctctctctctctctctctctctcaacttagaactaggattaaaacctcaaagcaaacctttttttttctcccaaaaaatcgatatccttctagcatcaatctctcttcgatttatacccacaatgtggctgtccatatccacgaatccaaccataactagactcttaaacataggaaatttaacaaaccaacgaaataacatcctcatacaactccacacttcaatctttccaaacttgaactcaaatttaaatttgactcctctttacatacacacacaacaccacgtatatgctatatggaaacattcacatgcacgtgtattgttctctagcctgagtatcccgcgtgatatcatggaccttatagaccttaacttctcgcaagtctagtcctgatccatatacgaatataaaccatctaaaagtaataaagataaagcaatctagaagttccacgaaaacaacttgaaattgactccctcctggagtctaccggtctgaccgtcgggctacccggacacctccagactgaccggcgtgcctcaccgagtgtaaacgacaacctagtaccaacatgcacggttcattgacaggaaacactattcagtattcaccgtatttttcaaaacattcacctttgacaatttattcatcactaagattaatcatcacatgattctacaggttgctctagcaaactcaaggtatgtgtaaagagctgaagatgaatggattaatagatgagctgctcaactctagccaattacattatggccatgttcttctttattatggattttggatttttgtttgcgtgcttggtaagcttctaaacggtgattttcacaaaaaaaatataaatcttttcttaaaatattttttaaagaaaacattaaactttgtagtattccctccgtcctaaaaaaagacaaaccatgggtttccgtgtccaactttgactgtccgtcttatatgaaatttttttataattcgtattttcattgttgttagatgataaaacatgattaatatttcatgcgtgacttgtctttttaattttttttatatttttttcaaataatacggacgattaaacattgagcacggaaatcagggcttgcctttttttgggacggagggagttctagttaatttcagctataaattcttctatccaaatttggagatgttgagcagtactccaatcaaaagaatgtagcactagtagtagatgagtagacgatgatgattggtctagagattagggtgggtccgttttgaaattttgattggagagccttgttttgctccaactgtcctgttcttgtggctcgctttgccatttaaaacgccgttgttgacggcgccggctttgaacgaaggctactatgctactactgtctgctgctgctagtgctagcttgctacgatgattgccaacaactctaacccgctacgcaggcaaccggttcacgcgtaaaggaagcagttcgccgccgtcgtggccggcaagatctagcccaaaaatcatctgaattctgcctctttttgaggcaaactcgtctgaattttggttctgtctcatggagaaatcacttgtgctcaggaacatcacatgaatcaccaagcattggttgcatcgatcacagccgttggctacaaacggaatttcaacaatcatcatcatcgtacaccgtcgatcacacacacacgcacgcacgcacaccatcattcacaaaatcacgagcaccacacccaagtggcgccacgttgcaccgtcacgtctcagcagcagcagacggggcacctcacgatgccgttctcgttgcactccgtgcatcgccggaatcccccgccgccgccgccgtccaatgggttctcgtcgtcgtcgtcgccgtcgtctacgtacaccttgcagctgcccgagcacgcgccgcagagcacgaaccggacgtcggcgcaggcctcgcacgcgccggcggcctcgccgggcgccgcgctctcgcacccggcgagcctcgccgcgagctccccggcctcgtgcagccgcttcagctcgtcggcgttgcccacgagctcgccgtccacgaacaggctcggcagggcgggcgccgccgccggcgcccagcacttggcgagggcggcgccacggccgaggccgagcaggccgtggagctcgtcgcggaatccccggtgcatcgacacgtcgcgctcgtcgacgcgcacgccgtagcccccgaggatggcgcgcgccaggcagcagtcctcgtgcgtcgcgcgcacgccgcggagcgacgtgaagtagagcacggccttgcgcggacgcgccaccggcgacgccttcttcttctccaccagcggcagcggcgtgaccttgcgcgacgcagcggcgagctccgggggcaccgccgtgatcgggaacgagaaggagtggcgcgcgaacggcgggaccaggagcggcgagtgctcctcgaggccggccatgagcgcccacgcgtcgatggcctcgggctcgttcggcggcgtcatggtcggcgtgcgcggcaccatcctcctcatcggcggcgcctccgccgcccgcggcgcgcccttgtcgacctcgagggagccaagcgtggtcgacgtgagccgcacgacatggacgccggcgtcaccggcgcaccgggcggggaacgactggcaccggggcagcgcgagcggcgacgggcaatggcggaggtcgtgccgggcttgcctggaggtggtgcaccccatggcaatggcaatgtgaggaagctcctaagctctggactggcaatgggagtgtggttaattagctagaaacattctgtcaagtattcctaatttaagtagtggatggatgagctggatactaatctatggggattggggttcatggggtttagtatttttggggagataaaactagtgaggtgataagggtggtatgattgaatttgtcaattacttgacctaaaaagcataacaaataaatagtttttggaacattcttgttctgaaatgaatggttttggaacattcacactcacttgggagcctgggttttggagggaaaaaaatcaaatgttactagatcatcttgtaagtatgagcggctttaattagtttgagatcaaaatgctgcaaagttgcttaattcggttgcttggtaacctagtgagtagtgagaactactgtggctgaagataactccttttcagcaatgtttgtggttttcttagtcaaatatcacgcttcctttttgttgcatcttttcttcgtttgcttcacctgtcccccttgattctaggaccctgttcgcagggcactggctttggagcttcctttttgttgcacttgcacatcgatagatatacgcatgcaactttaggcacacaacaagttcaacttctgtataatacagactgtaaagtgtcagcaagcagtaataatatgagttgatgggagattgggagctggtaaagtgtcaaacagaaacggtaatttcatccattgtcaagctgatatgtagcctgtagatactgcacattcagtacataataggactacgatgccattggaaatcttagagcaatgaacatcgaaactaaaactccaagatatcacataagactaaatggtgagttggaagagaaaagtgtgaagagaagaaagtgctatccctcatgcaagaaacagtccatacacaaactccaataaaaattttgagttaaagttattagggattgtgtgttagagacaacctgtaatacatgctacctcttaatttactattacatggtatgcatgaaattagaggtaatattactcttaggaataacagagaaaacagtactattagtttaagccaggcccaacaaggggacactttcctttggtccatagtctctagctgttgagctgctatgctcacattgcttagttccaggctcagcccagcaaaaatattctcagcttttcaggctacacaaagaccatacctttcgggctcagcccaacttctgttttttaagtggttcacccaacttctctcaattctataaaaggtcaggataatggagttcatttgttcagggaaagaaaaggcaaaattggttaaatagcatcgaaatttcatgtttttttatagtaccgaaagataccggttcactttaatagcacctaaatttcacccaattttcaggggatccactagagtcgattctcgatcgttttccgtccgccttaatcgctattgacatagccacgcacacaatatgatatttctacccctcattgccatggattctacttgtatttgtgagaggtagaaacgtcatatcatgtgcgtggctgggtcaatagcgattaaggcggatggaaaacgatcgagaattgacggaagtgttaaaaatggaaacaaagtgaactttgggtgcaattaaagtgaaccggtatctttcggtgctataaaataaaaaagtaaacttttgatgctatataaccaattttgccaaagaaaatttactattacaggcttgttcaccacttttaaccctaacacattttgaccaaattttgggtagcgttcgacatgttcaatttaaagccttactaaaatttggaaataattagaaacaaattaacaacaaacataatttaccacaataaccctatttaataactacactacatgtgtataattcatatgtatacttgattaaaatgaaggttgaagaacatattccatatgcaaacttaattaaaaggaagattgggtcacacatttcctttgttgtgtcacatcttataaaaatatatttttgttggaaaaaatttaaatggtagaaatgtaactattataggatggatgtagtaataaatacaaacatcagagggagtacgaaagaagatgatgaatgtacacagttggcttgttgccttgttggtacggatccaattgttttgttgcgttgacacttgacaaccatctggacgacgtgagtaacaacgatagataaatagtgagttgtgcgcataattttatttatttatttaccacctgcagaaacattccaccatctgtcaccgcacacgcacacatgtatagtagcagcaacaacgttcttcacatcacacacacagctaacaaccgcgccggctatcatgggaaaaggagaagaaaaaaggagcagaggatcatggacggatccaagtggatcgcatagaaaaatggacctcgagaggaggtgaacatggttttgcaaaacggaagatgtggttggcacgtgagagtgggaggatgggaaggttccaaacggcttggtgtgtacacacccaccaccacgcaaataaaaccctcaaaaacaaattgtagagtaaggctcgtttagttcgcaaaaagaaaatttttgggtgtcacatagaatgtttgaccagatgtcggaagggcttttcagacacgaataaaaaaactaattttataactggcctggaaaccgcgagatgaatcttttgagcctaattaatccgtcattagcacatgtgggttactatagcacttatggctaatcatggtctaattagactcaaaagattcatctcgcaatttcctccctaactgtgcaattagtttttttatttatttatatttaatgcttcatgcatgtgtctaaagattcgatgtgatgtttttaggaaaaaaatttggggaactaaacggggcctaagagtaaccgatcctgtcggctacacgcacacgtctcgcacgaaaacttactctagatatactaccacgacatatcttcaataacgtcaatcggtaccgggcaaaattttaccgtgcgcacaaacattctcgtcaaacatctacagccgacgcgcgatgcggttaacccgattgattttacaccgcgacgcatgagaccgaaccaaaagattcgattttagcataggcattttgggagagagatatttggtgatggtggtggaggtggagagggagaggggggtggaaaatggagggggaggaggcatttgagcatggcatgagaggaggggaagggtccaaggggaaggagatggatgggcaatgggatctctcctctaactaacaaggccatgtgccgggctggcctcccaacacaaaggccaactagtccccagggccaccatggttagcattagcagggggcaggggaaatggtgggccccacacaccccccaagcccacgtacattgcacgtctcgctgtgcgtggggccccgctgttttgcagccccctgcattgcacatgtgttgatatatactatggccatagcaaatgcaaagcttctcccactagtgttaattaattaacctctcccaaagataaaatttgacaaatctgtgcgtgtttgtgcgcaaaaactgagcttatgtagcgtgcaaatgctgatgctggcacggagagaaaagatcaaggagatcaacggtggggagggggccacgtagtcgcgacattgacatgggctggatccagccacatgcaacacgcggtgcagggctcgtaccgcacatctctttctctctctctctccctctctctggcatccatttctccgtgtccttttttttccttttatttttaattttttattttattttgggagtacctatacatctttcgaaagatttttatgatcgtatcacacagatttttaatctttagattaaaatccgatagatataataaaaagcaaaaagcaattaagaaacaccataatggacactaaattaccatatcctcaagaaaaagaccaaatccaatacaaaatttaaaatttatatgcgaagattcaaaaattacagtataacttacaaaagttacagtgtaagtttcataaattacactgtaacttacaagaaaatgcactgtaaatttgagtgagaaaatcgagtgagagataagaaaaaatctttcgtgtgagatatagcaaaatcgttttatttttgctaacgcaagccacaatctggccagcatcatccatatgcgactccagattggcatcatgggttgatcgatctgcaatttgcgtatgaagcgtgtggccttgttgtttcatttttcaacgttgaacttttatggtttcatttagagtatgagaaatgcatggttaataatagcatcttttgaaggaaagatcatgagtgaaaccaaaatgccattctatattttattttattttttggggggtgggggtataactgtccagaagagagttaagtactggagtttgtttggtcctttttcttgtttgtctgagtaaattaaactggagtagttgatatcctaaaaattgatggaagtgttgaagctttgaaccatgctgcatgagccaaaaccgtaaatgaatggatgtcctagttctgtaataaatgtgtctaggaaagatttcgactacacgaatagttggagtcaataattcccaagggatatattgtacttggctttctattacatatacttgctgctgctccaaacttcttctcatctcatctcatatgcatgtaaaccataattgcacctggcagcagtggctatgatgaagagtgagatacgctactgatcatttgatcatcaggttggaaatgatttgtaaattatcatggcagtcatcatcatcaatgtagctttcagattcttttgtcaacaattcccagaaccatgtcaatcctgctgctgcatttggagcctccaactcaaggggatgtaagctagttcttttttaaaaaaaaaactaggttcatttcatctgtataaacttatctaaagggatctaagaaagctaagaaaagaggtagtactagctagcaaatgtatacatgctactagctagttcataaaggaaaaataaaggaagactcgccacgctcggtgaatgacttcagacccattagtctgatccactctgtggcgaagcttatatccaaaactttggcaatgagactggcagcacggcttggtgatttggtctcgcatgcccaaagtgctttcatcaagaagatatgcatacaagataacttcctctatgtgcgcaacatggtccggtccttgcacatgcaacggaaaccatccctcttcttcaagttggacataacaaaggcatttgattcagtatcttgggaataccttgtcgaaattctgcagtggagaggctttagtcagcgctggagaaattggattgtgcttctcctatcgactgcatcatccagaattttactcaatgggatagcggaagaaccaactacacacaggcgaggcctccggcagggtgatcccctcttgccctacctcttcatcctagcaattgacccgattcaacgactactcaataaggccacgcaagaggggcttctatctccgttatcaaaccgagcagcgcggttcagaatatccttatatgctgatgatgcagcgatctttataaacccgatcaggaatgatgccaacaacttgattagcatcctcaattcttcggcgaggccacaggccttcaagtgaatctgcacaagagctcggtcgtgtccatcaaatgcgcagagcagaacctgtctgaggtgttggaaaatttcaatggacagcggggcaattttcccataacatatttgggattgccgctcaccccaggccgcatcaagagaatacacctgcaaccggtgatggacaagttgcaatcaaggttagtgggatggaaagggaagttaatccagcaatcagggcggaagacgctagtcacgtctgttctcagctccataccaacctacttccttaccgccttaaagccgcctaaacagttcctcacagacatggacaagattaggaagaaattcctctgggccggcgatcaagagattagcggggggaagtgcaaagtgaattggaaaaagtatgctccccaataaagatgggaggactaggcgtgttggaccttgataaattcgcgagagctttgagactccgttggctatggtttgagtgggagtgccctgacaaaccttgggttgggacaacaccccactacgatgagttagatgagcaaatcttcgtggccgcaacaaaggtaacaatcggtaatgggcagaaggcaaaattttggacatccaactggattggacaccagccgctgaaatacctagcgccagcgcttttcaaccactctaaaggaaagcaacgcttagttcaggatgcgttaaccaatgacaaatggattgaggatattaggcatgagctgtccatgccactgatccgagaattcttcgcagtgttccgccttatctgggataatgagacaaacctggaggaaggagttgaagacaccatcacctggagatggacaaataccggtaaatacacagcaaaatcggcttagcccaattcgccggtagagaagactcaagggccgccaccttgatttggaagacatgggcgccatccaaatgcaaaaactttgcatggcttgtcctgcaaaacaggatatggacatccgaccgcttgcaactccgacaatggcccaataactacttttgccaactctgctacaggaacttggaaacggcgcaacatttattcaagaattgtccattcacgcgagaaatttgggacaaaataatggctaggatgaaccacaaccaacccttcccggtgcacaatccggacgagagcctagttgactggtgggaatcaagaacaaagcaacaaagcaaatgtcaaagtaaggggatgcagtcactgcacatgctcttgagttgggaaatctggtgcgagaggaacagacgagttttcaaagataaaagaacttcaaatccctcaactaacggcaagaataatggacgaaatacatggtcggtccgcatgtggggcaaaaaatcttgcgagaatagcgccttaacctctcatcctttgttgtaattttcctttttttctgctctcctccccctgtctttccccttgtcaccattggtggcatttgtacagtgcttatcttctgaaatataaaaccagctaagctggctaaggtttcaaaaaaaaaaaaggaacagtagaagctaccatcctactcatcttgaggggttaccttttaggaagcatggtcctttgtggtactctttgctggcatatcatatatcttaagcaatattgtctgctagttattagagcaattttcttttttgatactctcaaaaataataaatttattccagattttttttttgcaaaactaaaattccccaatattattattattttttctttttgataaacaacatcttgttaaatttccattccctcatctatagccatctctctctctctctctctcacacacacacacacacacacacaacacaaagttctcactctcaaatactcgcgatgcgcctcgccttcctcgcttgatgagctaaggagatcgagttgaggacaatggccagcaatggcatggcgtcctccccttcctccttcttccctccgaacttcctcctccacatggcgcagcagcaagcggcgccgcctcacgacccgcaagaacaccaccaccaccaccaccatggccaccatggccaccaccatgagcagcagcagcagcagcagcatcaccaccacctgggtcctcctccgccgccgccaccgcacccgcacaacccgttcttgccgtcctccgctcaatgcccgtccctccaagaattccgaggcatggcgccaatgctggggaagcggccgatgtcgtacggcgacggcggcggcggcggcgacgaggtgaacggcggcggcgaggacgagctgtcggacgacgggtcgcaggccggggagaagaagcggcggctgaacgtggagcaggtgcggacgctggagaagaacttcgagctcgggaacaagctggagccggagcggaagatgcagctcgcccgcgcgctcgggctgcagccgcgtcaggtggccatctggttccagaaccgccgcgcgaggtggaagacgaagcagctggagaaggactacgacgcgctcaagcgccagctcgacgccgtcaaggccgagaacgacgcgctcctcaaccacaacaagaagctccaagccgaggtaactaactaatcaaaatcaatccaattacgcattcgagcgtttgatccatagatctgcgtgatcgtggatgatgcgtgttgtgtttaatttgtccatgattaattttcccggggctttccaagctcaatgattggttggtgatgtcgatcttccctgctgctgctgctgctgctgcctgcgttggcaggaacggagatccatgtgggtttcagtgttggcagaaaggttgttggaatcggtgcctttctcaccaccacgagtacgtcgacgacggcagcagtagctatagctttttctcgcgaaaagttcagcagaatatgcagcgtttgctcgtgctcgtcgtcgtcatcaagctggtgagatcgatgtatcgatcgatcgatgggtggattgatcgtcggaggcagtgcaggtttgggtggtagctgctggtgcttttgctgtggtggagtcaatggcctcatcacacggccagcctcgttggcaagtgtagtagtactagctagtactaccagctcttggggccgggcatgcatcgcatctctctgtgcctggtcgcagtgttgcatgtgctgctgcctttttcctgagatcacttcttcttcttctcaacaatcagatttgcaatgatgcgtgtttgtgtacccggagagaaagagaaaaaaaaagcacaattagtacttctatgattgggcatcgatagatgatcggtgcaaaaaacgtactagtagaagtatagctagctagatataccttgtaactaatagtactagttcgtgttgcttttgttaattagtactgttttactgaatgattaagaaggaaatgtgataaaatgcagatagtggcgctgaaggggagggaggcggcgtcggagctgataaacctgaacaaggagacggaggcgtcgtgcagcaaccgcagcgagaatagctccgagatcaacctcgacatctcgcgcacgccgccgcccgacgccgccgcgctcgacaccgccccgaccgcgcaccaccaccaccatggcggcggcggcggcggcggcggcggtggcggcatgatcccgttctacacctccatcgcccgccccgccagcggcggcggcgtcgacatcgaccagctcctccacagctcgtcgggcggcgccggcggacccaagatggagcaccacggcggcggcggcaatgtgcaggcggcgtccgtcgacacggccagcttcggcaacctgctctgcggcgtcgacgagccgccgccgttctggccatggcccgatcaccagcacttccactgatcgatcgatccatggatccaaccaaccaaccaaacaaccattggcaacaacaaactatcttgcagtgatgaagcgatcgacagtatgtacggggtgatgaattaacgatgatcacacaccaacgcaagcgcatgcacgtgtgtggaagattcagacgcatgcatttggattaattcttggagagatcgagcaagcttaattgggaagaacaatgagaaggttgtgtatgatgatgatgctagctacgagtattgaggtgatgaatgcattgaatttttctcttgggtttgaagaggatatcgaatcgaaggaacttgtagatgaataagcgagtgagatggaacgacgtacgtagggttagattttggagttcagtagtagtatattctgtcactttttatttattttttttatttattgggttcttattttttcccctttttctttacatacataaatttgtgaactttgtgaggcagtgtttgttgtgtataggtgcatggtgattcttctttcttcccctaatctgtgtggatcatgtccctgtgttgagaaaaatgttcattaaatttcgctctagcaatcacacaattgagttgtaccctataattaattccattgatgtttggctaggtttttgacacataagctcgtgcaaacatactgaacagtacgtacttgtgtgaaggcaagaacacatgtacatgtttctggaagaaacttttcttcttctttttttggtagaaaaggaaaagaaatggaccaaagttttcaacagttaaattaagcggtgtgtggttgatccgtgcattaatcctagctcgtgcatgcatgcaaccctacaatgcaatcaaggccatttagaaagaacagaaaagcatggacaccagcaatatttaaatttggcagctctgtctacatatcttgttggcccccttcatctttgaaattaagttttttgttacatcgccacagtttgtcacacaacaaagttaggttaatttttaccatgtctagctactatttggttcgtgactagtgactacaagattcacgcagctggcttgtgcatgtagatctagtatagttattcagaagttgtctctccgttaatgtcaaaactttgtagatttcattacttgacgagaatatggtcatgaattatctagttatagtgataattataggaataaattaaataacctaagaaataaacttaacaaatagtagctcgaaacaattggtccaagcaatgcagtagttttttttcctttagataacataatttttaggggtgtaaagtaaataatccataacaataaactggtgaatctcagttgaaaagaactaggcttagtgaacaaaaatattgaaataaggactccatatgcagcgtaaatcttaagcgtttatttttatcctacgatatatatatatatatatatattttactttttatcctacaatactttttagggtttacactgtatataaactttgcattatatattttctattgtagtgaagttatatatgggtatatattttcctcttctacctgctattggctcagtgtgtcgtacgtactggacatcagtacatctacgtcgccatctgcatcggccttatcacctcactggcagctacagttgactgaaccgggcttggctagtttgcctgtctgaaagtgattggcgagatggcagctaaggcacaaaacagtgccagtaaaaccgggagtttattcgtacctcgagggtacgttttcgatttcgttgtggatcagatctgtctctcaaatttgtcaccgtggatcatttcgtactacaaaaatttacggcatatgaggagtttagggggatcagagaccattgatgttccaactgaattgattcgccagtacattttggaattggatcacggggaatttcatatgaaacggttggcctaccaactatagcgattggggaaaaaaatgtacatatatgcttgtggcggtaaaaatatcatatcatttcagaggtgacatcgttcgtgctacggatgataaatcatgaaaaaataaatgtaattactgaataatttatgagtaaatgttttatatctgtgacgttagcggtttagcatcaattcttaaaaaataaactactaagaaataactgtagaattaaattaaatgtagttccaaaatttagttttaaaatgcaattaataagcaaacgacgagggacttaactcttttttttattacaacaaaaatttgttggattggcagggtaggtcacctcagctcagcaggtcaggtccacagctgagctagctcatggaagaacaatcgcttgtgggtggatcagcagtggaggggccgtgcacacatcgcaggcagaaaaaccaaaggaccgtgtccggtctggccccgtacgcgccccggccctatcctcccctccaaccccccctctgtggtccaccgtggcaccaaaaaccactgcctttttacgacgtcactccctcaagtacatcctcacaatctttacgtgtacatgcattgatccttttgcattatagcctcctctctcgttaattttatttaatcacgatacaaacacagacataaagacggaaccgacataacttaaaattaataagaccaccttaatcatctcgctgtcgatggtattgctgtcgaggcataccttaaaggttaagtcatcttatttgtcttactgtcgcaacagtgcatcgtttgtcattgaaagaataattaaccgtaaatacaaacactcgtatcaaatctacatcacaggatacctagctagttgagctgaactcacttcgtcttttctctcattaattaattgtcccatcgattgaaatgcattttttttcatttttatttatgaaggacaagatcatggtcatggcaacttaattacagggcagtgaatgtgtgtgcagagaaagaggagtactagtgtactctgagcagtagagatcagttcagtgcgcgcgcaaaaataactgccatggacgatctggtccagatgtgaggtggtacgcttactactatgtagccgaatatagggatgcaccagcaacaatcattattcattctctgttccatgatcaggaagagaaatggactcatctaaaactcgtctttaaagaaaagcgcatagaacattccatccattaattatcactgaatttgataacgccatgtcaatggttgctagcggtatttctttttggaacttgaccttgctaattatagtaagaccatgtacaatagcagactattagccagctataaatatatattaatgagataaaagatgagatagaagagcagcgggctacagatatgtagccagctgcagcacggacttcaagacacagtgtgtgtatgataggtgggactatatatactaataatatagtaagcaactattgtatgaattggctattaaattggctatagatgaattggagctagtagtgggctatgctattgaacttgctctaagagaagtgcactgcttatttattcgtgggatcacattaatcagatgggttcagattatagcagtttagatggattgggtatatccgtatatgctagagcactgctaaagatgaatgagataaatatttttaaaataataaaaatggttcatatttcaggcttccgcccataaaacacacataaaaaaaagtcccaaaagata

SEQ ID NO: 9778 - DNA, 60601 bp, Oryza sativa
taattatcactgaatttgataacgccatgtcaatggttgctagcggtatttctttttggaacttgaccttgctaattatagtaagaccatgtacaatagcagactattagccagctataaatatatattaatgagataaaagatgagatagaagagcagcgggctacagatatgtagccagctgcagcacggacttcaagacacagtgtgtgtatgataggtgggactatatatactaataatatagtaagcaactattgtatgaattggctattaaattggctatagatgaattggagctagtagtgggctatgctattgaacttgctctaagagaagtgcactgcttatttattcgtgggatcacattaatcagatgggttcagattatagcagtttagatggattgggtatatccgtatatgctagagcactgctaaagatgaatgagataaatatttttaaaataataaaaatggttcatatttcaggcttccgcccataaaacacacataaaaaaaagtcccaaaagataaaaagattcgatgttatgcgaaaaattctcatctccctcctaatgataatatctagctaaaaatagaaaatataaatctgtagatcctataacaaaagttaatagaaattaactaccagggatggagaaagagggacgagcagaggcccggcctccctcaatctatgtttacagtggcttttgtgaaaatttaaaatatcagtattattgttcttctccaataagtaaaatttagtgtttttagattctaagggtggaaccagctaaaaaaatatgaaaataacatgcattgggttaattagatgatctttctttttggttattggaaactttctgagaaatataattgtatttttaaaattgttaattcaggctttcaactatatacacataagagttactagtataaaattatactccctccgtcccataaaaaatcaacttctggctacgaatatggacgttgattttttatgggatagatggagtatataacaaatgttgtacgtttgagagacttaactctaatcctaggtggttgtgcggagaattatgctagtcctttctaagaccgacataccatacaagttattccaacaactcaaagtgaaaaaacaaaaaagatgagaggatgccgagtactgagtagtactgaccagtgagtaggcgtgggtctccagtgtccccatcgaaacgcagacgagatgctccccaatgagctcagcaaaaggaccgggcatgtatagtccaaaccgttgcatcggttcagtccttctgtgcccattggccctccaccttattactgctcttccatctccatgtggcagcacagtgcccaactgaccgtgcaccctctctgcaaatgtccttggggccaagtcatgagatgagaccaaggttgtcatgatcgggatattagacaatatcgttttcctcaaagtaatatcgtatcgtaggatcgtatcgattttttttaagtttaattaatatttatattaattatatatagccattatatattaaaaaatatagtaatgatatatgtcatacaaatagagacatttatcaagagaaaccatgttggtttgatatatttaactgatttttatataaatttgagcataattatttatattattttcaaaccatgttattttaaataatattttgtagtatcgtagggatcgtagaatcgggataccacctaagatttcgtaggatcgtatagtaatgaatagtagaatcgagatactatgaaaattaggatactaggtgggatcggtatcgttttggcttggtaggatcgtagtatcgtaagatactaggatacgaaccgggatattgacaaccttggatgagaccactgaaatcatgtcaacaacacatggtaagtccatttgtttgagttacggtttaaccttactccctccgttccaaaattacttaggatgagtcacatcccatattagattgtgttattttaagacggagagagtagatctttacatactcggaagacgagttacacgtggaccgatcgaatggaggagttaattattacatagccaatgtgaatgatcaccatgaaaatgaatgttcgttcctgagatagattcagcatcagagatgaggctataagctaatttaatcagatcagggacactaaattaagagtggaatcagatgagatcgcataggataatcccaaaaggatgtgtgtggtgtagcaacaagcaggcagcagtaggggtagttagccgatcggatgccgcacatgaatctgcgtctaaagtcagccccggtgcccaccaccatctcgctagaaaaaaaagaaagaagaagaagaaagtatcgcaattcggtcgcgcgagtacgagtattttaggtcgtcgcctcaggggaataatagtaggaggaggaggagattcagaagcatgtgtggccaactgtgacaactgataatactcgcagtacggcgcacgcacagcacaggccaggcaaaacaagaaagcaacgggagacatcgtggtggtgtataaatttttccatcgacttaattatcacatgcgcatgatctgatactcagatcgatcatttacggttatatatggtagtacgaggtaatgggctaatggcagattaaacaagagtcggaacagtgtctcctctgtaataactctgcatttattttttttacagcagttctgaaacttcaggtcggttattagtactagtagtaaagcagttagccatagtaccattgctgctgctgaatcatgtctctctcgcaaccttgcgttaaagaaaaaaaaatctctcttctcatcaacccaacgctgtaaacgatgcatcatcggcgcgatggcggaggaaatacgcacgaacaactaaccaagattgtcctatcaatactgctatcgtaggtgtaatactgtagaggatccgtgtccacgaacacaagtgtttccaggggatctctccggcgtcggcgtcgtcgcgttgggttggtggtgtcacaccaaacgcaacgggggagaggaggacggggagatcgacaggtgtggcgcacatgcgcgtgcagggcgatgtcgcctcacaattgtaagctgtgatgcgtctgagtcgcggatactacctggctgcagttggggcagggtttacgaaaccgcacggtcaccacacggttactatacacggtaaccttttcaatttttgaaactacggtatgtctcgtggtaatcacgcggttactgtggtaaccaccttaccgtgggggtgtggtaaccgcatcaaaaacggtaaggagactacttgagctttggtcgtcgtcgactcgtcgtcagggtccagggaaaaaaagttggtttcctttttctgcagatcgatcggtctctgacaatcttgcgatgatactgttggtgaacttttgtcagtttacgaatgatctgtgatggaaagtaagttgggggcagactagctggcttacgtctactgcttcacttcactttcacagtttcactgtatgatgataatgtgatatctggaatagtgtagatgatggtataggacggacaggccactatgtattgctatgtatgggtattgctctgtatcatgtgggtacaaacgaaactattattatctaaaaaaacaaacgaaactattataaaaagtgaaccaatattctccgaaattgttgtaatcgatctgggtcagcagttctgctttttccttgtgtgaggtgcttcctttctgaatgacaatcagttggagttggagttggagttgatgatagtagtttctcccttcattgttcatctattttgatcttttcttgggacatttcttctgctgatctttagagctacgctacattcagtttccattctgaaatctttttcgggccaaacttttggacgaaattgggagcttttatggatgaaattgaggcccaaaactgtatatagaatattgccgctagcggatgagcaaacacagcccacagaagagaactcactacgacaccaaacgaggccatgaccatgagcacatatgaagcctacgtgtagcaaatcgattctgccacgtgtctcactcctgcacacacaagtagccaccaaaaagaacgagagcctcacgctcccctccaccaccagcgagagataacgcaccggacgaacaccatgccgccgccgtcgtcgctgccgtccaccgccgccgccgccaccgcttccgctgcgtttctccggccgtcagcgagcgcgcatccagcaagcgcctccgccccgcccaacgccgccgcgtgcctcaggcgctcgccgcggcgccgcctggtcgcggcgcgtgccgcggccgacggcggcggcgccgagacggtgttcttcgacggcggcgcgcactacggcgacctggcggcgaacctggccctcgggctgacgctgctgtggctaccgctgacgctggcggcggtgtcccgcgccttcatcctccggtaccgcttcacctcccgccgcgtgagcgtcatctccgggctctccggcgccgaccgcaccgacttcccctactcgtcggtgacgtccgtggtggtggtgccacggttcatcggcgagtggggcgacatcgtcatcaccctcaaggacggcaccaaggtcgacctcaggagcgtgcccaggttccgcgaggtcgccgactactgccgctccatggccgccgccgagggctccctcgccgccagcacgtgaggtcagctgggaggcgattgctctgctcaagtgtacacttccttcttcttcttcttcttcttcttcttcttcttcttcttttttttaatcgtgatgaatctaattattgaagaactgtgaaaaaagtcgaatatattttgatttttttcccaatcttgacgaatctgatgtctagccttttggagatgttgataaagtaaagtgtgcgtgagttcgtaaagatgagtgcattgacacatcttgttactttttaaagccggaacaaacacatatgtgaacaattatatacactgttaatcactaaaaatttaaggtattataacggcgtgatccgtagttgggatcgttgggccttggatctgccactgagtgcaccttgtgagcatctgtcagctctatcgtttggttttttcatggaaacaaaaaataatttgtgaataaaaattttatatcatgtgttcttagcgatctaaagtaaagactgaaaagtaaacttgatgcaaaaccttaaaattagtttcaaatttaaaattgaaaatttaaatgttgtccgataagcataagctaaaagatgatgcatactttctgaaatgagaaaacactcgccgttccgggcatagttgttgggaacttgggccgtaagtccataacggagctgtgacttacgtgcggcccagaacggactgtcacttacgtgcggcctaattttgttgggccggaaaacggggagtgtggcttaacgtgcggccccatgatttcgtggaccgagccatacttccttttctgcgaatgtttatgggccaggccggaatatggccgcccgtaccacttgatctctcttcttttcgaggagaacacctaacagtatttgattcctgccacgatttgtaattaaaaatgtctacctttaaactttaaaccacttttaaaaggctgattcttctcgcacaatctagaaaaatgtatgtgtgtgtttgtggcaattctactggcgatggcaattggcaagtgaagatgctccagatgattgggtgtcagtcgctgccacgccggtggtagtggaacggtctaaccatgggtatagtagctcagctagatcaaagctctcgctttcttcgattccttctttttttctctgcatttttgccccttctcgtgtggtcgttcagcaatgtcaactgcatggtgcggtgtgtcgaaaagcttttggattaatgcttcctatgagctaatggctccatgtcgacttgtttaatggctgttaaattggtgagttgtttagcatatctctgacgctttgtttaatcttttccttttatggatttgactaagcaaagcaaagcacctttgggtttaattgccgttcatataaaattttctctcagcatagcaaagccatgtaagtagtgcaacgctgcctaactcaactcgatctcatccatcatccaatctggaaacagtgacagtgaaactgtaatagtagtaataatacgagttaaacaacaagaagccaactgtttatcggcaattgctgcaagaaagagagatgacaagcttaagaaagttcttgcaagcagaattctgcaacctccatcttctagaacttgacggattctcgttcgtatcctctccttcacccgtgcactcgtgcagaactgtttcttttcgttggctccgtcttgtagtggatgaggaatgggggaatttcaggctttgaattgctggctgacatatcgctcaatgaacggatcaggccgtagctgggagttggaattgattcctgctgctccccgtgactcgacatgaatcaagccaaaggctttaccaagtccatggaacgcagccaatttgttttgttcttcaggttcagtgcaatcttctgaagaaaacttctttcaagaaactgacagaccattcctgaagaacagaccaaacacgtacgtctatgtcagccacagatttcaggttttattcatgcaccaggataactgctgatgagatcatatgatcccacaataactgtactgaactgctaccatgtgacactacgagatcgagacgaaagaaggatcaaagcagcaggatctgcgtctgtttctgtcattcccttgagtgcacagcgcattgcagtctgcagaggacgggagtgttctcaggctgagtgtaataatgcttccattattttttttataaaaaatgacagagcatcacctagaagaataaaaggttggatgcagaaatagatcagtactgaatactgatttgtttgtggctgcaaacaaaagataattttgttgctctctctctctgaaaaaaagaagaagaagcatcatgtttgtgattcttgtcccttttgggtagaatcatttctactagcactctagctatgcaactttctttgtgccctgcaattttcagtgggttattaatatataatctatgcgattatgagaatggactacctgtctgtgggatctatgtttttctttgatgaaatctgtaggatgcatgttcaggctgcattcagatcatcaacactaacagcaaaatctggttcatataatagcagtagattggtcttcctccaatggtggataagacgagtattagaagtacggatgcaatgcatctgtgaaaacaaaactgaggctgctgcaaccaaaaaaaggtcagtgaggtccaacaacgtgcatcagccataaatcaggtcaaccctgacaataaacaaatctatttcgagtgtaaatgctttgacgatctgtagtaaaattgaggtgaggattatctaaactgttacattgactctcctgtcagtgtcaggcggcgacagaagcaaggagttttttctgcacataagtactctaatctgacgctgactgatccggggtgcatctctgaaagtctgaacacatcgggatacagataaaaaccggtagatgccacttcaaaacagttatcaatcagtcgaataattgtagagacagatgttagctgggaagtcagcatccggatcacacgagaacagacgccgctaaatatcttgccttcacagcaaatctgatagtatcaacaaacaactgaacgacacctctgaaaagtattccaaagcaaacaagtttgctgttctttttctcagaatggaagcgttaaactcgcttacgcatttccagctaatcaagcatgtgtctgactaatgaattgatgaatggaagattgggagtatgaagcaaccaagagctgcagaaaactggggattacttgcaagacagacaaagaacaaggacaggaaactggggaaagaaaaggaaaaataaagtggcagagtcagattctcgatttcctaattagtataggagactagggctagtatttaagcgatgcgataaggttgttgaatagaaaacggtttaggaaagaataagctaaagctattgaaattcgcatacgtttgcatttctgattatttattttcaaggagggataagaaaccatgaagtccacgtctacttgctacaagtgcaggaatctgctcactggagcaacttcttatttctcttgcttaaccagctaacataggtttcagcgtgattgtttggtcattgctcatctctttcttgtgttttagtacttctagctcactaattccgagtgcaagtctgcattttaaaagtttaggatagtacaatagtaaacttttttgatgataatcatggtgaaatataatactaagagccaaggggacacatttgctgattgcttgatttcgcaaaaagagaacaccaccttgcttcggcaaccatgaaatgttcactagtaagcacccattctttttatgctaaggggtgacggattgtcacaggcacgattcttaagctcctaaataatatgatttctaaataaaacttcctttatctgtatttcttagataacatatttaaattagatttttcaattttcgcctataaattattactacatccatcccaaaatataagaagttttgggttggacacatgtattaaaaaaataagtgaaattaaatgtgtgaaggttgtgattagttgagaagagaaagtatgggaggaaattaagaggtgaaatattgtgattggttgagaagagaataatttatcatattttgggatagatattagaggctaaaaattattatattttaggacgcaagaagtattatacactcaattccatgtatcatccatcggcacattattactggaccgagccaagagaatccgctagattattaaccaagcaggagtatatataaaatatcataatacatttttttaaaaaaattcttcattagtattcctgaaaaaactttaaaattaaaatttcttttaaatctttaactaattcgtttctaccctaaaataattgttataagctcacgctagtagcgggcgcagtaaaagagtatttgatggattattgactaaatatgagtatctcttctctctactacttaaaaaaactagaagagaaagtcggccttcttcattctctccattcctcacttacatctacgccgtgtttagttttcaaaatatttctttaaactttcaacttttccatcacatcaaaactttcctacacacataaactttcaacttttccgtcacatcgttccaattttaaccaaacttacaattttaacgtgaactaaacacagccctaaaaactaactatttctatctcgttctccacttccatagaaacattttctctcccataaaaaccattcactcttaaaaaaactgattctttttaaaaagactagtataaaacccaaacagcataatcggctcaaattcttccactaaactgaataaaaagaccgttacgacgcacgggtctacagctagtatataaaataactgaatattgaatattgtgagggtttatatgtaaatcttcccaatggaggagcaagaggtgtgttcaagtgagaaaggaggagaaaaaggcaccgcctctccatgcattaaggggctgtttggtttccagggacttattctaagtccctgtcaaatcggatatttggacactaattaagagtattaaacatacagtaattataaaatccatttcataagtttggactaattcgcgagacgaatcttttgagtctaattacgccatgattttgacaatgtgatgctacagtaaacttttgataattatggattaattaggcttaaaaaatccgtctcacggattagctctcatttatgaaattagtttttttattagtccatatttaatactctaaattagcgtccaaacatctgatatgacatgggcttaaaaagttttagccccatctacacatcacacgcttgccttcttttctagtactgaggtggtatggtaggtcggtctgtagccagccagccagctgattttgcttccgccgcttttctccgtctcttctcgctcccttccctccctcccatctccctgcggtctccgagccatccacctcgctgcctctgccgccttcgtgtcgtgcgtccctctcctcctcctccgcgtgcagccacggcgtggcaggcagctaccacagcagccgctattagctcaaatcctcgctggttgacctcagctgcgacgactcttcaggatgagcgagtagagtttctgtggcctcgtttctttcttgcggattgggggtgggttcgtttgtttctttccttccttcccgcgtgtgaggcagtgagccagtgacacgcgggaatcgatcgaaaggccggatctttttttagcttgggaggaggaggaggaggaggagctgcgcgtgtgcaggttcgagttgactttcggggttggttggttggttctttgcttcgtttgtcgctctgcggatttttttttccggattggtggtcgaggtcgatcgaaacctcgcaaagattggacctttgccgcttgcctgctcggttcttatctcgtttggctgagttttgtgctcatttggagcccctgttcctcttgattccttgcattattggccatcccttgtctcgagagagcttatctgccaaagattcttgggctagaaggtttcttggttcattgcacggttgagtagtagtgcccaagaggatttgcagcagaggcacaaagtttgatgggtggctgatagtttggtggattggatagagaggagaaggagcaagagggagggcaggagagatggggaattgcatggacaccacggcgcgggtggatcacagcatgaacaatggcgcctgtaagtttccttgatactctcttcgtcgaaattccaaatttgtcttgtatgtatttgtcactttcctatcatagctgtaaagctgatattggttgcttgggatgttgggttgtttgtcctactagatcgtggatttattgtgtgttgaattgggtttagtactttggtttgactatgttgaagataaaattttaagatcagagcatgtgttctgcaactagttatacctgttggcctagttttttttttttttttgcatgataattttttttagcctagcttgttagttgctgcttttgtgcagcttcacttttgtttttgttcctctttcttacttctatagagtaaacaaacaatagcatggatgcatggataaaatcatgttttctctagtccttgggaggcagaggtaatttttcgtgttgatcagactggattaacactatgaggtacatgtaactctcaatacctcccaaggaccaaaggaagactctgatagaacatagaaatagggttcattgaaatatcataagcttctattgttgtaaaaagggagtcggatattttctttaaatgaatggcaggaaaatctgacttggtagtcctgacgacctgaccatacatatgcagagttctgattgaatttgaacagaagcggtgcttttggatacattttgaatttcacattgctttgttaataacaagttgttcttatgcacatttcattaatttcttgttgagatagcagacccatcaaaagtgaccagcaaaacaagtttatcatctgtcccttccacgtttaagagcaattcaagtcgctcgactttgactctgccatctatgaaggacagaagtgagcttcctactcctcggacggaaggtgaaattttgtcatcttcaaatttgaaggccttctcgttcaatgatctaaggaatgcgacaaagaacttccgaccggacagtcttcttggtgaaggaggatttggacatgtctacaaaggttggattgatgaacacacgcttgctccttcaaaaccaggaagtggtatggttgttgccgtcaagaagcttaaaccagaaggtttccaaggacacaaggaatggctggtaggttcagaatgttacccaccgctgttttctgctgttctcttaagacatatttcacgataccttattcctatttttacgctgcagacagaggttaactaccttggccaacttcaccacaaaaatcttgttaagctgattggctattgctctgatggcgacaaccgacttctggtgtatgagttcatgccaaagggaagtttggagaatcatctgttcagaagtatgttctctattaaaaatatttatgccttcttgatttcctggtttctcatgtcttaaatgttcacatagttcaaataacattttttttctattcttgtaggaggtgctgatcctttgtcatgggcaataaggctcaaggtagctataggtgctgctaggggcttgtcgtttttgcatgacgctgagaaccaagttatatatcgtgatttcaaggcatcaaacattctccttgactcggtatggttgataattaatgttgactctaatcatcaagcttgtatagcttgttgagatgttctatcaacatttttccccttggttaattgcaggaatttaattccaagctctcagattttggtttagcaaaagcaggtcctactggggataagacccatgtttccacacaggtcatgggtactcacggatatgcagctccggagtacattgcgacaggttaaattttaattctttgctttgaataaatcatgggaagtcttttctgttatatagcatcggtttaaactaggatcagacatatgactgccaggtgctactgaagctttgaattatctaaaaatattgctaatgaagcttggtgtcattgctttacatttcccaagctcactggaatttatcttgctgcataaagcatcttatgcatattgccaaatgcccagatacataacagaaggcatatcactatattagttaagttagaaaaaaaattattatcatgttaccatttttcaaaggatcatattttgtatgttttttcccttaattccagcgcaggagagtcagtcatacctttccttttattttgtcttcattttctgaattcctggcacattgtcaaatgccaagtcaaactaatcttttcattgaggaaatgtaccactctgcgtagcaattaaatagatattgtatggtttatatctggagcaaccagttctcatgttacttaacctaaaactttataggtcgcctctctgcaaaggcagatgtctacagctttggtgtggtgttgcttgagttgctcacaggaagacgggccctggacaaatcgaaaccaggcatagagcagaacctagttgactgggccaaaccccacttgggcgacaagcgtaggctgtaccgtgtcatggatacaaagctgggaggccaatatccgaagaaaggcgcccacgccattgcgaacatcgccttgcaatgcatctgcaatgatgccaagatgcgcccgcggatgtctgaggtcttggaagagctggagcagctgcaggactccaaatataatatggcttcaccacaggttgacatccggagaacctcaaacgccgtccctaagtcgccgatgagaatccagccatcgccacggcgctcacttggagcagcagcatccccattgccaggatataggactgccaaagtgcactagaagtgcaacatagaagaggtcttttatctgcacggctgtatagtttgttatgtaagcagtgtttttttgtcctttttttctcgaggaactttctgtttctagtgatatttcttttatctgtgtgacacgagaatctgacgtccattataatgtaaattgtttgccgagataatgggtgccgaattctggtgcctgggttgctgctatgatactccctttgcatttcttctccttgattttgcttcacgctgctctctgccatgctgggatcatgatgcagagaaccgtactcactgtgttatacttcatccgttctaaaatataatggattttagtttgattggacatattccagtactatgaatctgaataggtttgacaaagagtttgtccagatttatagtattaggatatgtcacattcaaccagaattccttatattatttttccacggagggatatttttttatataatggaagctttattgatctcagtcaaaaggattatctcactatgaaaggtgacaaactgtgaattggatatttttcccaggttttctcagcagttgatttgagatagcaagttcatgcacttctctattcacatctgacagctccctttgaacacattctgacggaactgtttttcagaaagagattgccagattacggggttgagacagacataaccagctgaaaaggactgattacccatagcgtaatgttatgatcctatcagagaatgagacccatcagatcgtttcacatccaaatggaaatttcctccttgacttaaaagttactagtactatagtatatacagatgtacatggctcgaattcaatgatgattcagatagtcccctatcataagttggtgtgaattttcactcccatgaattagcaaaagaattgtttgggaagaacaaagactggcctgctagcaggtaactgaataactgacgcagtctcatttctcaacaataaactcctgaatctctattccagtgtgacgggcaccgccctgtttcctcaccaaaacctcatcaccaactttcagtgaagtcacaggtatagcagttcttccactagatcctacataaaacaatcatatggttccagaatgagttgattgaatatgtgtactaatcacatggtgattagcatcattcaaacataactgaaatttatggcttattatagttgcagctcaaaacttacagtcctatcttcaaaagttgtccatatgggcttacctttttcaggagtgataagtgcaactgtctcggcattttgcaggaaaatgctgtaagtatcatctccaccgttctcctgcagcaagcccatacgccatgaaattgacaatccatgaatgtacagcaatcatttgaagggagatcattgttagttatgtacctttgcttctacaaggattagaggccttgattcaatcttaacacgaccaacaatcgcagtacgccacaaaccattttgatcaacaactattacttcccgacctgattgcagctctgagaggtaactagttcggccaccagggactgcaacatatgcatgaacagggccctgaatggagaacacataaattttattagtcttagtttctcttgttgtacagtgatacctgcaatagcttgctgcaacataagttgttgatatcttaccgcattgaccctgaaaggcctgcttgcaatataatttgtctccaggcattcagagtgaacaagaaacattcctcttgcataggagccaacctgaaaatagaacatcatgtagaggcagactggtgaagcttgggacaggtaaaatgctaatgcggttctatttgggggcacaatgacacattcacgtggaacgattttaaccaactctgtactgcaggatatatgttaattatttatttatctacagtgaacaagtgagaaatatacacaaaccagaaggccttcaccaggtcgcatcatactgcaaagatccacacaaacacgatcacccataccaacaacttcaacctttgacacagtagcctttgtcaacattaactggctctttgcctcgttccttctgtcaaaataatcctgagtgattaaaggaggagagaacaaacaaacatctggtgaatcgtacaatcagacaaatgataatcagtaacaataacaggagctgtactttcacacttagatttagatatctatatatatgtatatatatacacaccacggtacttgcctctatacacaagaccattgtagtcccacagtgttttaataatttaaaaccaaagaaatttcaaagagttgtgataaacataccttgagtttgataatatcatccatgtcctctactttaagtataactccatcaagcccttgctccaaggcctgtaaagtaactaagtaactgggggaacaacttcacaaaagataattgataggaacacgatacatcattatacacaggaacttctattgtatgttgaaacatcttgacagttacctcaagaaaaacctgagcctcagttgagtttgttgaaacagccaatacagttcctctacatccctggaatgcagcaactatattttctgctggtataacctacgaaattcaggaggacaaaggaggcacctgttaacgcttgttgggttttgtcaagtgtactttgcaagttgcggctcaaatatgaaacagtacagcatgtcaagccaatgatcctaacaacacagaaaaaacgtatactggacactcattcaaaccattgatggaattcaaataagctattcacacaaacaaaaagacactcaagatgactaaacagcatagaatgcattacaaaaatgcaagtatgatgacttatctcactatgacaattgaaattaattcatatgtcatggaagtaatttgctgatagtccaatattcgaatatctaacctgccatccacctcggaagtctatcacgatgttttccacttccacattgtctggttgtatgagttccagctctcctggggaagagacttcagaaattacagcaatcttttgttttttctcatcgaatatctccaggccatcgataaaaagaggattgatgcgagcagtagctgcaatgccaaagagataacaaactgtcgatttcagaattccaagaaaatggcatgcactcactgatgcatactatcaagtatatgattatattgcattagtttaaaggagagcaatgcctagacatagttgtttcttcttatggcaaatcatcagtgaaatgtctgtcgtttcttctaaaatagctaaattgttttttttttttttgaaatctaagccagccgagctggttttgtatttagaggtaagcaaaatagctaaattgtgccttatctaccaaaaataaagaaacaattatgtaacctaacatcgctgtaagaaaaaagaaatgctctcacatgaccaatccttgccaagatctttggatccaaagaggaaagtgctccagcccctctccacggctgccgtcatcacctgccgatttgttgtccacacccagacggtcttctttgactccgacggtgaggctgaagaagcgcacatcttgatagaatgggagcaagccgaagctaatgctgcatcaaagaatccccattacagagtcaatattgcaaaaaaaaaaaaaaaaaaacttcacagcaggttggggatattcactgattgtctgtcgaataaatctcaagaaatcaatcatgaattcttgggttttgggttttgggctagggttaggtaccgacaccacactcccctagcaacaaaagctgggaaatttcgaccagactgaaatccgtggatctcgattttgtaatgcaaatagtatcgcaaggactacttttaatccgaaatggagcaaggaccgaagagatggattgaggaatctagtcatctacagatgagcagcagcaagaatctatcttgtgcaaagggatagaaagatggggaagatttgggatggtttacctgttcttggagatggcgggacgaggactctagcgaaggccaaagaggagactgccattggatacggatgcctttgcgtttctattccccactcttctcttctaagaaaaaaaaaatgttcccctctatcttttcttctctgttcctagttcctgctgtattcccctttttttttctttttctaaaaaagatgctgtctaaattttcacttgcaaacaataattagaaatctatgtctatttttcagtctttcagaagcaagttttaatttttgaattactagaaaatcaacgtggctaaggcaaaggcacgctcgtgttatatcccggacagattatttcaatgtttatgatgttagtttaattttgcaaatgtttatgatgttagtttaattttcatacattttaaaaatcatcaattatcttttcgtaggtattgcttcgagtctgtttgttgtgtttaattataatcaacaaaacaaataaaacgtctagtaaaataggtgatgttatttttaaggtgttttaggttttgtttgcaaatttatgtttgatgggtggaattcataccacaaaacctaccacccgtcccaaaatatcatttttgcctacttccgtttgtcttaaaataactttattttttaaaataattattgcattgtagtttgtgaaaaacaagagaacgcattgaaaagtatataaagtaaaaatatttgtattaagatttaataaagtggggtatcctagtatttttactttttatttgtatgtgtgtgataggttaaaatatacttattttgaaggagtatttccattacattacttggatcgctccttaattcaaacacttttagctgccatggattcttctagattaatacatagtcattcctataagagggctagcacctcagaacaggagagctgcaacgcagcaacactcaagcctatttttttcctattgtttttttttctttcacataattctaggatttattttgaaagtaaaggccgtcaagtggcccaatcagaactggtaaacactgccagcattagaatattagatatatgaaaactgaaattggaattatgcaaaaaaaaaagtgagagatatgtacatggagatttggacacggccgagttgttggcttgtgctggcattcggcttggagaattggaggcccagatggattccgtcggttggagaattggacacgatttcggagcagtagcgggctggtgcgtgagagctgcgagcctgtgacaacccactgcggaataagtccgctcgacgttcctcatctttttgtcgagtttttttaaatacaaaagtagacgctcacatcacgcgtactcatctatcctataattcaccaactcgtctatctatctatctattctataattcaccaactcgttttactcatgttttactcttacactcttacattcatcattcaacggttcagatcatccgcgtaaaatccgaacggttcagatcgatcccatatccacctccctcaatcagcgcacgacccgcacggcccaccccccttcctatcgctctcccaccacacctgcgtctccgccctccgccggaattccgctcccgcacctccgccatcagcgctccgctccgtatcagccgccgcgccgtcctctgcatcgcctgtctgccaccgatccccgccgccagctcgctctccacgatcctccgcctccccgatgcacgaggtcctcccgtcaccaggtcgtcgccgccgttctgctccaccgatccccgccgcacgaggtgctcccgtcgctaggtagccaccgcgccgtcctctgcatcgccttctccaccgatcccctctgcatcgcaggggtgagctgcagctatggagttcctcgccggtgggggagcagcaggtgaatcccgtgagaggtgagtagttgaacaaaactcatcatgcagttcatcagcaggtgactagtccgaaacttggcatcgtggaggttcatccggattcatcatgcattctgaaacaaaacccatcatccagcgcttgccgcttttcctcagagtacaatgaacgcggggtgctcggcgaaatgtcccgtccggctcctcacctgcaatgcatgtgttctggagagtgtttatggattctggatcttagatcccctcaacgacttggatcgtcagtaaagcttcatcttgaaggtgcacatctgccgttgtttcgtcaaaatactatgcatgatctttaggtgataaaatattgattgaattgtctactgctatcgctcagaatccatactccatcaatcttacatatacacatatttgttgcgtcaaacacaagcttgctttccatacatccctgaacaattcagcctcacaactgctcttgacatatctcattcagaatttttttttctcaaattagttggactgatagaaaaatattgcttttcaagattgtaaaataaccaactgactgggaagttgatgtcatatgttggaagcaatctgctaaaatgttaaagaagtgcatctaacttttgtacccagtgaattgcaaatctctatctcgtttttttttgtttacagtttctttggttttaaagtaaaataggttgacatgggaactttactagcagaggaataggcttatattcttggaaaaaatacatttctccatgcagaatgtgattacaataatgatacttgctgccatgatttctatcactcatgcacgcattgcccttgatgattgtatgcagttgggatatattggtgagttcaccctctatctctctctcaaaccattatttatcttcattcactattcacttacaatttccctcgtattagtgatatgtattagtgagtttatgaaaaaaagatcagatatttaaaaacagagttagctcctttggaacgaagacaaaatgctactttgataacttgacttctcaacaccactcttatctgcacacaatttttttaatgaccagtttgaactttcatctctttacagtcatcaagcaagaaaatccttggcggttctgcttcctggaagcagtaggaacaacaagagttactgaaccagaaattgaacttgccttcttcatgcatcagatgaaccataaagggaacaacactactaccctctccaaaattgagctgctcaggacttcgtagaaatttacagcttcaggacatgtgatttatccattctcttttactgtttattctaaaatgcaaaaaaaaaaaagaaattttgttgtagcttagattaaggcagcctcagctttgtggtttgccaagccatgtaatgatatatgaatgtgatactttaattaatgttgaaacgcatgattatgtatttgaacttaattgactgaatgtgtcctggaatcggtttagaacttaatatatcaatcagacttttgttctttggttactggtttttctgtgacgtggagaaaagacgttgaagacataatacatcgtcgactgaatgggtcgaccttatggcttgttttgcaaattttgaaccttgtcctggatgtagtttatttggcttgtttatccctttcgaatatataataactgaggaacttctaataagcttcttaactgaactcgctcatctgtaagtcttaattaatgtcttgaatctatccttgatagcccaaacaatatattgtatatctttttgttgtttcaccgtagcgttagcacgggcatgtaactagtcctataaatatacacacactcaggtacgttgcctatcactaaaataatagttagccgtaaatgagagcacccgtgtcaagtctaggacttgaacccggatgagttggttctactacagaaacataaccagttgagatacgtttactttgcttcctgtcaagtttaaatcatagtaccctcaacttgcaaaaactgggttaaattagggtgccacgtcagagaaccccagctatttcatagatcgagttttgtaattcagtatgtgattcagggatacgatttaaactcgatgaaaatatgagagatgacaaagtggatttatccacccactgcttcgtatggggtgggatgaggcctttggcgatttctcacgccctcgcggggtcgcgcgcatgtggacgtacatgttgatggagagttggagatgggggagccaaccaagtaaccaacagacgcggccacgcagcagggatgtaagccgatcaacccacgagcctactaataagcaaacttagcaggtaccgtgtagattaacttgcgagttactttttaatttggtatgtaaacaggtttatgtatcaatccacttgtatctttagatacgataagtcgaaccatgatgcgaaaacttattcactatcacttattcgggctgtatttaattagttccacgtcaaaattaaaagtttaaaaaaattggaacgatgtaacgaaaaggttgaaaatttatatgtgtaaaaaatttcgatgtgatagaaaagttaaaagtttgaagaaaaaaaagttagaatataaacagagcctcgatctataagtgctcacaggccagcccgcgtgtatccctaccacgcagacagcgacaagcagccatgccgccccggcatcgcgatcccgtgtcgcgcgactcgcgccccacctttttttgattccgcctcccgttttctactgtttttccgccgtcgtcacgtcgcgcggcccggacggcgcgttggttggccggccacagctatagcggatgcggaagcttctctccgcttagccaaagccgcaccagcgcaccgcgtcaggccgtcaaccgtgtgagtaccccaagttgatcggcatcgtaatcgtcgtgcccgcctccgtgccggtgtcgcttgctgcacacatgttcctgatttgttcacctctctccgttgagctgttgtttgtttactgtccgtggtgaaactctcgggccgagtcatgtaatgttacggactcgtgagatttgcagggagcagaagaagaaggaggctcaagtgaccgggtccaccacgacgtcgctttccatcatctattgtccaggtccaacggctatcccgagacgacgcagtagcatccgatggaacgcacatcattgcaaacattttcagtaaaacccctctgtttctcactaaattacatatatccccttgatgttagctttctctccagcaagcttaatactccctccatcttaaaaaaactaaacttctagagtttaaattttgttccataaaaaactaacttataccatcctacttaatattagcacgaaaaacgagaagttttattccttcaataccctttaactatctatcactcttactaattttttaatgattaagagcattttagttattcttactctccactaattccaccttgagatgctaggattggattttttatgggatggagagagtagtattagtcttgtagtagtgggctacctatcatatacatattacgtcttatagtttgtgttgcggctgtctacaaatttgtagcatgctgctattttctgtcctcatctatcttctcaatatgtgcttatagctagcttataatctgctattataccagctctcaattctctcccttccagtatgggttatacggtaaatcatgagaagatgcaggtctgatctgcaaaaaaacacctccaacggttcattcaacctccactcccccttgttataaacgagagacttcgctccctctccactcttccttccacagtcccatccccgcgacgccgccattagagccgcaagaaaagctcatcaagagaggagagttcgttcgagatggccggctgctgcgtgttcctccggtggccgtcggcctcgccgtcccgcatcggctaccgctccctcgacgacggcgacgacggcccgtctccggcggcggtgacgacgacggtcgtcgtcgggaaggagcggcgggtgttctccgtcgaccagctggtgctcgacacctacccgttccggctgctgctggagacggcggtgaggaaggaggagagcaaggcggcgctcttcgtcgacgtcgacgccatcctcttcgagcacatactctggctcgccggccaccacgaccgctcctcctcctccctcctccacctcgacctcaaggagatcatcgacttctactcccaggacgcctgattcttgatgatgatgattctgttcatcagattcttttttgatcacttctttgttttcttctcctttttgttattacccccttaattaatcatgtgcatatataatgatgattatatcttctttacaaagacgatattggcaatggaaatagcgaattataaagcattcgtagtttgattgaattgctgtccggttctttggttgtttcttggttacgccatttttttttctgaagaagattaccagttctctgaagatgtcatggtttctccttttctcactatgcgtgtgtgcattcacgtcgctgttacaggccaaacgaagctggcatgatacaattaccaatcagtttaagaaattgttgtggtcgttttcgctaaattcggctgcgaacacgtcaattcctagttagctcaaaacgcgctgttaagatatgctaccgtctgatttttttttaatcgagaaccggttgtgtttctgaacatgacgtccaacaactcgaatacatgttgaccatttcgttggcatgatttctcgttgagctaattgttaactaccagacgaaaaactgcatactacatcccagcacgacagggtactccctatgcaagaactgcacacacacgtttcctgccatttcaactgtttattcatcaaactagacatgttttttcatcgaacttcaagattcgaacagatgctagtatgtcagagaaaccctgttttattttattttgtttgcttatcttcagctgtccatcatttgttttgtcccgcatgttcacaaatgattgcaagatcatattcctttgccaatcatcatccatctctgatatctggatgtatcattgtttcctgaaggtatgaatatgatttcacaatatagcacttgtccaggcggccaccagaattaggcccaactgaactgcctgtggtagtttaggccccaataacaacttggatgtttctattaaaaaaagcaaagatataatatttgtctatgttgtactgcaatataaaaaaaatgcgaatattagggaatgacctaatatcaaataattagaaagggtgaggctttgaacccaagtcgtctagcccaccatcttatgaagctagccgaaaaacccatgtgcgttttctcgctgtactgcaatataaatagttgatatatcaccacattgaccctgataagcctgcttgcaatataggagtgttttctctccaagcattgagaatgaacaagaagcattcctcttgcataggagccaacctgaaaacaaggtatcatgtacagtgagactggtgatgtacacatggatgcttggaagttggaacaagtaaaaatgctatgcttcaacgattgcagactgatggtgcaatacacatcatcagtttacaaaattagcattactctagataaacacatccagtactgacgacaaccacacctgaccatgatgtgcgtaaatttaccagcattcgcacgcctatctatcttccattcatgcccgctttaacatcttcagcagtgtcaacgctacagtgccacatacccttctggattgatgatggcttcgtagttcaggagcccttccgagcagtccaatgttgtactccctccgattcaaaatgtttgacaccatttactttttagtacgtgttcgaccattcgttttattcaaaaaatttaagtaattatttattcttttcatatcatttgattcattgttaaatatacttttgacggagcgtggggctcctcaccgggagaccgcgcaggcccccctttgccggttcggccgggggagctaagtgaggttcttcgccctcgatctgaggaacgtcagcgagagaggaagtgcacaagacacgggcgacgtagacaggttcgggccgctgagaagcgtaacaccctactcctgtgttctggtggatctgtgcgtgaaggaatacagagcgccccggagagggagagagagttcaggctctagaacccattccccaaagtcccaaccctccttcctctttttttcttcctctttcttttctccctctttctttttttctctcctaggcctgggcctcctttttatctggtcaggggtcaccacatgggcctctagctgtctaagaagggaaacatgctttttacaatgagggctagtctacagccggaagtgacctctgacaagcagagtacacgcctcctgccccgctcgcctgctttcccggtggacgtccatttcaaccttcatttaatggccagcgacttccttgccatacttgcgctgaagcctggaatggatctgaccgggactgacataccaactccaggagttagcacgccggctccggctagggacgagagccaggaagctctcatcattccgacgggacggggcgaggcgtgtgacaggccgcctgttgccacctaacccgcgatctgaccggtctgtgatcggtcacacaccgcgaccggtcacggaccggataagcgtgcgctgcgccgcattaaatgcggcgtggtgcgctcgtccaatcctgctataaatgcggttatgtgagccacgctgtgctcacctaacccacacgcgtggcgccaaaaccacagggggtcggggcgccccagccctcggggccgaaacgggggcgccccagccctcggggccgaaacgggagcggtccgacccctcggggagacagagggaggggtggccacgtcatcctcgggcccgacccccccccccccgagggggtctggccatgtgggtgaccgcggctacccaagcctctagtcacgatacccccggtcccatgtcaccgacaactttcatatacacatattgttttacatatttcataattttttttgaataagacgaactgtcaaacatatgttaaaaagtcaacggtgtcaaacattttgaaacagagggagtagttctaaaatggatatgatctcccatcattggtcctgagggaagctaagaagcagtggaggaatgcatggatcacacttaactgtagttgatccaactctgtctttactatcatccccatggtgaacatcagtttccaatgccaccggaattacaatgtgagaccaactgcatgtccttcttggatgcataacaatcagtacattaagagctgtagaatacaaaagacgcaagaagttatttattttaacacctaaaaacagcctatgacatcagtatttgtttatagctcactgatttttttttggtgaaatgtttatagcgcggccggagtagcggcagttcacctgtgccttctgccgcgggctcgtcggcgtacagcgtactccagcggacggcggggcggcgggagtgtggccgcgggaaggaagacgggacttggaggaaagtgaaagtgatccggttcgatcggacgtttccagccctcaatgggctgggctggacctgggctttaaaaagcattttaatatctataaaagtatattttccatttcaagttttacaactactcaccgtcagttaaacaaaccggtgccaaatatcacacatcatatccagattcgtggtcctactaagagtaggtgtcacattcgatattatgtttgtttactttagaatggacatctaatatttgattagagtattactctatgtctaaaaaaaaaatctaaaactgtatgtgacgtattctagcccaatgaatttgaataggggccagtttggttcatggcctatatttggcttaccaatttatgggacacataaacagtaggaacacaaatttggtttggatccaaatatcggccggcctgaagagaaagaatcggtaacgtcattgatgggagccgaagtgcgggcttgaaatttgaactcctacgcaggctttggcagtggcacatcggccatatgtattccacgctgcacacaaaagttggcaccaaaccaaacctggtttagccaaaaattggcaaggttagttttggcccttaaccaaacacaatttggccttgtcaaatattggccatgctaaattgtacctttggccaaatattggtaaggtccgttttggcctcaaaccaaacttgccctatatgtatgactaaattcgtagtactgtaataggatgtgtcacatctagtataagttttttttatgggatgggagaagcagtagcaaaaaatcgaacttttacgcacaaaacggtgacaggcagaaatagaatatcatctaatcttctattagagtataatggttgatttcagaagggattttagagtagtggcacctgactttcggcgagcaatgcagcaagccagcaatgaagctatcgctgttttaggcaaaggagcatggctgccgatcgccatcgccataaactatttttacgaggagaaatcatctaaagaacgagaggacgtggcaccggggcttgctgctgtcgatttggtgaccttccttatcctcaatcataacttggatgttttcattaaagaaatcaaagatgctatatttatctctactagggatgaaactggttcggatagttttcgtccgtccggaccattttttggatttagatagtttcggtcggaattatccggaaattcttggattctgaaacgaatttggatatttttttctcggaaacgaaaacgaatatagtaagggtattatccatcggaatcgaaaaacggtcaaaaattatccggaatttttttcggatatccacagacattgagcaaattttagaaaaaacacgtatatatacataactttttcatacggaatcagatgaagacaaattttatattcaacattgtagagctcgatgagatctacaactttattattgactattttattatttgaggtcatttaagggtctaaatatttattataatataccatattaatttttacaaaatctcagatctaccattcaaacgatatctgatggagatgtgttccatattaaaattgtagggctcaacgagatctaccactttgtagtttataacatttgtatttgaaagaatttaaagtataatacaaacattacaagtttcgaagatgtgaagtaaaataaataatatctccaatttatacaatggtaagtaagttatacatctagtaaaaggtcttgggaatagaaaatgataatcatatttgtatatggctctcttagaggaacaatcatgaaaatcgattttcacatacggttgtgggaccgtctacaaaattgacgatataaatgttggagatgttgaaataaaataataagcgatatctcttccttaatcaagaaactcaatttgagaggtttttatataccggtaaatattcgttaccgtattcgttccgtctcgtattcgctccgtatctgtattcgataatattcgatttcatttacgtatccgagttttcgattacgattccgattccgaaaaaaaatatgaaaacgaatatgataaagctagtttccgtccgtttctgatccgtttttatccctagtctctactatactgcaatataaattatcgatacattaccaagagatacactcgataatgagtgtgtcccgtgttcaataacaacaaactcacaatttattcttaaaaaatagttggagggagtcaaaatctcactttttttaatattaccgcattgacctgaaaggtccgcttgcaatcccatttaagttatctcccaacaatcacaatgaacatgaaatattaattcctcttgcataggagccaaccctaatttaccgtatgcttgaaagttagtctctctaatgaatcacacgagtggggatattatgcagctagagaaccgaacttgtataatcattctatatgtttttcttactccagagcaactcttagcacaccaaaatgcctcagagcttcactatgatctcccatcatagttccccacgtttatagaagctcgcccctcttatgatagtaaaaatggaaaaaaaagaaagatcaataagaaataatgagaagagacaccaatgtacttacatgtaaataagaaatgagagataagcatcataagtatatgatatagtgagaagttatactttttagttgatgccaaccatagtagtttgttgaagatgaacacttttgagggctgcaaaagtgctcctcaataatgagcaaaaagattcctaacaaccaaagggaaatctttctgcaatatttttcatgtagtactaacttgtagcggtacgtgtcattatggaagtaaaaacacccaatatacatttctgaaaacgacagtgttctctaagcatattcagttcccaacaaacaatggctgacaacctttacaaccgaattcatcaccaatatttgtgagaagaagtgtcaggactcaggacaaatgctcgaatcaaggccatctctgttgcatgattgctgaagaatattgcttacatgcatatccagcattttcagatgatggaaatctttccaatcagaacatatacactcattacgtttgctgttgacaggctatcaagatgataaataccagccattacacttttggtaattcgcttcgcagtgctctcttctcctagaattgacacaggaaaaaaccaagaatctgtctgaaacctgcacatgaatctgaaagggagaatgcattaggaaaccgatgtggacatgagcatttctttcttttgcaagctgcaaagcttgtgagttgggcaagaaaaagacgcattcgctggcgcccccaattagcaaggagttagagctgcgatccactgaattttcgcagcgtaatgccgtgtgatgtgaagagagaagaagctgtgggtaggtcacgggcccacctgacaagtgggcccatcctagtatccccagcttcactgttcacacacatcaatgcatcaccagctgtagccttcgggccttcggggacgcgtggtgtacgaagagcagtaatgcagcttctaatctcagctgttaagctgagtgattaactcttaagcaatcacttagtagtactgttagctcatgaccagctggtgagctgcgcaaacatcaatttttttttcttctcctcattcttcgtcaacatataagtacagctctatcgctttcttctctccagtcgccacacattcttcgctaccacctccaagacaagttgagcactgctcagcttggcagcttgccatccaggaggaagaagatattctagagataatctagagagatcagttgcgttttgcgaggctgcgtgagagagatcatcattatccagcaaaccaccatggagaacatcaagggggtaagaaactgccaagaacggcttccatctcaattccctgaaacgaacccttcttctcttctcgttcctgctgtttcttgtctgaatctttcgctgcgttcttgcgcgcgtgtgtgagcaggggcatggcgcggcggcggcgggcggccggaacgggtggatgacggtgccggcgttcggggactgggacatgaagaacggcgcgctgccggactactccatggatttctccaagatccgcgagatgcggaagcagaacaagaaggagctctcccgcaccagcctcggcggcgacgacgacctcctcgcccagcagaagcagcagcagccgcagccgcagcagaagcccgccaaggccaacctcggccggccggccgacgaccaccgccaccggcaactccatggccgccacggctcgccgacggtaaggctcattcgccctgatagcctacccggttttgatttgattctcttttttttattattcttggaattaagtcacgactttactgtcatgtcatctaacggtcaatgaggatttacatgatctcattaaaacccatttcatttctggatcgtaaaaatgctttgtctttcgatttgtgcggtctttagctgaatcatggagtgcaaagatttgatctttcttttgtttgatacgaccagtacaagattggctttaactgatagtagtacaagtcaaattgttaaaaggaaaggggataaataaaaaaataacaagtggacaaatccagttcttgaaatgtagtactactagcattgtggcatgtaaaaacaaagcacaagcagagcactttcagagggcagcaccactgtagaagcttcatttcctaacactgaaacagatttcgaagataatactgtaaataattttgcatgtttcttaatccctacgctagagaacagcaaccgcgtgaggctttgtcggtcaaactcttattccaaggcatggatcatgaattgtttttaccgtggacggtggagagcgtttgaatgtgcagactgcattactgcagtacagtagattagtagtactgctgtcctggagctgtagaatcaacatgcaaatattaatgtctagacatttttttccctggagtaacaagagaaggctaggacaggatccgaggagaggagaaggttacaagctgatgcagccattctgtaactgcatttgcctggttattttacctaggcagctctagcttgttcttgtaagatgtcaacagggagaagaatgacagacgatagaaaatttgagaagctattggacatatagtttagaaaataccatgttttaacgtctcctgaattactagaattaatcacgggtaagcagttagctgatcaactaatacatatatttaaacaatttagaggtggtgacctataaccttgtactggatcagcatgcacagtggagtcagttcaacagctataggtgggttggcgaataggagtatatatgaagtcatatcaccggccattccagctttatgcatatacatatatagtgcactgcttcgatcaaatgattggcaaggacaaatactcatattttgtaaatcaaatgcatgatatcctcatatctgtttgccttttaaaggctgtaagcctgtactgatatgcattatgcatagtccagagtacaaccaattaatatattaagcatcttggtggccgaaagatgattagaaggaactaataatgatttgaatcggttgatagataagcaactcttaacacgtaataaaaagatgcaaagtacccacgggaacacttggatttagtgactaacaactaagtaaagtctgccacaggttggtggtgtcttagaaaaaatatgtatttgattatgctattgcttgcggaactggagaaattaattgtcaataagtgtatttaataaagtatcacagttctttccatgagacaatttgacatgtaaaattctgagttgcaattcaattcttctacatactctgagatgcaggtactttcaaagcatcatttttttggaaataaaacttagcatcaagtatgaacttatgcgcaaaaactaattccgcagatatctgcattcttctgtgtaacattaactgattttagtggcctctgagtttctgactggaacttctgatgcagggaaggaggacgtttctgagctacttccagtgctgtattaaggcctgaagaaggactgtcaactactgctattggctgtactgttgtgtcacagtgcaaactactcagcttatttttagattaggcttcttgggctttgtcaagcctagcaagatgtgtaatatattcgtcgtgatgcttaatcttttggtcattcagagaacaaaactatttatgagtggcacagattgcttgcgaattgaggtgcaaagctgtaatatattgaaggataaatggcatcttgtgtttttgtacggttgcagaggcatgattgatttggatttgtttctgctatcacgaggaaagatataatgcctttttttggggcgaggaagaaagatgatataatgtttactcatcacgtttctttgtaacatctggagataacactgcaaaatctgtcatttatgtggttctttggttgatttttctttctttctttttgagtttggacaatttgacagaactgtctgacctaattattaggaagatagttcactacacattgtcttcaggcttcagtgcctacaggaagataatttgctttacatcatcttcagctctctgtgagtttcttgtccaaagaaaatctgctcatatgttagtcacgggtacaatgattgtttgggaaacatcaaagcctgggctgtcgaatgcttcagttagcagaagagtaggcatgattaggcaatactgacgagaaagctatatagccttcaggcagaacattctgcttgaatttagtgtgtgtttaagcacagaggacagcagtcaaagaactgttgttaactagagatgcccaaaatagatcatctttcttgttcaacagattccatttaatcactagaatgtacagagtaacagagaaaatgagatgaagggcttgtttggtttagtgccctactaaaacattagtagtgtcaaaatctagacatattttggcactacaataatttggtagggcagagttctaacttctaagtaatatgtttggattaataccaattggaattgaaagatcaagaacggctatagggggggtgaatatagcaattcaaatcttgcccccgaaaatactcatcaagccggatttctcaaaatccttactagaaccgcggttattagagaagccggatctagaaaagaagagagaaggaattcccgaaactataagagaaagagaaaaggaattcccgaaactagaagagaggtgaggaggagatagcaaaactcatcatcgcaaagttcaaattgcaagcggaatttaaatgaacaaggcaaaaacgaaatccttcaaatcatttcattcataggtgatgcaaaataaccgctcaactaggagcaaacatacaccttcagaggaacattaacacaaacttaaaatctctcggacaaacacactccaaactaatcctaatacaaaagcctctcgggcaaacacactccaaactcacactgaaactctctcaccgagcatctcaaaagaattacaaaaggagcaacctccacccttgcatccatctggactccgatcacctgcacacacatgaaccaaacaaccgttgtcttggcacagctgtcgcaacctgaccaatgttagttcacgcacacatttcctacacttccggtacttgtcaatttcccatcacaaagaactaaaaccacccatggtttcacatgaatccaaattttatgttatgatgcagaaaattctagaattatactaccaaattaaatatgggcattaccattcatttggtttcgaaccaaaccatcatatttactattcaaactaccaaaaaattaacatggcatatattggcatcaatccaaagtggcccgaaaacaaagaaaaatcgccatcaactcacatgatcttcgattgcctgtagcttctgaactgcaacgggagagctcctcgaagaacgcggcgaagctcacttggtagatttgagatcattggcggcggcgccgtcctggtcgagcatgcaacctgctcgacgaaatgcctccacggcgatcctatccggtgggccccacctgtaagtctcacatgaaatccaaataggagagggaaaaaaagaaaaaagaaaaaaaaccatcgaatccgaggagatagggagataatggtggggaggaagccgctgcgccggcggcggcacgacgcgccgccctcgccgccgttgttcggggccacgcctcggccgacctcccctcggtcctcctccgcctccgtggccgcggtcgcggaggagctggacggcctgctcctcacggcgccgcggccgtcggcgtcgtcgtcggagccgcggagcttcccctacgtggtgaagcagcggtgctgggagaaggcggagcgggtggccgggcgcgacccggagaggtggcgccgcgacgcgctcggcaacgtcgtcttccgcaagctcgtcggctgccccggatgcctctgccacgactacgaccacatcgtcccctactccaaggtcccaaaccccaactccaacactgatgaatgagttcgtgtaacgctgctactttcttactttgatgtctgatgaattgatgatgtgaaagccccgggagatttcagtgcttcatgttgcattttcattcgcttaattgtactgttcttagttagaacttagaacatgattttatttgacgcgttgcattactaatccttttttgaatggacagggtgggaagagcacattggagaactgccaggttttgcaggtacatgcgtctctatagttccataccctgatcgatcactccactgtacttgtgcatacacagaattgtgctaagtttattgtttgtcggagtgaggtaatggggagtgctacctggttctaactaattgatacaaacaagcttcctatgtaatgccgatggcccacctgtttgcacatttgcgcctctcttcagtcacaaagaagttactcatgattttcctgttactattgagcattgatgaaataatgaaatcgtaaattgtttacgatgaaaccttgtctgtagtgtgttatcttgttggaaaacattgctagtagtatgtgatggggacctatgtgaattgtgatgcacagccttctcatttgacacggtcggttctttcccacaggctactgtaaaccggtctaaagggaacaaaacagagttatccaaatctgagctcatacagaagagtgcctattgtagggtctcaggtgagtagtatggctaccttgagttttccacctttactgaagctatcattgatcataaaattaatcacccaactttctaagtaacttgtttgatatctgcaggacgtgatatggatcttcttgaactctctgcatatgggaatgttaggcgagggccagattcaggtggttgcagaatccaatgaagacgatgggtacgtctgaagagtgatgataatcagtttcaaaaggctgcctgcctacctcaaatctgataggaaaaatcccagctgatgtttgtgccaaatatgtatactcccagctttatgggcattcatcatccattttctaaggattgaccatcaggaatgttatgaattttgtcatcttagcatacttaacggatcctgatttaaggcatattttattttgtattacataccatagttccaagtgcggtcagtgtaaacatgtgtcgacgcatttgttttaaatgtgacatcacattcgtgccatctcttcccacttctgcatatatatactgcaaattttccacacaaattgattgagctaacatttatatccactcatacatgtgtggatgaggaggcatggggatatatgatcttaatttgctacacataaatgatgcaatatccagatctaagccatgatgatgccaccgaagcgaaaatgattggtaagatcttgatattttattcttctttggtactttcagaaatctttacatttttacttttgttgttcaaccttgaaaattcaaacctggttatgatgtgtcaacagtatcttaaatggagaccattgcaattaatgccatatttttctaccatttcaaatacagtactgtagaaaaacccacagtattcttgtcattttctaagtgtgaaaagatccatgcttcgtacactaagaaagtcaacaagtcgcttcgtattttctccatatgtttatgtattaatggtaaattaaattatttttcagtagtcatcattttttaatacccaccatttttgttttactgtccaataataacatgccacatatatttgactgtttagaaattaggtgtaaatctcacgtgataaattttagtttacttttaaaaagaattatcacatgatcatccccataatcattaactgttagctacagagttttgggaagaccagtggtaacggtttgggtactagccacctttaaaccagacaaggtgactaagtaatatgtaagtcacacctttttacagctgaatattgaattgtttgatatgttatttgaaaacatggggaaaccatgaaccactcgattttgtgaacaaaaaaattctgttgtagttttgggtactatcatcaaaagcctaacctagtggaaattacttggaactaactagaatcttgtgtaggtcatctgatgcctccagatccacaagaactttacgaatgattatatacaacctaatattataagatcgaaacgagctcttttttttttggttcattcatggagaaatatggaaattcactgtcttctgtttgttcagttgcaggcttgcagccaaacactcaagagggttattgtttgctcggcatactttgttttctgtttttgaggatggcgtgctcaatgctctaatcatgctcccgatggtgggtaggctgaaatctcactatcatattattttcctttttgtctttttaaaaatttcttattaagcttgacttcatacatataattgtatgcaaaagcatgcatgatgagtttttaaaatttaatctgaactagaaaataggtttctcctagtgaccatgtgtcacttcagcactctagtgcaacctttgcgttacttgcctttgatgggaaagtgcactcacaaaagtttattattaaagctattgtccttaaggtttctgttgccactggtgactggtgtgtagacaccaaaaagggaactgcttattgggtttgaccttcaaatgtcaaaaggggtcatttcatttgtttcatgccactgccgaaagtcacaagggtagagatgatacatacccaatacttgaaaaatacgattaattactttcctgtcacgttctatcatatatgagatatttctcgacatgcatagttgcatacttaacatgccctcacaccattagaaggctgctcaaataggaataaaggtcagagattaatcatcataagtatgcttagtcagaaaatctttaatcatattttttccttcaaatttttattacgtgtccccaagttttcattttgtttcttttttcccgagggagttggtgacaaaaaaaaaggtgccctggcaatatatagactagaaataaggtgcacattggaattttgatttaaggtcaaacatgctggcttagtaagttggctggccaatggtgtaggtggaagttccgttcaaaaaaccgtgtaagtggaagtggcactaccagatgtcaatgagtgaaaggcaggtcgaatggtggtaataatgcatgtattgaaaacgtttcaaagcttagatgttttctgtaatgcatgtgagactttattttaggagtatctaccagtaatatgtttcttgatatgattggtagagcttctcgtccatttccatccataatatgtttatataagcaataataaataatgtaaacaaatttgtatatgttacagacacatgtctagctgaaccaattactgcatgctagcttttccatattttgatactgtttattcgaagtttaatgttttatggagaatggaatttttatcatttttgttcttaattattctatggtaattatcacattttgcttaatcagaaactattgttcttttgtcagaacataatgtttctttttctgatcgcatgctgagtactgaagtgcaccaatcagataatcacatggaaatttgcacggacctaaaactttattttttgtgttcgtcttctcttattggttagattttttctgcgggacagtcggcagtatgtgtgaaggagataacatatattccgctctcacatttaaggtcagtgggacatccagtagttgtctatcgctttcttgctttctttcgtgccttccctactttttgcatcactttcacgatccaattatctcaattgaaaagtagaaagaaacacaggaaaagagagagagaaacaaaaggatatatagataaagggaacaaagaaaatttggatactgtttctgctgtctctgccaatcctgataccgaaagaaatagacaaataggaaacaagatgaatatatgcagaaaagtatcacatttccagggctacagtgggactggtttaatacactggaatcagacagcgacgaattattcagatactactgcaaaaggaaatccttttgatctaaatattcaaatcattatattatttatctacatattataaggggaacttgctctccctatctttctcaaacccacatagctatgtacaagttatctaatacagctactgggcttgcttgtagctatgttaagttatacaccctgacactccatctcccatacctactttacaatcctctaatgtacaaaatttcagctgtatcacgctatgtctttatagcagcagaaggcagcataaaaatttccaaggcgttgttcaagtcaagatccctcttggaaggtcaccgagcgtgttagggcagccgggttcccctgcatgaatggcaagctgctgatcgctgtgtgagttgatgcctttgcctcatcctttgactcaaaaacctttgcaagcttgcatcctctgccatgatctgctcccaccttgtcacccttgatcccaataagcgaccagatagagctcctggccacctcgtcgacatcgtcgatccgaaccgtcttcggcacccacaccttgccattacccttgctatccagttcctcatcaccatctctagggtgctttcctaatctgaagcagttggtcattgtggatactggagaagcagcacttgatgatgaaaccgattgggattgggactgcggtggccatggagcgttccaagctcctggaaccatgcagccccagtatgcagcaacagcagctgctgcagctggatagaatggaattgcaatgcttgaagtgtaataagcaggtggtggtgccacgccaaatggccacatggctcctccgttcatgcatgggtgttgtgcaacatttggagatctatctgctgaaactttctcctttaggttcgtttggttcgattcttctgttttcgacaatccttcagcacacaaaccgactggcatctcgtcggtgttcttgataccggttgttgggataaacttatcttttagatgcttcatttgttctgtgaggtctaaggtggacaggtcggagccgaagctgagaacggtgccattagtcttcactggggcatagagaggaggatcaccgggcagagcagccctgaccctctggaggaaatgggaagcggccgatacgctcttgctcttgcgtcggcctgcacccacaggcacgttgcgcatggcaccacccgctgtccagtacctctggcagttcttgcagaagtggcgcggctggttgatgttgtagttgttgtagtagcagaacttggtgtccatgctgctacaccgggggcacggcaggatcttgtcaggcttcttcagcttctccttctggttggccgtatcgccctgctgctgctgattctctgatgagttcttatcagctgaagagtcctcggtgtcgacgacctctggctgcggaggtggacttgtggagtcttgaacggtgttctcttgagttttcggttcagtcgtgctgctgccactgtgttgaaggtcctgcaagcatgtgaagaaacttgatgagtttttgggtgttaaatttgcaattttgttcagttggaaactataagcccacatggacagttttgtgttcaggttattgtaccaggaagatctgtgacagagtttgttcattgtttcagtttgttcagttgatctagtaaaacactggaggatatgattatgtaactgatagcttgtaaggccacatgttctgatctctagcttaggaaatgaaaataaagttgtgcaatttgtgttggttaaatctagttacatatgcctctaaacttttgtagtactgtaggctaagaaaagaagcagctctgctttcatccaaaaaagaaaaaaaaaacatggaaggccgaggaaaaggcctaattgaaacagtctgcacagtctagaaactcatcaagaaggttccatctttcagatagctaattcctgtattattaactgatactatctaaggaaagcatggaaacgaagcaaaaacaagatacttttgaaggattctttcgctaatggaaactaaacacgcctactcacattgatatccccaaaaatgaaaagaaaaataataagaaagtcaaagaaacacaccaacctcagacttataaggcatgtatgtacactcaagattataccgttttaattaccaattaacaatttaatatacaaccttataagtcacgaccaatatatggactcccggttgatcaccattatcatgttcaaaccaaagaaatggccaaaattaatcaatcaatcaaatcactccccattatccaagcaaaacaaaccaatcgaattatcccgaactgaccgctaattccgatcgccacatcaccagatcacaacatagtactacatcgcttgaattctcaagccctcaaaacgatactacaaaacacaaaaaggatcgccagaaaacacaccaaccttatcaacatcgccggcggcgcaggcgccgggctctggcacggggatggtcttcccgaacagcttgatcaagcagtctccgcctccgcctcctcctcccaccttgcactcccccatctcgacgactcacctcaccactccgctccaaaacgaacaaactccgtttcggaattccccgccgccgcctgcactactcctcccggagacgacaggccaacgccaacgccgatgagctcatgcggaggaggaggagaggagagcgcgagatttttggttggatttcttgaaatcttttcattcgcacaagcgaggcgatgggattggggatagttttaaggagggagggaggggggtggaggtggtggggcccacggaggagggtggagagccacaagatggatttgtggccgcaggggtgcggttttttgattctctccaccatctctccctctcaacccgccttacttggcaatcaaatccttcattgctgacatgcacacctacgatatgctcctccttttcttttcttttcttttcttccttttctttttgttctttctttatttcatttttcatttttggatctgtgagtaatgagaagcaagtgtattttttttttttgctgctgtgtaaaaaacgcttggctggtagtctttttggtcatcggagtgtttgtctagcatgatcagcgattcggttatgggaattccttttagtagatgataatatgtcgtgattgggctacagtgatacgactgaaactcagcttgtgccgcaagtttagggcatatttggagttcatactttaagatgatcattctttttttccgaggaccaatttggtttaacattctcctaggaataaattcactacatacaccttatctaggtattatattggaccaccaggaaactgaaggcttgcttcgaatgcaagaaattcacatgctttttacaataattaatccaatcctacaaaattcctctaaaaattctcctttttaaaaaaagaaaactgctgctcttaagctaagagagtttgagactttagtggggacctcccatgttgtgctctactattaaagaaaaagagagagtttaggtttatttttctttccagggaagctacagctattttcttttcggcttgaagcatgggaaatttataggctctaaaagaacactatggggggcatgctagtactccctcggtcccaaattagatatcgttttgactttttacttacaacgtttaactatttatcttatttaaagaattagtacaaatataaaaaagataagtcatacttaaaatacttttaataataaagtaagtaaaaaaaagtaataatttcataatattttgaataagacgaatagttagacgttacaaacaaaaattcaaaacgatagtaggacggaggtttgctaaaattcgtccatcttttattatgtggctctgagtgtctgaagacggtgtagctccctctcctcaggctggcagacaaagaaaatgacagtgttggactgttggtaatgtctttcagcttgcagtggcattatctcagctggtttcttttcattctttgcgtgtattcaggctttgatttgtgccttcaggggaaggacaatttgatcgtgatgtggttgtcaatatttgcaacttgattgttattgttgcactgactatactgagttctcattaatcctagttaggctaattattagtatcagacagagattctttgtttcaggtgaaagtttacctgctactggagctattaatacatcctaaatgttcgatgttaagttcaatactgaagtatacttcagacaaacatgcatgttgggatgcatggaccgtggagacttgttatcctgatgtctatatatgtagctccatcctgggatgattgcactttttagctaacgaaagtctagtatgtcttttcatgctaactgttcagtttagtaataagctaattttcgtggctaccgaacatattccagttatagcgtactattttccacttcaactgtacaacaagctgccaaacatctcctgtggatgccagagtgggtgacagtctgctccaactcagctttctgttaatctccaggtcaggctttatttatcctaactttatcatttaaacccaaggtatgactaattactggaaataatgggctaatattttcaggtcaggctttatttatcctaactttatcatttaaacccaaggtatgactaattacaggaaataatgggctaatatttataatcctttaaggggaaaaaaagatcaaaagcaaatttactccctccgttatgtactcacatgttataaatctttttaggtaagacaaacctaaaacaacttaggaatgtctttttagataagacattcctaagagttgggataaatctcttgcgcctgtaaaacatagcagttcattagcacgtgattaattaagtattagttttttttttgaaaaatagattaatatgatgttttaaaacagctttcgtatagaaactttttttttaaaaaaaaacacaccgtttagcagtctgaaaagcatgcgcgcggaacacgagggatatgtgttgggaacacaggctgccgaacacagacttataatatagaacgagggagtatctccgttatgagatcagggctatcgtacagtaaaccagggtttaaaatttcggctctgtaggaacccccatatgatattatttgggctggaatttttaaactttttcatttttggtgaatttggcaatattttgtttaaattcaaccaaatttggttagaaaattcaaatacttttggattgaaatttccgtatctcggcaccccccgatacagaatgctgaaaacgaaatattaaaccctccaataagcaccctacccttttattgtttttctgtttagtagcaaaaattaagaacagaaaattgaccgaagtttacttaaattgagtggtgtagtacaatctgactctgctgagttaggcttagtcttcctggatttatctttgtgccgctatacgtgctcttgtgtgaaccgctcgtgtgcgttgtttttgttgtatacgcttgtttggttaacttgtaaagtgcattttgatagttccctcttgctgtgcccatttcgaaataccttttgagaatagctatacttaacataggccttgtttagttgggaaaaatttttaggtttgttatcacatcggatttacaaacacacatttaaagtattaaacgtagtccaataacaaaacaaattatatattccaccagaaaattgcgagatgaatttattaagcctaattaatccgtcattagcaaatgtttactgaagcatcacattatcaaatcatggcgtaattaggcttaaaagattcgtctcgcattttacccgcaaactgtgtaattggtttttttttcatatttaatactttatgtatgtgtccaaatattcgatgtgatgggtgaaaagtttttattctgttggcaacccaggtgctagttttcgctttgtcaattcctgtgttcaaacttaaaaaatgctgctgcttggaaggaaggtcagttaatttcattagtagttcatgttggtcattggctagaaaattttggtcgtaatgtttttcctttggaaattagattgcatacgtttacatgatggaattagtgcacctttggtttcatacttaccattgcaccttatcacacttacattattagccatgcccacggttacctatgccatgcatgttaacaatggctagcgcgtcatatatagtcatgcccgcacctcattttcaggataaatagactttaggtgcctatctttttaattttaactgaaagctgtcaggtgaaagcggaattttcaaagttaaaagttgtgtttctattgaaagtaagccattattctgtttcactgattatatgaacctgttgtattcctgtgaaatttctataatcccagtacatatatttcatgaaaaatatgtccctttctctttctgttagacagtattgcaacggctacatatttatttgtcttattagtgaatcttacatgtaaaatcaaccatatatcttttgttaatactgtgaagcgtgtgcgcctaagaaggtagatgttaacctactcatatatatatgctcttcataaattgcgtcaaagttcctccataaaaaaatgcaccaaagagaaagtatcaaaaacttgatgttggaaattggcaacattggcaaaattttgatatgattggcttataatattgccaaaattatatacatattgccaaaatttggtaataaactaaacgtgactacataattattaattttaccaaataatgttatggttgaaaatgttatcaatcataaacaggctcttggttcgaactaaacgtatcttaatcaattaggtttcttgtgatggaaattgctcatcgaagcacgagatgatggttgctcgtatttcacatctattttttttcagtggttaataactaggtgacggtctagtctctctcgatgtgttcatataggtataggtgggggtaagcatgtgagtgcgtatagagacgtatatgtatacattattttgggacaaaaaagagataaacttagtttggtcggtcagttagcatacgtgggattgtctcatattttgattcctacgtgtcaagcgttgacggggaacttttggtaccaaagccgagatttttggaagtagcaaacttccaagatcgattggaggtgccttaatacaaaagattatcctaactggcaaaatttcacacaggcccaatacacgtgtaagaaacagaggatgaatgagtgtttcgtatcgatgatacgtgcaacaaaataaaagatgacttttagattgagctacttgtcagtggcactgtacctcacaagccgtgacaaaggaaggtcacgtccaggccccaactggtcggcctttttctcccattttcttgtgctctcgtgggacaagacacaagagaaaagaatggctaaggaaaagaacgagagggtcacttacatcacaggcatctgtggaaagacgaaagcctctgcagaaaagttagcatcgcaagaacaagtggcgattgtaacaagtagacagctgcgatctaactaacaaagtatagaaatcgaaaccgcaaaaagaaaagaaaagaaaaagaatagagaaatccaatccaagcgtatatagaccaacaactggagttagattttttctctctggcatgaaagcaaaaggtttgggagttcttgcctggtcttccagcttagtttgcttctgttcagttggaagacagcgatgtgtaaagaaactagccatagatgggtgatgggttctttgcattatgcatagatacgagcttcacaagttcacatgacctgtgattaggcctgatgggctctggtccaggcccatacctcagatctacacatcaagctcacctgcactgcaggggctgtagaaaatgcatacaacaatggtaaaaactggaatgtttacaggtgagatttttgtggtgagagcttgtcctgtttttcatttacaaaagaattgcttgtagttacaggatgcaatcatgaattggggaagaatggatcgtttggaagtgaagatgatgtattgctgtgctatgaacagggggtagatgtcccagcgaaaccgaatcccagagcaatgaaagcaaatgcctggaggtagatgtacaggtagtagtgcttggccccgagcaccaaatcgtaagacgcgcataccaggaggtagaacgcgaccataagctcaggaatgtaaatcctgcaagggtgaaaaatcagacagacatgtaatttcaggcatggattttcagtttttcactgctctgatatcagagggtaactggtatatgatcgtaagtaattttttttttacctctcgacgcagtctgttggcttcaatggttcaagaagagggacttcaagcttgtccttcacatgatcaccaaccttttcagtaaccacccactgattgacattcatggtctcgagcaagccggttagagctgcacgcatccggtgcatggccatgacattctcgaatagaatccaaaaaggcatcagatggatggacctggtatatattagataaaatctgtaatcttggaaaattgatgggcagattgatagacgttctctgcagggagaattcattcttacccaggatttctgatggcgttcatgatggtaatggcagtgggaatgtagaccatcccccagacaggaatgctgacttcagggaccatgacagacagcggaatcacaacacagtagaacaggaaggtcaggatgggagcgacgaccctccttacgaagaaaaagctgtagagtagatgaagttttttccatacagatacgccctgaatcacatataaccgggtaaagaaattattgcatgacaatcccgtaacatgttccattctgtcattgaagaaggcttgccttgtttttggcaatttccgttgccatttttctgaagaggttggcagcaccacaagtccatctatgctgctgatgtcggtaggctttgaaggtacttgggagttcactcttaacctgatcaagattcattattaaaacagggtaaaatattcatatatgcttatcaaaggatcaacatatacaatcctcacaaagacatacccttatatcaccaacatacaggaattgccatcccttgaggcttgcccgtacagccaagtccatgtcttccacagttgtgcgatccttccaacctcctgcttcgttaatagctgatacccgccacacaccagcagtacctgtaggcagatcagcgatgttaggaccaggcatgaaaagttcatgtaagtagttctgatattggatcttaccgttgaacccaaagaatgagtgcatagatgagcctgattcctgctctactttgaaatgatagtccagtgacatcttttgtatccttgtcataaggcaaacatcatagttcactgcaaaattgcccagcaaaggccagggcagaacagcctgtaatcagaatgaacaaaaaatctcacttaaaataaccaaatgacaccacattacccattgaaaacttgaacaaattgtgtcagagcgttaacatctatatccaaattatgggttttctgggacccgaccaaatttacttttaataacttaaaacggtgcaacattggatgtgcccttttttccaataaacttcctttcattttcatttagtgctataagctcttcatagttcagtctacttgatgaacatgatctgagagtttagtagacaaacagtacatataacagttgagtgaccaattcaacagaaacataaatcggactatcagaccaacaactgaagcacccctatttaatttgactaccctcacaaggttggaatgaaacaatgaaaatacttgcttaccaaactcccaacgtgtctgaaccagaccaatctttgggttatgcacaagaaatggtattgtttttagaaggaaatcagattcaggttggaaatctgcatcgaaaatggcaacaaaatcgcactgttgggtatagatatgttccatgcccttcttcaaggctcctgctttgtatcccttcctgttatctctgatttcatactttatgttaatttcttttctcgcccaatccttgcactcaagctccactagatcctgcatttgaccaaaatctaagtaaagaaacaaaaatcctattttaagctctaactctaaatagaaaataatgatggattgtggatttctaagcagtgaaagtacataagtacacttgatcaatcttcatctacctgaaagtaaccttatagcgcatgaagtaaaacttcatgatgtcatgttgaactactttgattcacataatgcaatcaacgcacagctgcaactattaagcagaacgacgaattcttttattttataaaaagagaaagaacctccttggttaccgcataggaaataactgcagtaattaacatgtgcaatgttgaacatagattatccagtacttcacatgatgggatcagcttacagctgcaatttttattgtcaagctgaattatcaaactatatcattgcaaataaataatagtaagcacaagctttgtgaacccagtattttagcatgtttaacttcatcacgcatttgtattgttattaatttgcaagtggtatgatcctgtggttatcctgtcaatgacctcagtttaggatattatggttaaataaaggtctacaagtggtagctatgtcaactactctgtgttgtgttacatgtctagcaatcatgagtagaccagcaattgagtatctagggaaaataattttgggcatgtactatatatctaagataggcaaaatacaggtcacactaagatcatcaaccgttctattctgcgtggtcaactcacagaaatatgtggggtgtacttggttaatccacaggattatgagccatcatccttctgcactccacaactgaacaacgtaaaccataaaaggaagcaacaagaactatgaggaactagctacttgtttgacatgaacattgcatggaccgtctcttcatctaagccctttgcaccgccaatttgccatgcatgacttctgaaaatacttggctcgagtaaaggagaaaactaagcatgtatgcagaagtttaacttaccttaatggccggatcagtggaatcatccaagacttggattataatacggtccggaggccacgtgagagcacatgcagctccaatagagagcttgtacacctgcacaagaatggcagatgcatcacattttcacatgctggaaaccaattagcaaattctttgaaacattacttggatgcttgtcagacaaaaacaactaacattcaacgcgcagtcttagttaacatctccaccaaatagacagaatgctaaacccattagatggcgattgtaaattgcccttaacaataatttcctggattagttagctcctggatattgctgaactacaaaacagttctgcaacctggtttgctttgcaaggcccgcaatgtgggccctcatccggtagcatctagcgggcacgctatgtcgctatattgataaaacaaaaccccacatgtaactaagtcctattgatctgagcacagacagggtcccacgagccattattccagcggctgattcagaggctcggaagaacaaattctaaatcaacagactaaaatatcagcgcaaatgcgccacacaattagaagagattaacaacagcgagagctgcgaagcaatgcattgcggattaacaagaacgagagctgaagcaatgcctcgcaaaatgtcacatgtgaaagtgaaaaagcgctagagcattaagcaagcctgtccaaccatcgctgggagatttggatgcacgcttccgattccgaagcggatcgtacactgatcgatcacgaaattcagcagtggaaggggggaaaagggagagttccaacgcctcacctccttctcattgtacatggggatctgcacgagcaccatcgggaacgccgccgcctcccgcccgcccgtcgccgcctcctcgtcttcgccatcgccgccgccgacgccgccgctcccagtggtaatgggctcccacttgtacctccgctccggcacccgccgcagcagcttgacggcgacgaggctgacgaggctcatgtaggccacctctagcaccagcatcaccgacatcgccatgcacgcccacaccgcgaactgcagcaccggcgccaccgcccgcgcccgcaccaccgcccacgccgccgcgatctggtcccccgaggaggaggcggctgctgctgcggcgagccgccaccgcccccactgcccctccatgcgcgcgcgcgtgcgttgctcagctttgggcgggtgtggaaatggtgggcaaagctttgcagcgggttggcttgtagttgtactacgtgagtagtttttgacgggggtttgaaattaatcgaggtttagatggtgagatgagagcacaaaatggatacggaaagaataaactcgagggggaattttgcgattacacccttgcttaagccttgtattacctgtcaggtgacaggtggggccccagaagtgaggacaaatcccattcctaaatcctaatctcgggcactgtagcagctcccaccgggattccgcgccgcacctgctcgacggattgcctgcccaccccaagcagctagccaaggtctccacccgtgggcgtgccatggcatcgctccgcgcggcccccgggctgccattctcgccgcgcccggcgtgctgccgccctcccagctcgcctggcgtgcagttcttcactccggcttctgcaggcggcgccggcggagtcgggcgccggcgctcgtacccgaggatcgaggccacggcgaggcacggcgcgaggaaggagaaccccaaggtcaggaaccgcaggctgcagaagaaggtacggctcgttccgatctggctcaccatgcagcacaaaccaattgcccttctgctaacatgtaccggttcttgccgccggcgctgcagttcaatggcacggcgacgaagccgaggctgtccgtgttctgctccaacaggcagctctacgccatgctcgtcgacgaccacaacaggaagatcctcttctacggcagcacgctgcagaaggccatctgcggcgacccgccctgcggcgccgtggtacgccgcccactccgttcctccacgaatttctttgaaacaacccgcacaagatagtgcgatgtttctattgaaggaataaaatacaagcctacagtcctgggagactatagacaggaaaaagaaaatatacaaccacaccacgcgtctacgtctgatcctactacttaaaacaaaataagcacacaacaccctaaaggaataggacttctaaacgacgcctccaagaatttcacctagtaattagacataaactgctcatttgtattgatatcttgagctggctggcttgttgtgacaggaggcagctgggagggtcggggaggagctcatcagggcgtgcaaggagctggacatcaccgagatctcgtcctacgaccgcaacgggtttgctcgaggggagaagatgatggcgttcgaggttccggtctcgcagtacgggttcctgccaagatagcagcagcaaattgttagagatagagatgcctttctgtagataggatagtaatagtgtgtatttgatgaaaaatgaactggaaacatgtgaattggtggctgtgtgttactgtgatgcatcagtttcttggagagcatgcaagttaattcaagtttcacagaagatatcgagtcagaatctgctatggaacaatacttcttcactctcgacatgattcaaaccttttcttctctctcgttaattgtgcatatttattcatgtattgattactgtccaggcaggaggtaagttagcatactgtgctgaagctgaacttctcatacctgttttgagccgtggccgtgggcacagcttcatcaacaactgattctctggaccgagccgtctggttcagcttcaacatgctgatcctgtaccagagctcctatcaatatgccaatataagcgcccttgtgcacattatcatgcaacgtatgaagagtctgccaagacacaaaagcagctcaacaagaatatactcaatatagtgatcaattgataatatgcaatatggagtcccaattaacactcagattttacaaagaacagagaggactggtatatatactcatatgagcaagcggttttattttgtccattctaagtgtaggccttggtaatcgaacaacatgttttactacatcagtgacagagtgagaacaatggtgagtagcaaattcacttgaacagtaagaccagttaattccaaagaatgaacttgaatagaaaaatccattcaaagaagatttacaaccgtgcacattgctaaatattatactggttttaagtggatatcacaatgctacaaaacgtcagtacaatccccatagaacagaaaaaggtttacatgtaacagtttttcaaagctttgcattccatagtacaagtgcaagttttcctatgttcagaaaaggtgtaaaggttccctggatgattttatgcagaaaatggtaataaaactcaaataatgacaactgtaatttaatgaaattcattataatggattttgacagataataagacatcagccccatgtggtgttgtagtcctatgtaacatgaaatgactgctatgctgtctccagaggtgacagactgacaagtttgaatctaagagattgcataattgacatgttaccaaattaagctgaaaatctaccgcaaggaattcaggtaagaatatttcggagaatcaagtaaacatgaaaaatatgatgaaatgcctacagtgccaaagaaaacccctttttccaaaccataatatgttgacataaccaagacgctaagtagtactaagtactgtcgacccaaggaattggcaattgtggagagaactgtcacatagactgctactacatgctcaggccactgtcccaataactcaactgcaaataaatacccactgactcaaatttgccatatgaactttgaaaggataagttgatagcatacatggggagctgaattcttaaagagccatgatgaaatctttcccctccaaaatttgttcaaaaaacaattccctccacaatgattgttgcgtttctggcccacttttgtaggatagcaagtatagcacattagcatacagcacctgtacagttcagattcaggattcacactttcacagttcatcaaacagggggcctgcagtaagagacaatacctgattatgctagtgatccaaagggcaaaagcaggtgaaatgcagcctaggaaaaattacggctgaggcagacagggtgtgctccagctgctctggcctgcagtttttcgggccccggcctgattcatgatccgtctgatctccatggcctctgttgttcgtccagaagcagcgtacatgtcgctgagcaaaatgtagtacccaccctcctccgggttcaggctccttagcttctggaccgcccgctctgccatgttgatatccccatgtgtccggcatgcaccaagcaaagcaccccagaccacactattgcttggaattggcatttgttctatcattttgtatgcttcctcaagttgcccagcccgaccaagcaaatccaccatgcatccatagtgctcaatggtgaggtccactttaccatagttgccactcaagattgcattgaacatggcacgcccctcctcaacaaagcccttgtgtgcatatgcggtgagaactgcaagcagtgtcgtcccatcaggcttcacagatttgccatcagccagcatccgatgaaacaaagcaactgtgctctccacatcaccatgcgatgcatatgccgagataaatgtattccaagatgccaagctcctcacggtcatgccatcaaacaaattacgtgcttcagtgaggctcccacacttggcatacatgtccatgagtgcattacggagtgacaccatccacccgaagccattggaatcaacatactgacacacacgctccccagttgcaaggtccccgagtgcagtgcatgctgacacaacgctcagcatggtcacttcatctggctgcaccggcattgcatcaaacaatgccaaggcctcctgcggacgtcgtgccctggcatacgcggatatcatggcagtccaagaaacaacatcccggtgaggcatctgatcaaacaccacgcgtgcggcatccaaatcgttggccttgaggtgaagagtcagcagccctgagaaggagatcacatcccgagcaggcatttcgtcgaacaccctgcgtgcgtccccaacagcagcccgagacgagtagccatggagcagcgcgttgtggacatgcacgtgagagctgcccgcgccaaggcagccgtgtttgatcgcctgggcgtggaggtcggaaggcaaccgccgctgagacacgcatcgcgagcaagacttgagggcgaacgtgaaggtgaaggcgtcgggggcggcgcccgcgcggcgcatcgcggagaagagctcgatggcggcggcgggcgaggaggacgcggcgaggccgcgcatgagggtgttgtagaagaaggcgaggtgggaggaggccgaggagaggaacgggaggtggagggagagcaacgcggcggcatggcggaggtcgccggcgggggagacggcggcgaagcggaggagcttggcgagtgccgcgacggcgtcggcggtcgggaggaggtggcggcggcggaggagggcgccgtggaggaggcggagcttgcgcttcgtcgagcacttgccggcgaaggatacgagatcacctggcgagatcgacggcgacggcggcgtcatcgcggagtctggctgcgctccatcggttcagagctttgaactgtcggagctgatgaagtgctgaacaatcgctgaaaaattccacacaaatggttaagttaggcggttagcatcacacattcagaatttcatgctgaaactttataaaccaaaactgcaaagttttacacattcttatttcttcaaacttctaacttttccatcatattaaaacttttctacacacacaaacttccaacttttccgtcacatcgttccaatttcaaccaaacttccaattttagcgtgaactaaacacacccaaagtttagtcgccgaaatgaggagcctagtggcatttgagtttttctattagtgaatataccacttcaactcctttttcttccatgttttttaaaatctaagacacaacttaggggctagggcaagtactataagaaagggcatccacaatatcaatcaaaagcgggcattatacaataaaaacacctatatgggctgcctctatacaatgtagatgtggcctttaaagcattaatggctaaagtagtccatatggctatgggtttgcccacaagagaatacaatatattactttttgagttcactgtttggaaatgaatataaaaacaaaagcagttgatccatgaccctgcagcagatatatgctggttgaaggttggacgttgaagttaccgttgccttgagctctatgttggctacaaaacttgctcgacagcttgagctccatgttgcctataaaaacaaaatagacagagcttcatagtacacctcctcatttcatcatggattcatccaacagaagtttcaaaaatctcctaaatcaagaatctccaagcctagaaaattctaggcactacaactctcctccccaacaattccccaaccgttttctcccatctcagttttcccaaagcttcaacccaaatttcttacataatttctacccatttggtgccccaggcaactacccaccatatggttattctcctccaagctttcaagctactcaacgtcaaggaaattggatacaagctaactcaccaaatcaagtgtttggagctgcaagcaacagagtactctttgcaccacatcaaagtcacctcagttgaagttgctgccaacacttcttcccatgggtcggagtcatccattccttgccctacaactacaagacagcaagagaagcagccacttaacatcgaagagttgagtgatagcagcgaagagggagtgaggagagcgccacgcaccaattggaaggaagaagaaaacttgcggtttgttagcgcttggttgaacaactcagttgattctgtagatggaaatgataagaagtcagagtattactggaaggatgtagctgatgagttcaacagcaatatgcctagaaatgcacatacaaggacagtcaagcaaatgaagacacactgggataatgtcaagagggatattgcaaagttctgtggggcttatgctcaagtcagaaatacatgtactagtgagtactttgaagacatgattatggagaaagcccatacatggtacaagaatcaagcacagcagaaatctttcaccttagagtacatgtggagagaacaaaaggatcaaccaaaaggcccacccatatagattgcttggaccacatacattgctgttgccctaagcccgtacatattacccctaaatttgccacatatgattagatgatgagatggaggagagtagttaggagagagagagaatgagccacccctcatgcaaggggcaacctctacacaatctccaagaaaagtgcaagatgatgtgagagtggactaatattagagtttgtgtattaaatgtgatatattgtatgtgttacctcttaattaatggactaatattagagtttgtgtattaaatgtgatatattgtactccatccggtttcattttaattgacgttttagataagcttatggtcacacttttataactttgaccatcaataactttaaaaatacttagtttaaagaaattagaacaacatatatagattggtttttcaaaacactataataaaagtaaacatgcatttatttattatatatattataatagaaaaataaggtcaaacatatattttgtagaccgtgttattgtccaaaacgtcaattaaaatgaaaccggaggaagtatgtgttacctcttaattaatgagaagataacatggtctaaattggatgtgacatccacctccaccataaaacttacccttggatcattgttttttaagtgtcatattaaaaattggcaataaagttgtaatgtcataatataaatccaacgatatagtcttcgtaacacaaatctagctaatttcaaatattaaattgctcggaatttggaaagtttgacagtatgattatctcaaatcaaataagaaaaaaatatttatatttgaggctaccaaatctagatctaatcagtactctttaaatcttgtaaaccccttacactttctttaccaaagtctaaagaactaacgtctaacgcatctatcagtttcttttctcatgcctgagtctccttttccttgttctccaatagcaatcacagcggttaagtaaatactctataatgttcttttttcacaggcgctcgactgcatttgctgcagctaggcttcctgttgtgctcgacagcgactgtgttgtttcctttagtagttagttgcgacgtaattatagtgcaacaaaccgagtgtgctccattttcattcgctcttagatgtgtttcattagctattgttgcccgctgtctcggctcataaatccttacacttctcaccatgctactacattaccttatagtactattcacttaaacagtactcctttgggacaaagttttttgaagaaaatttgaaggaactcaattcagtggaaaactttcctttgcgatcctttgagtcaaaaaaaataggcatccaaatatcttatgaaattctttaagattggctcaaaacataaaaattttgacatgaggttcaacttatttgaaaacacaattcctttcctttgtttatatctcttataattcttgtgtttttccttctccatcgaaacaatcatttatgtagtttttctacatgttcacaatccatagaatttaaattgccagggcatttcaatcatgtattatttcttctattttgttttgacaatactgtgtttcaaagagtccatagatttaatactccaagtggcaatgccaaatatgaccttttattcaactccactaaacaaataaacatgctggaccctaaagatgtctggaatgtctcatgtgtggattcctcctgaccaccactggactaatcgccgccgctcgtacgaaagacaactagacaagcagatcctttaccaaaaaccaaagccaacacacaaacggcggcggcgcgcacacacgctctcgcccccaaccc

SEQ ID NO: 9779 - DNA, 3846 bp, Oryza sativa
taattcatgattcagctgattaatctggtcatatagtttctaaacgcatttcatgaatcatgaataacaaaatgatcccgattccgataattttgctttataagtacattttactgattagtgatctaatactagtatattttttcttgtagtaccgaatggctgggttggctgctattgagattgcccagaaagtttccaaagcatggcgctttctgagaaatccaaagaacaatgcaaagttagttaggagaagggataagcttaacgcgtgccagaacaggggagggtattgcagcacaagtactttgtctggatcaccaacatccagtccaaatgaagacaggatttcctctggaatttctctctcctggcatgatgtctataatattgctgttaaatggagacaaatttctgaaccttgtgacccagttgtttggatcaataagctaaggtgagttaatttctggtgaaaagaattaattattgaatcattcttattttttcaatcattctcatgcttacaaattttattttgtcaatcattctcttgcttaaattttctggtaccagtgaagagttcaattctggatttggttctcataccccgatgcttctaggccaagcaaaaataattcgttactatccatattaccaaaggttaggaaatgaccactatctttttactttgacgtgtggcaatttgcagtgggtcagtaatggtctgggtcagtaatggtcttaacttgttttgtataacatggcagtgttttggaagctgcaaagaatatcatgcttgacttgaaatatgtcaataatgcggaggatcgtgcaatcttccttacagatattgaaaagttgaagaaggtaagttggtaagttatacaataggctgttgaatgtcatagctcatgcatgagtcatgacatatcaatgtttcttttgcacctagagtaagtttatacaatacaattccaagccctaagaggaacaaagggaaagttctagcattccacattggagttgaggaaagtttccaaaagggcattcagggtgatgtagcatttgtataatatgctatattagtatttctcattacatatatctaatataagttacataagcagtggtatcaagcagatgtgaaggatgggcttcattttgatgaatttctgtgttcaacagcactttgattgattctagcatattttctttgttgcatcattttccttcttccaatagatagcatgaagcttaatgtgttattttctcatgataattaaacctgcagatagaagttgcatcgtcgtgctcggagttgtaccatatagttggtgagacctactgggtctctactagatgcgacagcattgcatttcaggggtaaataccttttacttgctcggatatttactaggatgtgtttgttgttctcccatgtgaaactgcagcaaagtacttacaaacagtgttgcactacccttgtgcttatttaataacaaagtttgggctctttcaggaggcgtcttgaagggacaagaattaccactcaaaacatgtaagttgcttaatcagttctctttgttttgctacaccctcctgctttcctgcttacttgtatcatgatggcatcgcaggggcaagacaggattcgactttgcaatacgaacaccttgtacaccatcaaggtgggaggaatatgatgaagaaatgtctgcagcttgggaggtacagttagatttattgtactgtaactttgttggttatggtctcttgagtttacacggtatcggggaaggttctctaaggaagagcttagaaaccatgacatgcttttaaatttattgttgtacactgttgaattacattatggggagccttggaacttcacatgagttgcaatagaaagagttgatgctgcagcagacaacttgtgtttaggtttctgtaatatttacagtttcagacaaactaatagctctgtgatctgcaggccatttgcgaggcatattgtagtgacacgaacccgacgcgtgaccctgatatgcttgatgctgtgaaggcagcaatattgcgtatgacatattactggtacttactgcaacctcttctctttccctctctctctctctctcctcccgtaaaagatacgacaattgcttttgtggggtgctgcaggtacaacttcatgccgctttcaagaggttcagctgtcgttggttacgtggtgttgcttggcttatttctggcagcaaacatggatgtcactgctagcatccctcatggggttcaggtagattgggaggccattctgtctcaagatcctgacacatttgttgataaaatcaagccctggctgtatccatcaataaaaacaagcaggaacctgaaagactatgcagatgtcagcgtggcattcagcaccacaggatcggttgtagcggccttaacttgtgttgacacatgagtttgatattgatttcagcggatactataggttggctgaattgttagcgtctttgtttcaccataatacccccatgaactgttaaaacagctttgtctagattgtcgagcatttttcggtttgctacagtttttcagttgcttcatagagctgtatacctgtatgttgtaatgctgtttgtttgacacaataatgtcattctttttcccttgaacgatggctttgtaataataattaccaataattcatgaaaacgtttgacaaacggagcttgtttcttatgctatgggtggttcagatttagccttgtttcttcatggattcgcaattttggtttgagatttcgggcctatctgtcagtcctgatagtattatccccttgccaagaaggtggaatttgtttttgtcaaaagaactgttcagattcagtgaaggattgttcgactcctgggcatattagttcaaactgaaaatattacgttcgaaagttcagtctccctgctttcaactatttgccacttttagatttagcaattaactatttgccatacctatctcaatgatatgtgggttcacatgtgtctatgacatatgggtccagtggcaaataattaattgccacatctaaaagttcaatatgattcaaacgtggcctgctacggcccagtttggataggcccgttatgattcaaacgtgggcctctgtgcggcccaagtttggataggcccattgggtttcgacctactttctttaaatggcgacacgaacaccgataaatttcgcaaaccccccctccgccgagccgaaacccaaaatgccgccgcctccgcctcctcctcctccgatgggcgacggcgaggtcgagagagccggcatggaaacagacggcggaggagaggatcgcatcagcgcgctcccagacgatctcctctgctccatcctcctccgcctcggctccacccccgccgccggccagaccagcctcctctcccgccgctggcgccgcctcccctccaagctccccaggctgctcttccccttcccctccaccccgccctgcgtcggccccgggatcgccgccaacaccgccccggtccttcgccacgtcgacgtcgtctgctgcgactcccccgccggagccaccgccacctggctccacctcctcgcgccccgcctcgcccacgacggcgtcgtctacttcaggaacaccatgtcccggaggcgcctcatggcccctcaccgcggccttggcctcgcctccccctccccgaccttcgagctcccctgcttcgccaccgccgccaagctgtggctccgcctcgagttcctcaacctggagctcccccgatccggcgtcttcgcccacctcaccgagatg

SEQ ID NO: 9780 - DNA, 11608 bp, Oryza sativa
ggtcattcgaccggtcacagaccggttgagtgcattgcacaccgcattaaatgcggcgtggcgcgatgactcgggccgccataaatgcgggtaggtgggcacctggaggcggacacttaacccaccgtacatggtgacctagagaggatgtcgggggagcccgacccctagtcatgggagggggcggccgccgcccgacctcgggcccgatcccccctcggggaagggccacgtggcgcctggggcagccttctccctctagtctcggccagggagtggccgccgccccacctcgggcctgactcccctcgggggagggccgcgtggcatcggggggcagcctcctccatccagtctctaggaaggagtggccgccaccccacctcgggcttgattcgccccctcgggggagggccacgtggcctcggagggcagccttctccgactagtctttgggaaggagtggccgccaccccacctcgggcctaactcccctccgggaagggccacgtggcatccgggggcagcctcctccgactagtctttgggaaggagtggccaccaccccacctcgggcctgactcccctccagggagggccacgtggcatcgaggggcggcctcctccctctagaactgatacccccgggcccatatcaccgatagtagcccccggcgttagccctgaccaaaacttttcccaggtggtcaaggttgacgccactctcctagtgtgatgatatgttggcccggtctcttcttctttctttgctggcactaggacccatgcacctttttcgccccagcctgagggcgactcgccagctcgtaccttaggctgtgaacttattttctgtatatattcagcaaacgttgttagattctctcgggcccgcgacctcatgtcgcgtacctcgcttgcccctgcctcttgttaacctctgttcgtgttctacttcatctattcaaccgattattttagcgtgagtgtgaggactgaactttccatagctagcaatcttcacccgcgatcaagctaagctgggcaccgtagccagctgacggggccaaagccagccgctacggaagagttagcacaaggggccccaggcgtcgacggtacccaaagctcgatgcagggctaggatagagctaggaatcgtagccaccacacttgtagcaaaaaatcgtttggatggataaagagaatacaaactttttgttaccaagggaggcaagccagcgcgtgacacatgggtaccgcgggaccgcgaggaagagatgagagataaatataagcaataataattctatgcaaatgattatcttcgcacgagtgcgaggactaaattttccatagccaacaatcttcacccacgatcaagccaagctaggcgctgtagccagccggcggggccaaagccagtcgctacggaagagccagcatagggggccctagacgtggacggcgcccagagctcgtcgcagggctaggatggagctaggaatcgtagccccccacacttatagcaaagaatcgcttgtacgaatgaagcaaacacaaaccttgcttgcatgtcgtgacctttcaaaccgttagctcgaagagggcctcccaccatgggttcctaaccatttgggaagcttgcgaccacttagcaaacgctgcgaccacttagcaaacgaggtcaggttcccatgagcctacgtccccacgctacacattctgttcgctctttcctttcggtggcctccttccaatctcttttcctcccacatggacgattacttccgcacgagtgtgagagccgaaaaactccagagccagcaatccccgtccacagttgagccgggccaggcaccgtggccagccggtgggaccaaagccagctgctacgaaagagccagcacagggggtccctggcttcgacggcacccagggctcaacttaaggctaggataaggctagaaaacttagcccctacacttagtgatgaatcgttcatgtagatgggagaggggttgggctcttaccaccgagggagcaaacaaatgcgcaacacgcgagcgtcgcagggccatgagagtagaatggggggaaatcaaatataagatttcaagctgatgaattgaaaaattgaaaatacttgaaacttgacaggatgattagttgagctaggccgggcaccgtagccagccggcgggaccaaagctagccgctgcggaagagccagcacagggggtcccgggcttcgacggcacccggagctcaactgcaagagtcctcctaggagtagaccgaggcaagcagcaggttcatgagccaaccccgcgcttggcccctaagggccatgggaaagaagctcgccatgacctgatcatcgtgcagatctagagggactcggaggggttgacaccgccgttgtacttctcagtgaggctaggccagaactttgggggctatcggacattccgaagactcgccataaaagcctggccgctggccttttccgatgaggatgtggggggcctagccccctgcctagggtggcgcgacactcctgaggaggctgcgccttcccctgcattggcgccgtgacgctcgtcacgccggcgctcgaaacaacctcaaaaatcacgaacgcgccccctacctggcgcgccagatgtcggagaatgaactcctccaccagggaaccgtgaggcccccctttgtgagttcggctgggggcagcgggtgagattcgagggcttggtgagtgaagctgtgtcatcttgagggagttatccccctccaagatgatgagacaaaaagagtttatacaggttcgggccgctgagaagcgtaataccctactcctgtgcttagctgatcttgtgagaaattacaagatcttcttgttggggtagaaggtgttgatcatcaggggctccagcctcccctcctactaggcctggacctccttttatatcttaaggggttaccacatgggccaaaaaacacaacttagtggagaaggattacaatctttgcattaaatgcatgtcttatctcttgacttgggaagcaagcgcacgtcatcttgatgacgaggcctgtcaaatcttgccgcctgacacggggggtgcccctgtcagtcaccatttaatgggtggggacttctgggctcctattacaccgggaaacgggagccttgctttgaccagagcgggagaaccgactttggctgggataagaggatgagaacctctcaccatcattatttgatgggacatgtcaggctgcacgtcgcctgacacacgagcagtgcacaggcgcactaccccagtcccatcggtcattcgaccggtcacagaccggttgagtgcattgcacaccgcattaaatgcggcgtggcgcgattactcgggccgccataaatgcgggtaggtgggcacctggaggcggacacttaacccaccgtacatggtgacctagagaggatgtcgggggagcccgacccctagtcatgggagggggcgcccgccgcccgacctcgggcccgatcccccctcgggggagggccatgtggcgcttggggcagccttctccctctagtctcggccagggagtggccgccgccccacctcgggcctgactcccctcaggggagggccacgtggcatcggggggcagcctcctccatctaatctctaggaaggagtggccgccaccccacctcgggcctgattccccccccctcgggggagggccacgtggcctcggagggcagcctcctccgactagtctttgggaaggagtggccgccaccccacctcgggcctaactcccctccggggagggccacgtggcatcggggggcagcctcctccgactagtctttgggaaggagtggccgccaccccacctcgggcctgactcccctccggggagggccacgtgcggcctcctccctctagaactgataccccccggcccacatcaccgatattattatttgttttgttataactcgatttatcattaaaggtaatttaaatataacttacattttcacatattttaaaaaatgaataaggcaaatggttaaatatgagtaaaaactaacagtgttatatattaaaagttggatggagatgcagctgacagtctgcagttgaccactggtgtgaactttgtagtagtactactattactactaataataatatgtgcttaatacattgctttttgatgtatggaaactgcaagtttaacatgcagaagattgccggccgtgtcataatttatataatcaaatataatctactaattaagcatgggtcatgatgggtatgggtgtgtctaccatcattcattttcaggtggtccatgtgtgactgtgattctgtggacattgtcacatgtgttagcgagttgtaattttctttctaaaaaatgttagtctcacgtttcgctttcactataaacagggctaatgacattcgatcttaagaaaatgttagtctcaaattgctacgtccatgaggctttactcaagcctgtactatacaatacttagcttatactgtacatagtttcggaggataattcctaagttccaaatgttaagcaacctcttccaagagaaaatttagagaaaatttacagtgcgatataatttcttagggaaaagatagaggggagtttgcgtattaattagaggtcctagaaagcaagatcctagatgtatacgttttcggacggaaaaaagaaaaaaggataaagttgattcccatatgaaacatcaaagttgtttcatgtacaattcttacatcagaagttactaagggcatgtttcgaggaacttcaagcagctacaaattctctttaaatcaaacatttgagatttttgctcagattataagaagtcaaaagctaggttttctagcttttcaaattctcaccagctgcttctcagaattttagactcattccaaaacagacctaactatatatgtctggctttgtatcctttgtatctttgtgttatcacatacatcaaactttcattacaaaatgaatgatgcaagtgattttttttctagaggatgattcatgttccaaatccaatggtgcatatttagatgtcatattgtttcacctataaccgattataaacggttacacttattagcgaaaaaaaaggaaaataaagtgataaaaaccttcaatccatttcacattggagtctgaacaactgaacctgcatctgaggacctaggatcattctgtaatccattatgatatcaggggctttaggggaaaaaataactaatctatccaaacgcaccaaagcgccctgcttcctttccccacacacaaaaaaaaaaatccgcaacagaaaaaaaagaggaaaaagagaggggcccatgtgtcaaagttacaccctaataagtataaaaaaaagaggaaaaaaaacaaaccgcaacagaaaaaaccgaaaaagagaggggcccatgtgctaaagttaccacacaacacaagtgagagagagaaaacgagtaactaatccctccctcctctcacaaattcacaaatccatcctcgcctcgcctcccacctctcgttcccctccccttccccggcgaccggccgccgccgccgcgcgccgccgtcatggggtcggagcgcgcggagctggcgagggtatgcggggggcgcaactggtccaaggccatccgcatcctcgacgcgcacctcgcccgctccccgtcctccatccacgacctctggttagtactaatgtctctagtaatctctcgctcgccgatccgcgggatctctgatctggtctagggtttgtgacgcggattcgtgcctctctctcgcagcaaccgggccttctgctactcccagctcgagctccacaagcacgtcgtcaaggattgcgaccgcgcgctggagctggacccggcgctgctccaggcctacgtgctcaaaggtttccgtcctcctctgcttcccttgcggtttcctccttcattatggattgccgctactacaactcatcatattcgttagctggttcgtattggattcatagcattgatttgttctgttactagtgtagtgtttaatcaaaaaaaatattttctggtttcttgattgaagaacttattacttagttatttttgggatggatggagtaggtcataagctcaagtatcttggatgaatgttctttgcttcttgaatggaacaaagacacgcctttggttagcagtacaaggttaagttggactgctgaattgaagttgatctctgaccaaaaatatcttctttcaaccaaatgatatgagtggaaaaatctgtctctctctagccagcttgagtatctttgtgtcttctggtctctctggatcaacttttcagtgatgagaaagaccgcatctttactgacaaatccattaaggccttaacttattatgaacaaagtaatgaaagcgtgccatcctaaacaagtaatagctataatgttccaggaaaccagggtgttgagaacttgagcttatctgaacttttgattcatgagcgagctagcattgaatgcccttttatctacttctaatatagaaagtttaaccctccttgcaaatgctaatgtttatgttgaagtgacaataatttctggtgtagtgcaagctagctttgaaatgccattttaccattctgcggtagttcttttcttttactttagaatgggcaagtgaagtttctttgtaaaccttgttgtagactcctgcaagggtatcatagctaacttttgaagataaaatctagtctttaggagtatatcaagatttcatttggttcatatatatgcccttaatttcacagtacaagtatctgcagatagctaacaagacttatttgacatatgctgatagttttatgttttgtttaagtgcattttactgtaaagaacatttatttttaatagatgagcatgaagcatgcccctgataactgcttgttgtgcctgtctggtagggctcatggacccatgaatattggagttcagtgttctcatcagcgcatgcaactgatagaaaaatgtagtgtgagtgcgtgactatattgttattaggtatagttcaatgattattatttattctatcaagtaccttgggagtgaataatgatgaccaggcagggcccgtggatttgatatgagtctgcattatatatgctttctttcatttctgaatttttcttttcttcatgctagtatctttacgtgtgatccaagaacacctgaatgaaaaaaaaaaatctgcaatgagacttacctagacagtgacccatcttttctataaccagatactcctttattgaggcaaatgcctctagcaaactttgtatgatgatatatatttttggttcaggcaaggcattgtctgcattagggaaaagagaggaagctttggctgtttgggagcaaggacatgaggttgctgttcgtgatacaatggacctgaaacaattgcttgagttggaagaattggtttcctctgttaaaatctgtgagacgatcgagtgtgaagaccgtgtcgtggatgcatcaccatgtgataccaaagttgttatatccgaagatcgtgttgttgacacatcatgcactgcaactacaatggctgatacaaaaactgttgtttgtgaagaaaacatcgggaactctggagttatatcgaatggtgctgtgatattggctaatgataataaagcggacaacaataaagaatgcagcagtccaacaaaagatacaacagggacacatcatactcccaagaaaacaacaaagccagataagaaaagcaaagcaaaaggtagaaaagaaataaacagccaaatcgaagatgtggcagatagcataagttccggtgaaactgtagcagtagatcaaacactatttgcttcaaaaatatcaaaatcatcaaaatccataagcttggatttccgcctttccagaggcattgcacaggtacattccatttgttataattctgactatcggtttatcaaatagtatggcttcggttagtatgtactactctcagtaaacatttgaataaccatgttcagatggcacattttgcatttaaaacaattgcatttttttaccctagaaacaatcgttagagtttgacagcctgatgttcaaggttctaaaagtatctaggaggatatgttatactcaatagtctgactattatctctgcacaatacatattcaggtgaatgaaggaaggtatgaccaagcaatatccatttttgatcaggtatttgtctaatatcagttttttttgggcgtatttgttgtaattggaaagggagctgaaattttgcttgtgatctctttagatactgcgagaaactccaacatatccagaggcactgattggaagaggaacagcttatgcatttcaaagagaattggattctgctatttctgacttcaccaaggttgaacttttatatgcttaactctttcctttcaagttgtgtaaaaatgaccttgtggccttttcttgatggcaggctatacaatcaaacccatcagctggtgaggcatggaagcggcggggacaagctcgtgctgctttaggagagttcaccgaggcaagctcgctgtagttgtcacaatatcaacactaacatggattcaatattgagaaaagcagtaggggttatctaaactcattaattctgttcttttcaggctgttgaagacttgactaaagcattggaatttgaaccaaattctcctgatattttacatgaaagaggttagtttctttaccgatggttgaatctcacttcgcatttacgcttgattcgtgcaccctagtaataaagccatatgtctagactgcaagagcatactgcctactcttgtattctgatagcatatccttgtggtaggaattgtgaacttcaaattcaaggactacaatgcggcagtggaagatctctcaacatgcgtgaagcgtgacaagaaaaacagttctgcacacacctacttagtaagtaaatgggtttccactgaaaaatctgttttctcctgctaggtttggttacccacaaacttcaagttctctcatccaataaccatatggaaatattttccttatgcaccaaaacagcactttattccacttttccaccatttttgatacaataattttgggattatccattggatttcttctgtagggactctgccacttaagtaattaacacaggatttgtaatttgactaagttaacttgcatgctaaaaatatgttaaggttggaattaaccatcttaaatgacatacaacatttaggaaatttgccatgtatttgcagagtattaatcttcttattgcttcagggactaactctttcggcacttggggagtacaaacgtgctgaagatgagcatctccttggcataaaatatgatgagaacttccttgacagttgggctcacctatctcaggtgagttctgttgtcttatggacgtgcaattccatgtcttatagtttcttctgtcaagttatcttttgtacacattttcattcatgttaatatttctatacacatacttgtgtcaagtaactgatatttggctacttgggtgtcttgtgtggtagctttaccttgatataggttgtccagagaagatgttgaataatgttgagaaagttcttcaaattgatgtcaggtaaatttcatgtatttggtattccttctttcatctacgtgattggcttatttatttatttgcccatttatgtatttttcttgattgcttctagctttggaaaagcataccatctacgtggaattctctaccatggaatgggtagacataggtaaccctttctgctgttgcttatttcccatggtataataacatgaattctgtaccatggaatgagtagacatatgctacctctctacatctacatttttatgtccacacttattttcatttacttctttttcctgtctaagtcatacatctatgacatattttcatcatttattcataattgttaggtccctttagtttagtgggcatactgttttatgtcgatgtgattactgataatgaatttccaagcgtagttactctcctgttagtgccatagtatttggtgtctagtttattagttaatggccccaagattaatggggcatacagaccataaatgtgatctagttacgtagaagctgccatatttaatacttgtaaacttttacatgatcttgagttctgggtttcctgttttattaccaacttaagctagaaccagaaaatgtcttggttcatattctactttagcctatttctatgcgtcttctgtaaattttacgatatgcatctggaaatttggttctcaactcaaatgtaacatatatttacttgtttgccctcccacattgattgcttttattggcttgggcaagtgctgtctgtcctagttcctgtctcaaacttgtatcttctaagctccccttaaagctaattttggttttgcaggagtgctatcaaagatctgtcggttgctttaaaacatgagagttcaaatatagagtgcctatacttgcgtgcctcttgtcatcatgcgattggagagtacaaggccgcggtatgttactgtttaatttagtgaaccggcaaatgctaatttaaactttattagggatgataatgattgtgactgctctaaagctatcattctgccatcagttgcatgactgcatctatgtctattttgtcatctatactagtatatactactacattttgcgcttttttaacaaaaaaaatcctttttcctttgaagatcaaagattatgatgatgtcctcgacttggagcttgactccatggataaatttgtgctacaatgtttggccttctatcaggtacataatttattccctttcaattgctttttccatggagcttgttccttatgccaataccatgaattccctggtctaaagatctgaaatccattcgaggagatgaaaaggaatataggcattgcatcccactacgactagagtatcaaccctttctttcgccttagaaatccacagaaagtttttaaagctacaggctatccataattaacgagcttataactacagtattagatacctatatttcattaggaatgcaaatctcacatcgagtccaaaacttactgtgattgttaagttatcttataattttgcaaacggggccaaagttttctttacataactattgttgatctctcgcaacaactagcactagcatgatgcataatcaaaacttttgtctgtttgcctcagatcaagcagctttatttgaacacaagcacttctttatcttggagtcttggactcccgggttctctactaactaacattatcttctgttctatatctggggtcatgtcattgtttcttttgctactaaccctggttttcttgcctgatattccttgcagaaggaaatcgctctgtatactgcttcaaaggccaattcagagatctctcagtttaacattgatgatgatgttgacc

SEQ ID NO: 9781 - DNA, 5959 bp, Oryza sativa
ggcaccggctgcccacgcagagctgcagcgtgcccggccgcggctcggcgccgccggcgagcgcgcgggacggcggcgtccactgcacccccattgcgacggtgagcccggcgccggagcggaggcggcggccgtggcgccaccgcgtggagaacacccaccggcgcgccacggcggggcgcgcggtcacggtggcgacgacgcggctggcgccgacgcgcacgacgtaggtgtcgtgcttcgtctccgagcgtcggaggcgcgccgacacggtggtcttctgccggcgcgcggcggttctcgccctcttggcggccgtgtcgccggccggcgcgtctcccggcctcttgccggccatggcgcgcgcggcgaagaggacgccaagagacgtcgcttggtttcgcaggcaggcaactgaacaagaacgagaaccaaacacactgaagaagaaatggttagagacagagtgtgtcacaaactcacaattcacaccaccattataaactccataattacgtgtaaataactggcgataactaccccattaaccccactacgcccagaattatgcggcggtaaatttgttcgccggttgctgcatgcaaaactaccacaaggattatctattaaaaaaaaaaaactaccacaaggatatcaatcaaactggagtggctgccaaagaaaacagggttgccagaacaccagttgcgtctgtgatcactgaatagaaacaagtgaaacaaattgtgctcatcatcacaggttcatagcagttggccaattccaaattagtactatcaagcaagcaatttatatagatattagcagaatcaacatatgttcatccaacaagagtatgaaaatctgggactggcatataaaactcatcatcacaacttcatattaccaccaagcaatccctgcagcagcattgtatgtttttaggcatcatataagaagaaggatctgaaatccagtagtagcatatactacaagaaagattaaagatgacatgaacaaaattcacctaagaagataaccaaattggccaaagccaaaatcacctccatcacaaaacataaggagcagatataaatccttcctaactaaaatcccttgcttatcatcagtatcagcaatgaaatgtgggtagaaaataactagtagaaccctccacttgtatcataatctaaaagctcctcctcatcctcatcgtaccaatcatcttctacatacccgccctcctcgacatcgtcgaacgcctgactgttcccctcaaatgcttcatacccaccaccaccctcatcgacagtgaccgtgccggctccggtgacaatgtcatcttcctccaactcctcaagcgtggccactccatttctgacaaacatttcttcagtgccagccatgtcgtagttctcaacagtcagaattccaatgctgctgtgctcgttgtagctctgaacagtcagaattccgatgctgccagtgttgccattgtagtcatcgtcgtcgtcgatgtcgatgttgagagctcccatccccaggacgaagtcttcatagccatcctcatcgtccgacgagagcagtccatggccgacgagctcgaagtcatctgaagagaagacatggtcatctgaagcatagcttgatgagtggatcatggagaggccatcgtcgtcttcctcctcaatgtccgagtccgacgcggcgacgcgtgggcgcacgttgtccgtgatcttgctgctgtactctgactctgacgcgtcgtcgtccacggcggttgctaccagcgcccagtgcgtctgagcagcagcgggctcggcgcgcgcaaccgcacggtacaccggtggcgccacacgggcgcgcacgggagcgtggcgagcgggccgtggcgcgggggcggcgagcacggcgaccgcgcggaccgagaggcaaagggtggtggtagacgggcgcgcgcggagcgggcggcggcggcggcggggcgcggaggacgggctggcgcgcgggcgcggggcagagatggacggcgaggcggaaggcgaggtaggcgtcgacgcaggcgtactcaacctgttcgatggaaaggtagggcgcgtgccaggcgctcatggagacgttcgtgggcttggcgatgccggggtagccgaggaagcgatcggccatggcctccatggaggcgttgcccatggcagccacggcgcgcagctcgcgggcggacgcgacgtggaggtcgtagtaggcggagagcatgcggcggtcgttggaggcgccggagccgacgaatgtgatgcgggggtcggcgaggaagcggcggagggcggcggggatggcgtcggcgtgggcgaggtggaagacgaggcagcggtggccgacgcagagctggagggtggccggtggcgggggaggggagccgcggtggagcgggcgtcgaaggggggtccactggacgccgaggccgacgaggagccgcccggaccgaagaagccggtggtggagccagcgcgtggtgtggacccagcggcgggcgtaggccgggtgggcggtgacgagggcgatgacgcggcggtcggcgacgtggacggtgtaggcggcgtgggtctgggtggagcggcggaggcgggtggagacgcgggtggcggcggcgtccatggcggcggcggcgggaggaggggagatgggcgagggttttgggtgtcgtcttctccgcgtctgcgtggttaagttgcgaaaacctcgtggttaggcggtttcgctaactcgcttcatcatcacatacttggatatgagattttttggttcatttttggcacgcttttagatccaagattcattatggatttagatttaataaagttttactattttttttctctaaatagagacagcatggttcatccaaaacttatgaaagtaattttagatctagttaaattatctttggatttggaaatataccaaatagatacataaaatgatttaaaagatatttatgctactcttaattagagattgtttggttatccagaattaacgtggaagtcattaatacatactatccatgaagcattgagaattttacgatcttcctattggtataattgaggattttgtggtttcacgccttgctggaatataagctagtgtcatatgagacgtaaagtcttaatcatatcggtatcgtataaataacttaattatcaaatagattatcatattctcttatattcagtgacggagctaggtttggaggagaggaggggctcagccttcttcttcctctttcagcccccccctctctctccccctattttcttcatcctctccctctttccccccctcccgcccccacgctggctccgccgctgcttatattaggtcaaaatttaccaaatagacgctaaaaatgatttaaaagatatttacgctactaaatagagattgtttggttatccagatttaaagatatttacgctaatcctaggaagcatggttcataatatcgataaactatttttggttaatttcgaatgaattttgacaagttttaaatgaaattcattaactctcaataatcgagatgcacatttcgagtcggatcaagatgatagtcgaggttgtgaaaggtacaccctagaatggagctagtcattaaaataggttatccacaaaggttgagaatttccgagacatgtttgcaattgaggactcattgagtccttttctcatactccgtataatggccttgttcatacgtggctcttatcccgtaagtcaggtataaattcccagttatcagtttcaccagaaagaaattcaattatcatttgtcaattagattacggaattttcttagtattagctcaatttttcagtgttcatgaaaataataaatcacgttctgatgttcatgtctatcaaaataccggggaaggcgcaaggctcatcgtacgaatgctacgacaacattttaccaaagcacattgcggcttacaactgtaattaatctgctagtctttttttttttgttcttttcttttgaaaactagagcacgtacaccggtacacgtatgcacgacaatacaagtgtattcccttttttatacatcttgacattttagataataatgatatggtgtccaaaatctatttatgactatgtttttaaatatatttttatttttgctatagtactttgtaagacaaatctatataaattgttctagttactttaaactaaacatttttgaaagggagtagctatatttatggcgccatatttttcactaaaaaatagtcggtatgcatttacattgtaagtccataaattacatatgtaattttagtgtatttacaatgtaagttttaaaattacatatgtaagtcaaaaaattacatatgtaattttagtgtatttaccatgtaagtctcaaattacatatgtaagtagatataaatagaagagatgctagtgcaaattcaatgggaaactaatgtataataggagcaacatgttcgtagtacagagagatcaaataactagagacttagcaaatcaaacgttcgttaagtcaagcattaacagtgcaacacgaatctacatgatatccaagggtcaaattaaccgactgtgatcaagctaattttgtgtcgccataaatatagcattgtccattttgaaattattgatagttataagagtttcaccctattttttaaaaaacattgctttttcaccgaaattaaatggagctagctggttagctgcgccctgagtgtcatcttctgtatatgacgaaaaggagtcgggctttttataaggggaactgttttaatccctcgaggggatatcctatcgttctttgcatgtcacttaaatggttatgaaaaaatttgaaaaaaattggaaaggtgtattaacatttgatataacactttacaaacatgcaagttcaaattcaactttacatctcgtaacaaaaaaaaacaaattgaaccggagctagttaacgtatattcagagtcaaatttgttttttttcgttgcaagatgtagaagtagaatttttacttgcatgtttgtggagtgatatatcacatattaatacatcttcttaatttttttttaatttttttcataaccatttaagtgatatgcaaacaacgaggggattcccctcgagggattaaaatcctcttccttttataaggcctttgtttgtggaggcctcgatcctagaaggaaaaagtacaccgaaggtctctcaacttgtcatcgagttacaaaattgtccttcaaccgcaaaaccagatatcggacatccctcaattaacaaaaccattcgcttgatgtctttcggtggtgttgaccccggttttgtccgacatggcagctgagtcaacagcgggacccacgtgagccccacatgtcatactatccacgtcattcttctcttttcccttcttcagcaggtaggcaacgccgacggggccgagacgggtggcagtgcgaagctaagcagggggcgggcgccaccggagttgggctgcgacggggcaccaacagcagccgccgccgccgcgctcgcctgccacacgctcgcctgctgccaccgcgctcgcctgccagacgctcgcctgctgcgctcgctgccacacggacggcgatagcaggagcggcgagtacgccgccgcggctagcttcttggccccgtccctcggcggcgggatagccttcacgatgagccaagtcggcgtcggcgccttgatctggtggctgtggtggtggtgaagcgccgccatggacatcaatcgatgggggcaaggtcgacggcgacggaggcgttcttgcggagggagcaggcgaggaggagcgggtaggaggacaggtcgtcggtggagaggcggaggacgaattcgagctgctcctggagcacctcgagggaggaggggagctcgac

SEQ ID NO: 9782 - DNA, 7851 bp, Oryza sativa
cccagcattttttgcacggtatggatagcgcaaagttgtagtgaggccattcatctgtatatacatgagcacctggcatgcactgccaccacatacacaatttccatcccaatgattgcaatccaatatttgttattcagacaaagattgtaatgttctagtttacatgaagtgcacagactcaacactaccgacaacagcaaacagaccgcaagtagctgcaaattcagaaagttagtggcaagactgttatttagtgcacataatattgtcatattaaaacgagtattaaattaagaagtagtagtatgtatggtttgttcacaatgatatatgcctagtttataaagaagcaaagcaaaattctttccacttttcatttttaactctaagtgaactcactttcatttttaactctaagtgaactctcatatttctatgcacattaatccacaaacacactaaaacaaacagtgatatggcatgtttttctatggacaacttcaatgttgtaaagttttcaactaatcttgattttcatgaaatgaaattataattcttatagaagtattgcgaccttagttatttgtggatcaaacatgttgtatgtttttaactaatctatatctcctatggagatgctgatatcttgtgttgttgaacaacaaacttctcttagtgagtggaacatgtaaatggtaattatatactaatttctcaaaaaaatatgatcccctagaaagcaccctcttagtgagtggaacatgaaaatggtaattatatatattaatttcccaaaaaatatgaacccctataaagcaccccttgggggttatttataggtttacaatccgagtttccaaccctaggattggtggccttttacctttttttttttacctttgatgagatatttacagagatatttttttctttagccctcttaattggcccatcggccttaatgtattaccctttagtagcttaactaataataatatctaaaatgcatgcaacatttactcaagcataactcaatgccctttgctactagacaatccaatagacagatgcaaatgggcatttatatgaacttgtactactatatgcaatatagctaatatgtgattcttgcatcacaggagggaactgttttttatgataaacaatcaacttcatccatctcccaaatagacaaatcggcaatagtaatattaactgacctgtttgcttgcacgatttctacttggtctccctgccattgaatcaaactttgatgcattgttgatggaatgcaacaattagcatgaatccaataccttccaagcaacaagctatatgatcactttccatcaatgatagaaaattgtaggaatagtcttgctccccactgttaactccacatttaatactcccttggcatctgatcaattcccaccaaaatccttgagtactatgttggtcttgctcaaatcttctggtgtcttctcaagcttccgataagtggtatatggcatcaaatttactggaactcttccatcaaccaacatctttgacaacggcttcccattgacaaagcccttaatatacaaaggcctaagatgttgatgcttagtttcttcaggcttctcaaatattgcttgttgaggtgacaacactaactacgccattgatacttcaacaacctcctcatcggatgtggaaactttatattctgcaggcaaaataaaaaccatgtttatagaggacgaagttcctgcattatcaatcttgacaattgtaatcttcacacgccactccttccttggactattcagttgatgactaatttcttcctccacttcttgcatctgctacctattcctcaatctttgaactcttcttttttgatttttagtagaagtttcactaggacaccattgaggttactgccctttctcttcatgttcttcctcttcatattcaaaataatcttcatggatcggatccaattgctaatgaactggaagcttcttttgaatcagttgatgtgaacttttcatctcatatcggcgagaagaattctcctggtcataagctatctctccaccactgcaacccgaaaaatcttcggtaacctcatccccttattccaacaaaacctgaagaactcacagtcccaatgtgggtcaaaacaatatctatcatcttcatagtagttcttttcttgcctcttctgatatttgttgatcaaacttgttgagctaaccttggtccgatgaattaccctgttattttttccttcagatcttcagggatgaaccatatttaatggaaaaagatgtccatcgatcttcatcgactttttactatcatcaaatttgactttcctttgttctatagctgattgtatctgttgtctgaagactttgcgctcattagtatgatgagatcctgtattgtgccacttgcaatattttctccttttcaactcctcgactgatggattcatgtgattctgaggcaacacgatctgtttctcttgcaatagaagatcaaatatcctattggctttgttgatgtcaaaatcaaatatttcctcatttccaatatctttaacccattgaccaacaactgtcatttttatcctcgcccattctatcaagctaatatctggatcttcatcttgatctgagtcagaagcctaattccatacattgttaacattgttggcctttttagtaaatttttctgtcaaagacttctggaagcgttgtttaagagccgatactttttgtactaaatgagccaagctttcaaaagcaaatgaagaaaatttgtctttaatcggcccccaacaattcctcaaattagccaactgtgaatcaattaaactcggagtataacatctactccttatatctctgaatctatgaataaaatctggcactgattcatcagatctttgcttgatcgaagtcaaatatgatagcttcatctcctggactccagcaaagaaatactccccctattcacttttgatcatcatattttcaaaaaaaatcatatttgatcgtcatattaggtggggctatggcagaaatgcttcgtacgatgcatcgcatgtgtgccttgctgcttcattgatagaaattttgtttaagcatttaatgcagtcacaaccaaatatgatgataaaaaattaaccccccgagggggggtacttgtgaaactgcttttccaaatcgacccaacctctgatagaattaggtggtaacgacgaaaaccatgtaaacggcgatctagataaagacaatggaaagaaatggtgtgagatcagttaagacaacaaaagaaaaaaatgtaagaaaaaatattggaaactcaagacaggccatgacaaacctagagtatatgcattatgagtttgcaatcctctacataagataaatctggttggcaagcattcagtttcctcccataactgaagctataaaacaacacccaaatactcaaggttaattaactaatatggcaataaagcagcaaaagtaaaataataggaacaatagtgaacaaagaagctgcacagcagcaatagttgtcacatggtatgcaccgtgcatagcaaaatagggggcattgcaggggacaaaggagagagaagttgacaagaaaatttgttggacaacaaatattagccagtcaatctagcagcaatcatgttctaactcgtcttcccttcaatgagaatgaatcttcaaaaaaaaaagcttgctccatatccctattccttaaaatcatcgtatggctctatcggacagcaaaagcatatcaacgatacagagcagaacacaaagaatgaggggacacgaagaaaatatgcagagagaggtaaagaacattcctcgttaggtggaggaagcagtaacgtggtgggtactgataaccttagcaaagtcaacccgtcgaccctcgctgccattagccaggcagaagcgaccaactaccgccacgagaacctcgcagcgaagatagaactccatggcaccagattaagtctcaactctgatctctggtagcacgccaccagatcgaagagttgtacattggattggccattgagctctgctccaacggatcgaccccctcgctgtcgtgttggagcacctcgaaaggcaggaggcggcgatgtttgggtggcaagagggagattgagaggagatgagggtgggaagaaagacggtgaccatcgttaggtgccgtgggaaggcaggtttttcgatttctctcctcaactggaatgagcaagcctagcctattactataaaacaaagtgtaaattgcagcacatagatttttttattttttggaacggattgagtacctcagaagcctagtggtgaactggtgatggatgttccatcatgattagcaaggccctgatgaaaatttcaatcgcacaataaaatcaatcagtgcctttgcattgggaatttgggggtgacatgacactataggagaaggcggcttactccttcacgcaggatcttcatggcgaatgagctgagcaattgaagtggcattgcttctcccctctgactgatcaatggaagatgagattgatttagagaccgagtttggttaacgacacgaccacgccgaattcatcaggcaagcaaatcatatatgcaactgagggataccgaaatccaacaggagactagggaaactcttttaaacactccatccatttcttgcatgtgaattaaatagttataaaaaattcaaaaaaataataagataaattaatatgtgactccacgaacattcaagttaaaattcaaactctatcccaagagacttgcgaggataacctacctgcgtcggtggagccaccgttggggacaggcagttggctgctccgccggccgccgacggcaaagctttgggcgcggcagcgccgcgtcggcgtcgagtcgatcgcgacgggacacgggagatcgatcggtttcttttgtgattttcccttttggtggaattgggctgggtttgacgtcgactcgatcgcgacgacacacggccacacgggagatcggttcttttgtgtagggatagaattgggccggattgatcggtgggccgatgattggcccttttgaaattctatcttaaggacagttgcggcccaccctggcaccctgcctcttttgaccgtagaatttctcttcttttattttttttgtgggggatgggcacaatttactttgcctctcatgtttggttcagctagattgtggctgtacagtcgtagtgctgcagctgttctagtaggaattcgcttgctaggttctgctgattgtgcaatgctgtcacaactagttatttcgaacatattcatacacaagtatcatatctgtcgatgacgagatatctatgttgattttattaatctcaaaatataccagtctaatttttcgaatgtggttataagaataaagtgtgtatgtgtgtttataggggtatgtgtgtacgtgttgtgagcgtctacatgggttatcatagtttctaagagaaaaaacatcatgcaccataattgagcctgtagaatttcttgcaaaatttctgtcactgttctcttttccactacaaggtgttagtctcgcttgcattgccgggcaaccttgtcgggccatgcatcgaccgatccttgcagctcacgcaatacgcacgattccatccatgtttctcttaattatattaatctctccaactaataattaattaattgttcatgcatgtgaaactcaaagccagaaagcgaccatgtgtgtatatgtgcatgtgaacagtgaacacatcattcgtttggcattattattagtaagttaattacgtttctcgattcgatcacggatgaaaactaaaagtcgatcgatcgatcgatcgtgctctttatgaaagcagcacatatgttgatgcatggacgaagttgcatgcaactagctctatggcctatggtgaaataaggctggataatgtttcagacaaagaaatgcccttcttcaaagctgattgagaaaaacaccgggggttttcggctagctccacaagatggtgggctagacgatccgggttcgaagcctcacctcttttaatcatttgatattatttgatattagattcttccctaatattcacgaatcaaagctgatcgaaaggatgggattattcttgccttgatggcaacgaaactgtctttcttagtttcttttctccatgaaagaaagcacatcaagcatgcatgcagaatgtaattaattaattaattaattaaggaggccatcaatcatacaacctccagatataagacggatgatcgagatcatatacatcacacatgtacggctgcgacgattacagttgcagtgaatgatctggctgaaaccgatacttcggagacacaacaaactactcctttgtaagttaaacaattctaacttaaccatcatgttctaaaaatctatatatttttaactgattatgcttatacatccatcattagaaattcttttatgatatatagttcacatgttattaaatttttaaaatttgattattaaagttagaaatgtttaactaaaaacataaactaatttaagacgaaaggagggagtacactaatctccaaagttatcatgggttaattctagctctactgcttgtaatttttttttgaggtaacgggaaggagctctgccatctgattggtaatagatgcagcaaaagcaacttaattagcggtttacatattactgtttgttgctcgatgacaaagagatgagactgacactgactccgtgtttagctgccatgtgtgttttaacctttgtgttaattacttcatcgtaccaaaagtcaatagattagttggatgagtgcaacctacccccactagctgaaagccaaagtgtggtacggctagacagcagacagttggacaccagatgaaaatatatgacgatggcacctttattttccctatctacttctgtaaaaatgtaaattagtctcagagctctggaaactaaccaaataattaacctaccactagttaacgtttaaactctacaaagtcacaaagctgctgctagacggagcatattactacctccggttttcagtaggtaacaatgctaactttttaacacgtgttttattattcggcttattgaaatattacgctattattcttatttgtcggagaataaactcctccaccagggaaccgtgaggccccccctttgtgagttcggccgagggcagcgggtgagattcgagggcttggtgagcgaagctgtgtcatcttgaaggagttatccccctccaagatgatgagacaaaaggagtttatacaggttcgggccgctgaggagcgtaataccctactcctgcgcttagctgatcttgtgagaaattacaagatcttcttgttagggtagaaggtgttgatcatcaggggctccagcctcccctcctactaggtttggacctccttttatatcttaaggggttaccacatgggccaagaaacataacttagtggagaagtattacaatctttgcattaaatgcatgtcttgtctcttgacttgggaagcaagtgcacgtcatcttgatgacgaggcctgtcaaatcttgccgcctgacacggggggtgcccctgtcagtcaccatttaatgggtggggacttctgggctcctattacaccgggaaacgggagcctttctttgaccagagcgggagaaccgactttagctaggataagaggatgagaacctctcaccatcattatttgatgggacatgtca

SEQ ID NO: 9783 - DNA, 17023 bp, Oryza sativa
  unsure (1)..(17023): unsure at all n locations
cataacttaatctcaaacttgattctaattatatgtctaaattaaacatatagctagtagctagcatgtccagattcatctctagaattggactctttttgggatggagggagcacttatatataacaagactattgaatagtctcacattggttatgaaagggtaagagaccaaatatataagtggaagagcctctcacctaattgactagcttatgggtaggaaagaccctttacgattctacaattagtatcagagtctggctagttcaacgtatctgacccaagggacaaagtgtgtgaagacttgatggaccgtgggtgcctgcggggccagtatacctgaggaaccctgaggaaacggtgaaggggcgatgaacggttaagagacaccaatgtgtaaaaggggatattattgaatagtcccacgtgtgtgggaaagacccttaatgatggtgcaaagatatagaccctttacaatcttacaaagacatacgagaatatcaatatatacttgtctcaatatattctgaccattttgatgaactagctagtggccgtacgttcatatatacagtaataatctgatcttatatatgggttctggcaattggttccaccaattgtttaatatggttaaaaattcggtttataatattttgataatattaacgtgtggcgccgctcgatcggtggacgtgaggacaaagcgatcgacatccagaaaattaatctgagattccggataagagccggacctatcaactataattaaatggtcaatatatatatataacttagatcgatcgatcgcaattagggcactgaaacgtatttaggactggttttttttttttgggggggacggagggagtagtactattctttgtagccggtggcgttaattgctcataaaataccgtactaataattatcggctagtacgtacgttacgttagaatgaactgcaaatactcgatgctgtttggtccactggtctagtactgcatgcatgatttaatttaggttctgtttagatcacgtcctaaaactttacaccctatcatatcgaacgtttgaatatctgcatgaagtattaatatatgaaaaataataactaattacaaaaattgtgcgactaatttgcaagacgaatcttttaagcctaattgctccatgatttgacaatgtggtgctacagtaaacatttgctaataacggattaattaggcctaataaattcgtctcacgggttactgacaaaatcnntgtaatagtttttattaatgtccggacaccctatgcgataccctatataatacccgatgtgacacgctaaaactttacacctctggatctaaacattttttttaagcaggcacaatagtggagcgtaagccagctataacatatatcgagaagataaaagaagagggagatagcagcgggctacagatttgtagcgatcagcacggactctcagacgtaatgtgtgtatgacagatgagaccagatattaatattgcatatatatttatagataactattatattaattggctattaaattgactatagataatttgaagctagtagttggatgtaatattaaacttgctcttaattggtcccatgcttgtacgtatttgtagtaattaatataattactacagagatccagccagctagctagttagaggtccaaagatcgatgcaagatgacgagagactgaagtaatttatctcaaaatacaaacaagttagttctaattaaggttttgggtttgacagtttaatttcagaatgatattagtatatgaaaattaacagtggagtaaaattaagtgacgagcggtggacgctagcgagagctgatgtatatatgacaatgacaatgatttgagttgacttaagcgaaactaaacgatttgagttgaactatatctttgtccccaacttcaattaccggattgattaattaattatatgtgtaatactgtagagagctagctaatatactactactaggctactagctagttgataaatgcattagctgctatataaattatctagaataatgttagctacgtatacgtgctatatatatagccaatatgctattcaaacagtatctgaaaattgtaaaaatgaataaatttatgatagtagcagctatagctgagtagttgtgtgaacagaatgaagatcgacggtgcacatatatacttgcgttatttcactatcatgaccgctgtttcgcagtgaagaaaaagtaccgcgcgccagctataaccaattcaccttcgtcccttcttaaatatttagatatttttaagttgtttagcaaatattaattataagattggaaattccatctaaattatcttacttgttaaattttaaattttgtaattcctctcctaaacatctgattagctaaaagtgtttaattagatttccatgcattgaaattattttaattgaaaatatagggtatatataattgtagagatgacgtcgtctgcttgattttattaaccgcaataaaaaatttaaattagatagagatttattttatcatagtttattttcaagccttatcttttaattgaaccgtgctaataatatagatataaaagttctaattatatttttttcgttggttgtatattttactaatatacggttactcaaccaattgaaccagactatataaagaggctggattaactttcatcataaggaaatagagacaataatatgaataagtatttcttccgttctgaaacgatcaaacttaatacggaacgtaacacattctatattctagtattataaatctagacggtgtgtctatccatattaaaaatataaaatataccatatcatatattagatttatttattttacgacggagagaacgtatgagagaggagtgaaataaatgcagagaccacagctagctagctagcagctcactaacgacacaagggaggacactggagttgctactactacaaaataaaaaggctcatggggagcaaagcaagccaagcggtgttgattaaaatccagagaaattaattaagccaagcaagtgaagtgacctctctctctctctctctctctctctctctctctgctgcactactagctagctgctgctcctccggctggccggccggccggagtgtgccatggccatggcgggcgccggcgactggccgttcgccgccgacgaagcgtacgccgactcgtcggccatattcgccgagctcggctgggccaacgggctcgccgtcgtcgacgccgtgggggagctactgccgccgctggatccaccgggcgagctggccacgccgccgccgccgccgctggatctgccggagacgccggccgggtcctccgcggacggcgccgcgtcgtcgtgctccaccgacgacgccgacggcgggaagccggccgccgcgtccaccgaggcagcgtaagtacaataattaatcgcagttaatttgttgcaagagattaatttaatttactcgataaatcgcttgttatttccctccaaattatccaaattatggttctcttagcatactataaaattgaattgaattcgaaacaaggaactaattaatttaaaacttttcaagtctcttctatctccttttcagtttttcctctttttttttgctttgcattttgtttggatggagatgatttaacggtggccaattcgtttacgtggataattaattaattaatttacgcatttctccgaggggcaaaacggtaaaaaaagacgctactagcttctagccaagggagtgtgtttgtgtggttaatcttcttcgaacattgcgccgggattcgcgtgctaaacctccatcgcacatgtgcttataatttcctaattaatttaatgtgttcctcttaaattgaattgtcttgtctttatttacatatatatgctagcttttaggtgagcttatgttcattttttttgctagagataattaagtactggagtagtgtatatttttcagacacgtactacgtactctacatacgtgtatatatatatactctcaatctctcatattatatagcaaaaatctatgagtaccttggaagtgtttatgtttcattaatttatactactatttgccaattaatcgatcggtgcatgcatgtagcctagataatgcgcactagctacaaaaggaagtacgaatacgtacgtacgagtacgtgttggaattaggttgcgaattaaattgcaaaagaggtcgatctggtgagagaacaaacgtaattaattaattaattaagacaggatcatgaatatataggagtattaggcatcgagttaggacattttcattgcaagtcgtcagtaacataatttcttattgcctagctacttctacttgatggcttatagtagtagttttcttttcataacttttaaattctcgatctgaactatatacctttctgacggaaattctctacaatattaattttcatcgtgtggttatgtatgttcaggagcaagtcgctgacgcctgggaagaagagggcgcggcaaccgcggttcgcgttcatgacgaagagcgagatcgatcacctggaggatggctatcgctggagaaagtatggccagaaagccgtcaagaacagtccttttccaaggtgcctacctacattttatacatataaattcatatatggagtattacaaatgcatgcatgctgtagtaataagatgtctttgctttaatttggtttctctaatttcgatcttcttctaattaattaagtaatagttcctgatatgcatgattaatataattaattcagcacatatatacattcattctcgattaattgatacagtagtgcagcaactatgagtgagtatcagcacagtgggttcacatattaaagttgtgggctgaacgaaaaggacgacgtacttttagttagttgtatgcgtgtgttgtaaaagcgtatctactccaatatttttcataattacaatcacggtacttcgattctgaacatgaatatgccaacgaagcaaattaagcaactcagggaatgaaatgcgttgattaattttctggatttgattaacattgtatactttgattttctatgatttcatttcggtgagccacatacgcatgcaacaaaaatgtgtccaatcatgttaataactattggttgcagtaagtatagctaggacgactgctataattaaaggaatgctagtatgtatatataacatgatatcacataatctaattaaatagaaattgacttaggtagtcgtatctttctcaagttatgatgcaaactccaatggtttttggctgttacaatggcggtgaatgatgttttaagctagaaatatcccccaaattactcctttcagcactagagtaaagactatttgtaattttattaaataatacaaccataaccttattaggcaactaccattaattttcttctatatgctcttgtgcacaaattttctagtcggatataaagcatgtgcagttgttttgatggcttttattcataacgtatacacacacactctctctctctgtgtttaaaaatataagacgcgcacacacgtattttaagatttaaattttacaacttttgatcaacaagtagtctaatcatgtatatgtctagaaacaaaaaaaaagataatcgttgaattcgtatttgcttgcactttcatctattttttagtttcagtaccaataataatgtaatttgggagaaattgacggtcaaagtttgacattggagaccataccaaatcaaaccaagtcttatattttttttagtggagagagtatacctgttaagtgtagttactactacttactatagtagtattctagatgatgcattggtcctaaacccttgaaccctaaaatgtaacaagctaatataagctggctgatctccccccaacatgtatatatttcttctgcaaatgtaattaattagcccccaaactttttttgcaaataaattaatcaatcaatctcttggttaaattaattaattaacatgtgtgtgtatatataaaaaaaaaaacaggagctactacaggtgcacgaacagcaagtgcacggtgaagaagcgggtggagcgctcctccgacgacccctccgtcgtcatcaccacctacgagggccaacactcccaccacaccgtcacctttccccgcgccgccgccaccgccggcggcttttcgcacatccacgccatggccgccctggccgccgcacccttcttcgcgcaccaacaactgtacagcaacctgcagccgccgccgccgacgatgccgcttgctgctactactccggcgtcgtcgtcgtcgctgctacagctgcctctgcactgcaaccatgagctgcaggttgttgccagctgcggcggctacccgtcgtcgtcgtcgtcgccgccggcgagtgttcttcccgtcgacaaggggctccttgatgacatggtgcctagggcaatgaggcatgatgggtagtacaagcatgcacaccatcgatttaatttggggttaatttgtagcctaattattaatcttaattagctgcttcgatggattaattagcacggtaagtagttacttattcgtgttgagatcactggaaagataataattaatagggtacatagagatatatatattagctatatatgaatatgggtgatatatatataatatagttcgaaattaataaacaataattgacttatatatagttgtctgtttgatgttcattctaattgtaatttctattaattggtgaattagttgctttgatgggattagcacagccataagttgtatttttcattggtaatatgacaacgacctggtttttgaatgtcgatcgatgttctacaaacgtggtgtgtatagtggtaagtaatataagagcagaagtaagcctttgatatgacccccggacttaagcagatttgtgtgatgataaaattaataataaaataattcatgctaatgcatgtttgactctaaaattaaatttgatcctacaatctttgacatgtaggccacattatcctagtttcctcccacacacatgttcatatctcttctttctataaagataatacccactaaacacatgcaaatatagtatttattagcacttctagaatcaatatgtggctacatattgattctagaagtgctaataaatactatgtttgcatgtgtttagtgggtattatctttataaaaccactaagcacacaaagttcaacatgcaagcatatagtaattatatctataatttatttcattctaaagctaaacatacacatgctaaatcatcaatcttaaatcattttcaaaatatttcaattcaaatcatttaatcatttctacaatatctaacatatattgtaggaacgaatcacaagaactaagccaaccagaggggggtgaatggttggtatacccaaaaaccaaaaacttttagcgaaaataaaagttaccctcgaaatcgatggatcgcggtctgaccgaagtagttgcgccggtctgaccgcctgatgaacgtcggtctgaccgatgtagatcgatcggtcgaactgtcgagaatgcctgccgccgactcctgtcgccgccggtctgaccgccgtgtgcccgccggtctgaccgccggtgcaccgctggttagaccgccgaaacccggtgaaacacaaatcgaagaactcttaaagtagatgatgactttattgattctctctgtgtttacaaagtgcaccaacatcacaccttacaaaaatttcgactaaactcgaaaccctaactcaaaactcaactcaattgctctctaaagcgataccgggaagcctcactgtcacaccctaaaaatcctaaacatataaattgttgtttaattggaattattagaatttattttaaaagcctagaaaagaagatctaattttaaataataaattccaatataaaatggggccagataaaatttcattaaatactttgcttaactctataattcctagatttttctgggatttatttgagctaaggaagtatttttaataaatggaattgcatttcatgaataatttaaattgaaaaaggtttttaaaatcctcttttggctttgggccgaaagtcggcccaaaaccttctctctccctctccccggcccaagctggcccagtccgcccgcagccgcccgcgcgcgcgctcggccgctgacaggtgggtcccacctgtcggactcgtcgtcctcctcgcgccgtcgcccggccggaaccctagccgagccgcgccgccgtctccttccaaattcgctcgtgcctttccttctccggtgaaatcaatagaggggaaaagatcttcgggatctcctctaccttttctcttttggaatcgtcggctaaatcgtttggaaatccgtggattcgagttcgattcggatcgatctctctcctccgaaccctagactttccttcgtgtcgccggtcgccgtgggtcttcgccgccgccttccaacccctataaaaggaccccccaagtcctccgctacttgtcgccaccctcgccttcgcctctcgtcgccggtagagccctagcaccgtgtagcctagcgccgccgtcgtagccgttcgtccagccgtgcgccgccgccgatcctgtcgtcgtcgtcgctcgggaaggctgccgtcgtgatcgccaagccgtcgccgacctcgtccgcccctccgtcgtcgccgtaggttgccggaggaccgtcgccgtcgtcaagccgaaggttgcagccgcttcttcctcgacgccatcgccgtccgttgatcttccgccgttgttttggtcaccggtgagttcgccgcgtcgccctctacgtgttggtgtcctccgttcgcgtcgtcgtgccgtcgttcgccggcgagtttgcgcgcctgagccgccgccggtggtgacgtcaccgctgacgtcatcgtcgtcgtctctcgtggtctggccgtggaccgatggatcttggccgtccgttttggatgggtcaatatcggccgttcgtttccgtgagccgccgccgtgcacccggttcaccgtgaaccctagccgctgacgcaataattcccttttccttttcaaaaataattcattattgcgtcataattcaattaaaatctaaataaatgatttaatctgatttaatctttgaaaattcataactaattcatcttagctcgaatttagttggttcaagtttctaattttttctaaaatagagatctacatgttaaaaatatccacatgtactgttcatgcttgtttgtgtgctgttttggtgattttgctcctttctgtttagattccgacgtttccggagagtccgtttttgcaggagaagattttgaagagttccaaggccagcaaggcaagtcacacagatcccaaacatccctttgagcatgttgatcccgtttaaagctattgtttctattcaactattgcatttattttcgaatgtcattgggtggaattaacctaatgtttgttatagcccttttgttcttgattactttattccttgataccttgggttatcataacttgactagttgagctttatatattggttcagctagatagtagatatgattgcttagccatgcttagaaacattagcacactattgggataacttatgactcactattatttaatgatggcttaatgatagctcatgatggttaatcgtgattggttaattaattaatttgccaactaaaacttgataatggtgggttgtgagcacatggttttgatggtcgtgctcatgacaattaaggaccggttcacgagtttcggttgtgaaacattaaccgtgccaaccacaagccagcgtgggcaacggctttaccttttgtataacatggttcattgcggggcaccagactgagaagtggcggagataagcccacgggggtcgctggggagtccatgccttgtttataagggtgattatgatccaggaaaggtgcgctgtggtggattgtgttgtgcgaggggtactgtcacagctcctttccgaggtaccgtggtggtattgaggcacatggtgacatgttgtggggctgtgtcttgtgggtacagtggtacacctctggccagagtaaaactattcgaatagccgtgcccgcggttatgggcgggtctaacaatgtctttcgtgattagtttcacacttctcatcataataaaagatgctataactggtaataatttgtttagcctcctggtttggaatggtatattcctggtttggagatagatatgtacagccgggtatggttgttcaggatggttgggcctgagcagcatgggtgtgctgtttagtgttgattaaaattaatgattaattactctactgttttataattctcaaatgtttgctaaatgctgcttttgcaaatgagccatatattatgccattctttggtatccttgtgcacttgcatatttgctgcgtggcttgctgagtatgtcatatactcaccttgcaatcatttatcagaggaagagttctacagtgatgctgatggtgtggaggattaggtgtagccctggtcaagctgcctgtggagtggagtcgtctgcgccgtttttcttatttttccgctgcttagatctttattgattgagaggaactatctacctctgtaatgacattttattcgcttattaattagagtaataattgtactctattatcaatttgttattgtgtgcctcggctgattcctggacgagggttcacacacatgtaagcgtttggaattttggatagaaattccgggcgtgacactcacgctccccctctatttatacatgagataggcagcctaaagccatgaaccaaactcatattaggagtcctaaacaccttaggaaacccactaatacaagaaagaaactttacatgaccaatcgtaccaaatttggactccttccaaattcgactccgcatcccatacgcacacaataactccatcgtatgccatatggaatctccatcaaccactttcatcagctctagcctaagtatcccgcatgatctctgaccaccacggacgtcgtcttatccccaagccgactcccggtccatcaccgaaaccgacacagtgtcggccggtcagaccgcgggctagccagtccgaccgctcgatcaccgccggtctgaccggcatacacagcccagtctgaccggtcacataaaatgataacctgtagattcacctgtgaaatccaatcatctccaaaaccacttcgtgaataaattccaaataacaaaaccaataatctccaatggccaattattcatcacagaataataatcaaaaacacctttgattttacatatatctcgtagcaaagcgcggagcattatctagtatatatataatattaaaatacgcatcatctcgtagcaaagctcgtagaagtgttatgttagatggaccaaacctttgttgctttgctactaaaatggtgcaaagcccagcaaatgcaaagttagacaagcctcccattggcagtagatcatggtgagttcctagttagtgagaatgagattacagagaagttagggctcccaaggtaaatttatgtattcttccgctattatagttcacaacgaatggctcggaataagtcggtgtcctgaacactaaagctagcatcaccgatgtaattatcgacgacctgataaataagacttactacatctctatattgagaagctcttgtataaactataaagtaagctagccatcaataaagagatagacaagactttgttcttattatttttattaaacttacaatttttaacataccttaaattaatgttactccttaatccgtataagttttataaaagaaagtttatccaatagagcagtacatttgatgcacatgtatctggaactgagatatgattggactgaaatcccagaaatgccagcgatcaggcgcccgatcagtggcaaaaaaaaatcgggcgcccaccgcttcccgcgcctccgcgctgttcctaccacgcgcctcaccacacgcgccattgcaacaaattacccacgtattagaaacgctctattaagtgaatctgtttcatttttttccaccaacaatgttttacaagtgtactcatgatgtttcactatctatggatcaaatgttgcagcaaattgaaacatcctttcgctatttgctgaaacattgtttttatataaagtgaaacaatgcccgatttttttggaaaccattgtttcaaaccttgtagcaaaatgtttcacgaggtgatttggttgtgtttcagatttttaaaatattgaaacaatttcgatctacttagtgaaacaattctgatctacttggtgaaacagcgccccatttgaacggattaaagtattgtttgcatgccaacaattttctagtactcttatctcaatcaatgtgtattttcttttgtttgcttcattttacctattataaaaccaaccccaaaatcgacattggtagctaaacgcggaagaaatgtcataggagatccaaacacgatgatgacaccgaggcatgatttgtaggtggccccctgaaattcagcccaggcccatacatttacaaggatttctccagcttttccttttgttttggttttattaaggggaaaaaaccaagcgatttacaacggctgggattgctttaagattctcatcatcctcacctcttcattttctcgccacgccgccgtcgccgccggcgagcccccgccgccttgttgccggagacacacacccacccaagggaaggcatggcggcggagatccagacggcagtccgcctccctgtcgtgcccgcgccgcgcctcttccatggcggccacgccctcaaccggccccggcgaacccaccaccaccgccaatccagtgaaggtactctccccttcccatcctgactccatcctcatcctggagtgctacaagggtttcttagatcgtcccggggcgggagtagttgtcgcaattctgtagtgaaaataatggatcaacagttgagcaccttcagtccttcagagctcagagcagagttgggatagagaaaagcataggaaatatcacaactcaaatccttaatccagttagtatcagtttatctatcctagggtttgatacttggcaccagttgaaaggacaattacaaggtgaattctaccaatgttgagtcgttatggtggccttggatgtaggtctttcatactatcagtttagggacaattgctcatttcaccctatttcagagcctaactaccaatctgaccttttttttttagtttgcttatttgatcctgcttttcaaaaatgaagttaccgtctgaccctatttctattataccgttagggtttcatttaggaaaagaaaaaaatcacattattaatcaaactgaccaaaatacctttcatgactcaaccctatccattcactcccaatcctatccagtcactctcaaccctatatctctcagcgccggtgcacagacggcggcagcagctactccgtgcggaaggagggaggcgcaggtgctcgccaccaccgcggggtgcgaagagaggcgcgtggcgtgggagcccgccgccgctgggcgcggaaggaggcgcgtggcacgggagctcgcggccgcggcggggtgcgaagggaggcgcgcgacacaggagcccgccgccactggccgcggaaggaggcatgcagcgcaggtcgaggatggcgcgggagctcgccagcaggtgtttggctgctgctagaatttcaaaaatgcttaggatcagacgttcgacgcaaccaacaaaaatcggacggataaactactacctccctgtccacttcacaaatacatacatgctataatggtcttcagaatattttttctcctcaacttcttatccaatttatgatatgatcgcaccattatatttgttataattaaatctttacaacaagatatcacatcattacattccgatgaaacaaaaacatatgtttcaatccgttaaatttaatgtttcagacacggtagcaatatgtttcaacgtgtgtttttgttatgtttcataaaaatttttaaaatatttcaacaactgattttttgtttcactatatataactcaatgtttcaacaactgattttttgtttcaccaatgtataactcaggcctcttctctctctctctctctctcctaccatctattagctttctccccacaccatgcatgatgcaagtatttagtcgtattaaaaatcttttttcttctaaactacttatccgatgaacgattcaatcacaccgttgaattcgttataattaaatctttacaacaagatatcacatgattatattgttgtgaaagaaaaatatatgtttcggacaataaaagcttaatgtttcatacgtgatagcaatatgtttcaccatgtgttcttattgtgtttcacaaaatttctatatgttttataggctgattttttttgtttcaccatgtataacttaatgttgtaccaacggtcaactgaaacatttgaccatccgattttttttcaacatcggacgtccgatttgtagctctctccctagaattttgctgctttgtttttgctattgctgctctccgtctttctctcgcctctccttgttcttgcccggctggagggagacggagccggtgctctcctggtctggaggactgcatgctgctggtgtagagggattatgtattttttgtgaaatttatcaaaaatctgtcaaatgtatgttaagtttgtcgaaaatatatcaaatctaagtgaattttgtctgaaaaaatttaaatctgtttcaaacttgtcaaatccctcaaacctaagttagatttgtcacttatcttagtaaaaataatgtcacattttcagataaaaatacacaaaattaggcaagcaaaaaactttgaaaaaatagagtcaaatgagtgagggcataaaagtcatttctctctgaattaacaccattatgttgccttaacggaatagggccagacctaacgttcgttttaaaaaaagagggtcaaaatagcaaactgaagaaagcaaggtcaatttggtagttagaccttaaaatagggtaaaaacgcaaatgccccgtcagtttattgtaccaatattcattcatctttgtatgtatggtggcctgttttgtatgttgtctagaaacaggaatgcagttgaggtgatggattgtctctgggcttggtttccaaggtgggtaatgcaattacctgttgtctaaaaaaaaataattgaggtgatgggttataaagcatataagctttctgcatagtttcccaaagattttctccagactgttggcctctcagctgtcaacaatccctatttatcatatgattctgttggattggccaaactgggtataaagtgaatacataaacttcaactttctttttggtggaaaagtttagaggaggtttcccactatggtctgggacaaatgatagttcgttggttggttggaattttaaggactacatatttgtaatctttggcttctcaactttacattgggacttagtttctctgtttctttctttcaatttaatacaaatacacacacatatctcctgtaggatcttgaaaaggaaaagcttggtgcatgataaagcaattactctctccataaaaaaacacttctggatttaattcttaacatagccgacctatgtctagattcaaacccagatgtggggttttttttttttatggagggaacaggtctctgaacttcttgccctttctcttcatgggacaaaactaaactgattgaggtttgcaacatttgaatgtgattgtggtgtctcctgccatttcgtttagatgaaaaagctttgagtttgcatcccctattttgtgtcaattgatcttgaaggctggtgcatatgcagtttttcaactggtgatgaaagaattgcaacgcgtaagaaatgtggctatttacattattactacaattgactcttttagatattgtaggaggtaatggttgcgctaatatatgataaattatttgttgttacgatgatattcttaatgacaaatcaagatatataaatccattaatgttatagctacacttcttaaaaaaaatgttaaaaacatatttattattaattattattaaacattatgtccattaacacaaacaatattttaatagatggagaggtcataaccgtgtgaacacacgacttaagatgctagtttattggcaaattgaatagtttgtgtgttagtttgaattgagaccaaatatttggtagcgcccctattctatttggttatattctagaagtttctttactatactataagaatttggctttttattggcagcaattcaaatgttaactaaataattttatcttaccaatattttggtagtgccaaagtttgcctagactttagcactgccaatgaattagtagggtaaagaaccaaacaagctcttaatataaatactaagtgtcgaatctgcaatggtgagaatatatctcacttaagtatgctaattaaataccataagaaatctcaaacacttactttattaaatgaagcatccaccgaggtacaagtgaggagagagcaccgacaactccggcattcctccagaccttcccctcactctctatctattttttccacactaataaagtgatgcctaaaatatgaaagtgagttttgtttttgttgttgtgtgttgtgcaacggctggagctcatccttttatataaccatatgacggttggaatggcggttgtggaggtcggtgtacccacaactatcattgtggaaggtggaggtg

SEQ ID NO: 9784 - DNA, 21686 bp, Oryza sativa
agcaaatgtgactattcggaaaatatgcaatgatagctcttggtggtacaattcatgcgaaaagtgtcttagggttgtcaaaccatttggttacacctacaagtgcactggttgctacaatattgcaatggcagtaccaaggtaatagatccttaatttttgttttatcactgtaactacttgtcaccctgtttacctaagcgagatcataatgtataggtacaagttatcggtcttagctggggacgatactgcggatgctgtgtttattctctttgggaaaatagctcagcgcattgtgcgaaagccagttgagcttcttgtcgagcagacacccagggagagcaaatttatccttgatgcaataacagctctgcttgagatatcatttacatggaatgtcagcttcacagagaatacacttaggactggggatgtatcattccaggttaacagtgtgatttccatgagtgttcttggggaacctcttatgctaatgtccccaggaccagcagattctcctggttcttcagctatcatgtcacctggaccaagcacttccatcatgtcacccacaagaacatctgagattgccatttcctcacctccattagctacaatagcttctccagtgaccaggcgtgcagcacctcaaacaccaactagcatactttctttggctaccacagagcaagcaagtcatgttgatccactgtctccacccatgactcaagcagtggcctctgagagtacagaaatggtactgctttccatgcttacaaatgtttgctctaaactataagaatatgtacatatcacagtaagaagctaacactttacttgcagaaacagaaggctattattatttctgatgacatcacgctgccactggctgcatctattccaaacagctcaaccaagaaaaggtacattctttagacccattcagatgctatttcattgttttcatcgcttctttgctcaaactacttgtgttgctcgatagaacccgcccacttcaggcttcaccaacagctaaaaaactgttcactgatgatggtgctcaggaaaaggaggttactgacaggtatttcatgttgaactgccatatctacagatacatattatatgttatatataaattaaatgtttactcaagcatttcttgttgttgcagcctgtcagataccgcttgatcatatgctcatctggctgaagtattttgggcattgacttatggaatcttcatgggcatgagaaaggaacaatagcatgctcacatgtctagatcttttgctccagactttactccagactttagacttttatctcttattaattagtaccaagtgaaaatgtactgcgatttcttttggacaactacctctatgtataagtgcacctattattattatgccagctatcatcccaccacatgctcagggtccattactattgcatctgcgatagcatggcaatgaactctgaacagttggctcgggcaaagctacatggcactaaaccatgttaagactcatcgttgtttctcttatgttgctaccttgctatcaaaattgagcatatgctccatggttatatactattgtgtgactatatgctccatggttatatgctctatggttatatacgatagggcgcgcgaagcgcgcttgatgtctagtgtaaaagaaagagctaaactgaaataggagtaccttgttttttccattgatgttgatgaccctgaaagggtgccaggatgagtcgctgatttcagcttcccactttgaatagagaagcgcagaatcaagctgttttttagtcagtgtttgtgtgcaagcattagcaaatgcttttggatcaagctcacccatcctcctgatgccaatgcttgcgcggccacttgtcagctcctccaaagcctgcacccaagatcaatttgaccgaataaatacaaagaaaattgatacaagttggtcaaaaaataaatgaaaatataatttagggctcagtctttcgttttcggcatttgtattgggggtgccgatatggcaaaatttcttacggaaatttcggtctgaaattatttgaacttttgaacaaatattgccaattcacaaaaagtacaatcaaaatttaaaatcggccaaaataatatcacaatggggtcgatagaaccgaaatttccgaaattcgttccggaatttcgaagcaacttacatgtatgagctgtttgcggatggcctgcaactcatcgttgatcgccggagcctggttgagcgactccattgccggcatttcatcggtcatcttgctcttggtgtcgtcgtcgtcgtcttggttgagcttcttcgacgtcgcggcgatcccctgcatcttcttgctcaccgccggcggcggcggcggcgcaaagagatccgggttctgcgcccagatgagcctctgccagtaagcgccgttgcggcacgcgtccgtacgccgccatctcgccatctccctcatctcgttctccgcgagctcacagaggagggtggcccagtcgacccagtgcgcctcgccgcgcctcaccctctccgcggcgcggtccacctcccggacgagccggtccgccgtgtccagcttcacctgcggctcgacgtacgccgccatgaacgcgccgcggcggaggcggctgcggcggcgtcgaggtcggcggccgcgcggatgtcggggcgcgtgcgcgggagggcgagcgcctcggcgaaggcgacgcgggagacgacgatgctcccgccgcggacctcgctccgcttggtcagcgcgttgtagttggcgacgagctcggcgacgaggtcggggcgtggggaggcgaggtcgagacggacgaagtcgaggaggccgagggcgcggaggccggcgtcgtgggtggcggacggcggagccggcgggtcgaggaggcggagcgggggaggtgcgggagccgccgcttggtccgagccccgccgacgcattccgccgtttggccgagtacggggaggaggcgagattgacattggcggcggcggcggccggcgagtggtcacgatcaaagcgaatgaagaagacgaccgacgaaatggaatcaaaggcgcgattcttattcaggttcaaaaatcaaaggcacgattttttagggatattttggttcactgccatatctaaaaattcgtaagcgctaaaatgcaggcaacttttgcgaaggactcgccttgaacatctttggtttcttaccaaatggattcaaatcagggaaagtgcattcctccgtcgagcagatatcttctcgttttatgtatattatctaaatagtcaaaaaaaattaaaataaaataacagtatagattaatataaaatatatcactctataaacatgtgtaagttaaaattcaacttatataagttataaaaaaataacaaatataactgtagataaatatttgtgaagtgatatattttatattaatctatgttattattctttttaaattttttataacggtttaaatgacatgcaagtgatgagaggacaaattgtgatacagtgttagtaatcggtagccggaaagtcgccaggcatttgacttcaatccagacaactcaagaatactttcgagttaccgagccctgctattatttttttggcaagaaatataattgatatcaatacaaaacactgtcaagaagtacaggtgtattttttttgcctttttatttatttgtcgattaaagttgaacattaaaaacaacggcaaaaaaaagtactccaaggcccaagcaaattgttgcacaaatataagcaactaataatgcaaaacagtttaataatttatctctccattcaaacaacaccacaaataaaaaaaaagtcaatctactaaaatcttgaaactcgtgcacaaacttgggttaaaaaattatattaagataaattaattattaacctcatacgtctggaatgatatttacgaattttttgaaagatctactagtttaacatagaaggggacaacatcaatgataactaggtggtaccccgcgtgttgctgcgggatacatgaataaagtaaaaaataggcacgcctggcaggatctgtaacaaaaaaggattcagtaatcatcataagaatattttaataataataaagtagctatgggtgattgcttcttggtgaacgaattatgttggatgcagctgagtagacccacattgtctatgaattacaatcgatcatcatgtcaatgaacttggatgaaacaattcaaatagaagaaaaatctatagtttgcaaggtaacacacttgcaaattgcagaaaatcccaagttaagtaagacaacaacgaatccagatactctgcagggcccacatgtcagtgagcagtactgcagattaccctcgggtccacatgtcagtgagcagtactacaggtgcagtactgcagaggacccttactcaacaacaacagtgttaaaatataatgaaaaatcaacctacgttgacataacttttgagttgtcacagtatttacatgacctcgccaacatgaatggcaagtattccaaaagattgcacaacaaccgtgatgtacggtgttgctagctggacttaggtgcatatagtggcgattgagtacatagtatccatgtagcaagtagcaacaaaatgaaaaaggaactaatgcaaagaacaggaagtgatactgcatatctgggtgaaataagaaagaacatgggccactttttattcgtaaaagtgtcatcaagtattgatacagacccaaggatcgatctagaccggcgtacgcgagagacatcaaccacctctctcgttagctaacaattatgtacattgtaactgggccaacttggctgctcgcacaggccacgtgcgatgaagggcctcctcgcctaatgggcccgacaccgagccttgtgtattatcgagccaacgcagctgttgtgggtcgccgcggccttattcattttccctatatttttcacccaaaaatatcatttaatgtttacaaaactaatttgtaatcactttgagccatcattttaagatataaaattgctgaaaaatttgtgtgtgcattttaatttatttctaactaaatggaaccaaggaaagaacctagaaaaataattaaggcttccagtaaaagtttttatccatcattcatcacacgcggaatcaacttcggtaattagtttcttttggcaatatttagttttctatttataatcacatccatttcctaatctacaaggtataaaattcagagatatttgtgatgtatatacaaatttgagttgcacatgtgttataagtacacaagcaatcttaaccatccaaccatatttgtttgatattcagttccaacagacatatttgctagtatacacacatgtatgcgtgtgtgagaaaaaaacatttaatatctgtgtgtttttagcggtttaaaagccaatgctttaaaataaactacagcaaccccctcccacctaaaatcgaactcagacaaataagttttaaaaattatattttctctttcagctaaatgatgatcctccaatccatcctttcattaatatttaacttacaccacgctaagacaaaaggatattaggtgcaaggactgtgatagcctagccagcaaaaagtcatcacaaaccacacgataataagagtatcatataacaggagtacatgtgcagattccagccgaagacaggacagcaatagtttacaatagtttagtgtgcttacataacgcacagaagcatttccaccaaagattttttttattttttttgaacttttttattttttaattttaaaaataacccctttctaaaacttatttctcgaatctaaaccttttggccaaaacaatactgagttttatcctggcgtggccaaataacgctgtcacgccagctagaccggcttgaccaaataacgctatcacgccggtctggctagcgtgataatgttgttttgtcaacccagtccggctagctgggccaaaaggttcatatcttgaaattaagttttgaaaggatttatttttaaaattaaaaattgaaaacgtttaaaaaaaaccgtcttccaccaaactcggcatgcttacacactcccatctattttaattttagcaatcaatgacccaactgcaccggatgcaacaaatatggcagcaacattacagccccacattagcttatctcgaaattcccctttgggcatcccacaagaagtcaacagcctgtgtatatgcatgccagtacatatatgaaggtgaatctagggtggaaaacaataataagccttaaactcaaaagctaacataccggttgatacaatctctatcttcagtcttcgctctctccaccttctccacatcctcaacaatttccctttgcaccatctcctcaaattcatcaaatcgttcgatccttttgacctgattatcattcagtagcttgaacatcaaattacaacaagattgatcaagaagttgtgaattcctagtgttagagagaagcattcatagactcaacatcaacagctgtttccagcatgtcttcctagtatattagggaataaaaaatatcttcctagtatattagggaataaaaagaaccagcagcatactgcagggcttagaagttagaagcagagttagggctagtgctgcatagcgctttgcaatctagtgagttataagagtagcctttaccaatgcaagatatatttttctgttagtaactcttcaaaatgattgcattctctgcacatgcttttattacaaagaaaagagcagattgatctaacgtgaatcacacccacatttcttttaactgtgtagttgtttttttaggtgtacgtatttgagactgatgcatgtatgggtattatgtttgcattcttaacatgtacttcataaacgtagtttcctaacttcgatttgtgttggcaactcggcatgaacaagtaagcaaaaatcacatcattcctataacatatcctccctaaactttgaatagaagtccatttagcacttcaaactttaaaacaggtctctacaccctcgaatttgcaatacctttgatataaccccctaaagtgaactttgtggttttacttatgtgggatatacatttgaacagacactaaaatctaccggaacaatgccaccatgtcaacacagtgtcgtcctcctttgccaaaataaggagtgagaattaatgaggcaccaaagtgtcgtcttaatttgccaataccgctcaaagcttccccataggcaaaaccaccatgaaaaaaagaacccattttaaggggttatatagatggacttgtatgtggccatctttttcctttttctcttgtatgtggccatccgatgctaaggtttgcctaaaaaacacatcgatttcccatcaattgcttccttgtcgctgctaattgtaactccgtcttgtctgatcccactgcaatgcatgcttctggaggcaaggaagtacgatcctaacaagataatgcaagtgtgggcaaagatgctgagatggaaaggaaagagtttggagctaacatgatctgggaggtgttagagatttagagaccattttagatgataggttacaacttacaacgtctaattaatttttggtttgttcttgattcactattgggttgttgtggtcagaagtttaagttcgatgaactcaaagacatgatcgagtactaccctcagagctaccatgctactgatcgtgaaggctgaccggtgtacatcgagaagcctggcaaggttgattgaaacaagctgatgcagatcacctcagcggatgtccatgttgtggtatatataccaatgacagggctccaaaattctgaatatttgtgtattgtctgtactattgaatttgtcattccatcagtttatttctactgttgttgcgttgtttgttgttgcaggggctaaagaatttctcaaacaccgcaaaggagcttgttcaccatatgcagaaaatagacaatggctaggtaattttatatttcaacggatgtgctgtgtatggtgtttttttttttgagaaatgccaagttggaaaggaatgacatgagcaactacatttgccaattgcagaaaatattggttttgagctattgctgtatcaagcagacatactgaaaggcatatgactttagtaagggttgatattgatctgttctttacattggcaagaaattgaccaggatatttgcaggatgttgatgaaggaagataattgcaatagtttttttgcaaaagtaaagttggatcagattattgtgatggtcttcagtgtgttggcttcagttcttcagttcccttgcctgctaatgagttctctcttttttttttgaaacctactaatgagttctataaatgaatttttaggaggaatagaatatttgatccttgatatgctaatgagttcgggcatttttcagtatcgaagggtactgtaggatatactatataaatgattattttaagaggcaattgctatcgcttgacttcagttcttcgctatttataaaacacattctatagtgtccttgttagggacaaccgggagcagttttttttttcaaatgaacctggagctatggttgatgaatcatgaataataactcgtgtttaatattaatccttctattttgtgcttgtttgaaaaagcatatattgtattcttttggttgtttaatttgtattactgaatgctatcgtagcgttagcagtagcacaggcaaattactagtgttgaataatttaggcaatgagcaaggcaaggcagaggcacaggaagagattggtttagattggcgcgcgtctttaacagctagcacatcctcactcaacaatcaaaagtgacaggtaaattggtcggcttagttgtagttgtagtatatatactccgttgtcaaactaactagtacgagtactaggtatatattacaaaaagaagagagaaaaaaagggagggggctagtagtggagaggaaaggggaataatttgatactcttggaagcgccggtcaccagaaacataaacagaaaagggaggaggatgatggtaacagatacctttcccgaggaggaggaagacaagctgctgcagaaggatcgggagcggtggcggagaagcctctgggacacggcgcggctgagcatccacgccgccgacatcgctagggttcggtggtttcctctctttcgattcgagttggaggttttttttttttttttttggatataggatattatgtgcattatgcagtaggctaccaaagatgatgggccgggcctacccaggcagagttaaagcccaaaaccgagtcctctccccctctcttttctttctagtctactacgagtagatctctctctctccgtgtctgtgaggtgcaaagcgtggaaccctagatctgatggcgttgcgatcggtgttggccggaaggttgatggtggcggctaaccgcgccttccgcggcaggcccgtctccaccaccaccaaggaacggctggaggtaagtaattgattagcttgttcatgttgttgcttctaatttaattgggtatcaccttttgatatcgatcgattaatttgttgtctctctctctctcccttgccctcgaggaatttgatcgatcgattttttttttggtgaattaagttgaagatgagcagctatccctggacgcaaaacgcgatggacaacaggctgcgggagggctgtgccatggctgtcgataaccacaatcggaggatcatgaggcttgctaacccttacagtgggtatgtttgtaccttattatatattctctctcttcttaacctttaattaattcgagactactcaatattataatgttcgctcgctgctaattaatctcctattatccccaactcaacagcacaatcgatcgatctacgcgttgcatgaactaatctatctccattcacatacattgatcgcaggccagctgatggagacatcctgtataactgggcttggagtaacaatatttctttccttatcattctctgctcgtgctttggattgtgtcatgctgtgctccatctgccgcatcacgcgtccaacaatgtgtccacagcataactagctaggaggttttattatgctataactacacaaatgtaatgtcctgctgaccgaaactagttaaagccaccattgaggttctgttggatatcatactctctatctcttaatgtactctactcctatacctactataccgccttaatttgtatgctatcgtgataacttgatagttgctttctatgttagctttatatatgtttctggattttctgttgtgtctgccccaaaatacaacttgctcagttgatatttctcatgctatcttttgatgatatgttcactacgtcggttaacatggcagcaatattttacttattatgcaatgaacataatggatctcttattgcaaaatcaatgtcttacttcatggatatgagagaataggtgaacagtcggaaggatcaataaatctctctttttttcatatacattcatggtttaggcacatctttcttgtgttattacttattagactggaatatcatcaagctagaatgtggccacctactactagtatcttacagcatattatagattcatagtaccctactatgatattgagcttggatttggcacacttcgtgcctgcatgactatttaacatgaacaatagtagaatgtgtggcttcgaaattaaagctacctccttaggtccctcttacctgatagggcaaatgtttccagtaattttgactctcttgccctgctgctgaagatgaacacaacatgtttgttgttattttggttaagtagtagtgcatgtgcaaggcatgtttttacaatatatatttacataagtaaaatcacagggaaaagcagtccttgcaagggcatgttcatacactgaattgagaaacatggcaagggtatgtctacacactgaagtcagatacattccctgtttaagttcagacaataatctggattttataagtgcctagcaatccaaatcgattgttaagtatgagttcgtataatacaaatgcagtatgaacttctagagatcaaatgaccttgaatgttaataggagtatattgtttacacatattgcaagggccaagattagacactaaacccgaacaaagcttacatccgttggtgaaatcgtaaactttcggtacttgatctactggaattcaaaacataacattaattagctcggcaaattaaaacattgaacaacatttagatgcttttccaagctcagattctaaatcagatactcctacatcatgaggataagcctgaaactaatacgccaaatgctcagaaaataatataagaaatgttcctacatcatagggatggcaacgggctgggtcagacaccgacagagcgaatccatgcccagcctgagacccacgtgcctgcatccgatccacatccgcgaggtctatcgggcaaaaatccatgcccatgcccgtgcccatcgggtacccgtgcgccgtcgccacctacgcccagcccgctgtgcgccgccgctgcctgcgccccgcatgtcgtgcgcgtgcacccagcccggcgccgcttgtgcccaccgtcgcagcccgcgctagcaccgccaagtggagtggacgtggggataggatttggggatattaggtttagggttttatgtggatatatattgctgctgctattgggccaaatgaagggaggtacttgaactattgaagttacatgggtcaaacattttcgggttgggcatgggttacccacgagcgaaatataaaaccgcgtgtgccgtagttagtgtgaccgttaagttcgcgggtatcgggtcgggcattcccacgggcaaaaaaaaagatgcctatgcctgtaccgatcgggtcgggtatctgcggatacccgaacccatgggaaatactggcatccagtgaagagagggttaatccggtgcaacgcgagaaagatatgatatgatcaggcgaggctagcacggtgcggtgccaggcagcggcatgggctgcgcaggcacggagggcgctgtggagggtggcccaagcagatgttgcatggcacggctagggaggcatggcggccggggtcctacgcggcaagccgaagggtggcgtggcagccgggcgggtgcggcacgacgggcggcgaccgatgtcatcatcggtgccctctttttttcatttttctttcttgttcttctcttcttagaggcagcgctcgcagctgcttgggcgtgcggcgaggcggcgagcggcacaatgtgcagcgccgcgggcggctgctgcagtgctactttttttctgcttcatttcttattcgttttgtacttcttttcttctttctctctcctgtcttgctggtgctgccatgacggccgacgtgggctcgccgttgggcgcggtggcggtgcttagcacgccatcctagtgtggcctcgggcacggctgtggcgcgggttgctgccgggtgcacgacggcgcgggccgcggccagtgtgttttgtcggcaggcttgcggccatgatgtcgcatgcgtgagctcgcagccatggcagggctcgggttcgccaccatggtgcgtcgtcggcacgctaataccgtgtttgccgaccgcggtttctaccaatcggcatacgccgctgactccaagtcagctgtagtagatttcgtcaggaatggcagaagtggaacgagaatgacgagaggaattcattttcgtgattaaatctgcgagttcttacccatcttttttctaggtctccggtaaaacgtcgtgctgcccctgtgctacgtgcgtattccaaaggggttacataatgtcaaccaaaaatggtgacgcaagatgtaagggtaggacattctctcattcatttatccattgctcaagcgaacaatatcttctcctcccctctatttatagagatagccataggtaatttccatatttagtgatgggtctaattagtgagtaactaggccaggccttcgtggaccaccggtttcctaatggttccttagtgcggtacaatcttcccaaaatcgcatcaatagtgtgaaacttatagtagtatagtgttgatgcgaaaaacacacactggcctgagagatttgcttcaatctagtgcaggtccaaagatttgctttcgggttctgagcgtgccagttggtttgatcctgcaaccaacaagaaataagaggaaacaaggttaaatccctaaacgatagccgatcagctaggctgccgataacgtatcgtccagtgtcatgccgatgtagtatgggtcagatcagcaataaaaacatgtaagataagaatagatagatctactcaatcatctgcagatatcaatgatatataatctatgcctcgaaatatgcttgaactaattgattggcatagatcatatagtatgccgagacagtataaatcacttatgtctagacagtataaatcacttatgtctaaaggtacttcaaagcaaagattatatatattcataggatagccgatgaagcaaacctaatgtgtatcggctagtactccgataccactctacactaagatgtcaacgtagatgaacatactgatcatgaatcaatctaatattaggaaaaacttaacagattgacagcaagcttaatatattttaatcaattgagatcttaatataaagggcagatttagcatatcaagtaaacatataagaaacaaagtagctaaatcaggtaagatcggctgaaaccctaatgctatctctattagcaattataagacaaattaaatgttatggttctaaacattacttaatagatcaaacttaactgatgcagcattaagcataaggagaaacataagatctacacgagctgataaaagcctttctgagatggtggatacactgtataatctaattcaatgtcggtatctaaccctatcggctgtttttgatgatggaggttagccgatggggttagataatgatattgatctagattatacctcatatatgataactcggcgatttagatgagcgagattagagtgtcatgaagatgtaagcactaatctcgagaacgcaagccgccataacaagctttaccttttcgtcggagatcgaaccctatgcagcccaacttgaaagcaagaactcgccgaaacaatgaaagtagaaaaaaggtggcgatgtgccgaaagtattattgaactgtccttttttttacatcgtctcggatcatatttatacccaaaatacataaaatgtctttgtcggacacgactctacctctattacaacttaaaaatatgaacaaatcctttaggtggactcttaccgaatatatctataaagaaactactaaaaacatcctaattaatagatacagttgccttctttggactctttccatacatggcattaattcttgtgcggcgtctcaatcgatcccaacaatgattctagaaccaccttcctagaattgtctagtttagtatcaactgatgctgcagacgatagccaagatgcttcccgtagccggccgatacggtttctgcttctatggacacagaccttctcgtttctgaccttggatccaatctatgatttatcaattttggtcgttaaatcaaaaccttgtgctacggtaggctcgaaagaaggctggtccggtttgtatccaaagataaagtgaataggacttttagtttcctcttcttcttgagttgtaagacgtcgagaaaagaaaagaaaaatgatttttcgagcaaaaaaaaaaaggctatcagaatttttagttgctgggccgagttctgttgagggtccaagaagaataggcctgtagagtaaaaataagacgatggcgggagagtgatcgaatgagatgagggtttccaatattaattagggatagtgctctcatcgggcaattccgcaccctaaccctagtcgccggaagatgctgcgacgaccagccgccacggcggcgggcagggccatccggcgagccgcgtaccactccgacggcggccctcctccccgcaagctccggggcccccgattcagccctctcaacaggcacaaccacgaggtaccatacctggccctcacattgttcctgcacccctaattaagttcattccttggtttcgatctagagtttaccaccccaaatatatagggttcatgtcttgttcaaagttaatatatattattatagtcccaaatcctcctgtgtcatctgtttatcattgcacttgtttcctcctagcttgaaaaaatttacctttttcatgtgctcccaaccttaccccgcgcacacacacaaaaacaacaactatggattcaagtatttagttactgcctcaaaattcatgtgcaactttccaaagtatttggttcgccttttgggattgctctatacggttgttaatttatgtggcaatcaaaagcacactcctcttgggtaagagatggcacggtcaaatttcattattgcattatgccatagattgtccatgcttatttatgatgaatgaatttgtacaattgagttatataatttcataaggttttaggcgttgtgatgtttttaaggtgtgttaagcatctgtcactttgcactagattaattctgactcttgctgttaccacagattaaaagcttgtcttttgttcaagcctccatctctaatttatttatctctataacttaaataccttatcttagaggttgaattaagaacgctctcacaagaaaaggaaaagctttcttgtgcacagtgcaatgtgccaaatgatgcatttaaagccttcatcttttgttcctccttcctatgttgttcaaagttagtttggtgaaaccctcgtggctcggaaaacaatcactgtacttgttcacagttacacctgttttccctgcaaactgggggggggggggggggatcaccttttccttttttttttacaaaattttacctgtcctcccatattgtcagggcttaaccactacaaattcccaaatatttggttcaagtgccaacatcaaacttcactcaattttaaattcagtatttctgatgatgctgcaatgttataactaatatgccaattgaagctcaccccccttgatgaaaataaggcactgtcaagaaagaacggagctgcaagttttccttctattatggccctctgaatgcatgttccctagattatatatcattgtgtacacttatttatgataaatgagtttgtggggtcgtgttccctaagattttggttgtgctcactgtgaagttgtaagaaatccagtagttgttgtgtgcttaattatgtagtagcatctgaacatcttactctaaaattttcaattctaagttgttcttttacagtttatacacatatgattagctttttttttttgcgcaagcattcatatacaatgtttttccttatcatagtggttgaatcaagaaactttcacatcttaaagaaaggttttgtcgggcacagtgcacttgtttaaaaaggatagatgctaatccttcatctttagtcctcgttcggaagtgatgaaatgtggatgaaatcaaatggatggtctgcttgattaacacaaaaaattaatattttgagaaatgaacttaacaaatactccctccatcccaaaatataaggcacaaccacttttctcttatgtctcataatataaggcgtgcatgcatgcttacattaactaccatcttttggatctataaaattgatttgttttaaatcttatatcattaaatctcccaattacattgcttgcatgtatcaatgtgatataaccatgaagttgattaaatgttttcttagtttttgtgctatgagtggttatgtcttatattttgggatggagagagtagctagaaacaagtgttctaagcaatacagtagaataaagttattttaaggaatcgtattttcagaagtgtggagcaaataaattgatccagggtagattatagttgatcatcacttcaaaaaggggccttaattagttttatggatgacttaattatgactctgtgggtacactgatattgtgccaaattttatggagaactgcagttaaatataattcttttgtgtaaatctgatagcagatgtggatgtctaatattacgcacgttgatatatgtgcaggttgatgcgttgctcgaggaagtcaagaatacgccggttagcatgatttccgattacttaattatcagaactgtgcggcagtacgtaaacctctgaattccagcttatgttattttttgttctgtgtcttgttaaccatcctaaattccttgtctgcttctctagttctattttggctcgtcagcagattctggttcaaaatgttctccggtcatgggtgattgctgcagcggttatctcaggctattgctgggggtacaacagagtgatcaccaaacgtcctgtggctggctctgaaccaccaacagaaggtgaggtggagtagaggactggatagtgttttcttttggagatgggagtctggaagtctgggagaatcaagaatgcagtgaagatatgtggcataatctatcctgtgcataataactataactaatttagtcctagatctaattggtgtgggaattctataatagtactattatatacatagatctcactcggtttgaccggcctgtacatgtgttcatgtggttggggattctctgttgctgaaactgatatatatgtgcactgggagatctctctttgggttgatctgtgcttcaatatattcacaaggttcttccattcaccgctccactgccaccacacatgataacaacgacgtcacccgcttcaagtttgcctcgctagctctaccgcaaggctgaacatgtgcgagtcccagctcgatccaccatgtactcacgctcacagtgtagaagtggctccccacgaaccagggccccatcattctgctccaaattttaaattttaagtttatttcataatatatacttttaaatagctaagaatgtatatatatacaagtttaatttactcacaaattattttgtcattgataataaacggctcggataaatataagcgaaaagatagggcactagctgcgcctgaaaccgcaaatagtacgtacacaagtagtagcatatgtttaggttcataattactagaattggattttatttatttatttactacctgagtggccgtgagtttcaacgggataaaaatatattgaagctaataatatttaacaatttgctaaactaaattcgaattaaaatcagggagaatctaactccccatctgatttgctctcgatttgtgcttcagtgagtttctcctcgatctaaaatttgctcctcctatgtgctccagcgagttttttctccaacttgggtgaccttgatgaagactcagtaattaccttcaccggttagggctatgacttccgatcgagttgaggtcgaggtcacttgtggcaattttgcaacaaggataacaatattttatagtggaagtaaatcaaatgtgttatgcttttctaaaaacgaccccttgtatatataattatcctcgtatatagagagagagaacaagacagagaagagaggagaataaaagagaaaagaaaaaagagcaaaccctagggagcggggatggcggtggcggcgcggagggcactctggtacagcggcgtgtcaccgaaagcgcggcacatgaacagcgggcgagggcgaggcctcgacatctctgagcctaatggacctctcgatagctacatccggaagttgatggtgcgtgcgtactccgcaaattaaacccgcttcgatcttaatttgctacactacaattttggcctgaatatctgctatatggaaatcctttttgctgtgctgtacaaaagtataactgccaacctgcttgtcaactcccagatgatctaataaatctctggatcgtcagggtgccgtgctactcttttttattttttattttttgaggggaggtacccttgatttttttttccgggatttggtcgtcgacctaatttcattatgaagggaagttcagttactacaaattacaacactgtgcttaattacaagcctcagtcccagcaagcaaagaacatatataacagcccgaaggcttagacgctaatggatgctactatatattacacgccgtgaaaactcctgcggccttccacaccatgcatgatttcctctttgatctcttccaccagctgcatgctcagtgttgcgctccttccacagaaattaagctactcttgatctagctggttttcagttaagcaaatagcctcctgtctaatcgtcctggaacttggtgtgtgaatcgccttagcttgtactcactcaaaccccctattctatgtggggcagctgctgcttaattttctgttcttgattatcttgtgtgatgagttcaggtaggaattcagtccaaacatttatttgaaatgctaaccatcaaactcactgcaatcaattgattattatcttactctttcttgctttttctcgtatgaagagtcgatcagattcttttttttttgtgaataattgggctccatgtattttccctgaagtgggcctctgagaaggggatagtcagtttttataaagtattccacaagtgcaccgagcctgaattcatggagaaatacattgagctaaaactgtgttttgttcggtggaatgtggaaataccagatgttcccgaacatactaatgtcagtatatccttgttgtctagtgttctttttcccttagttatatccaccctataactaggtctggattgaaacttaacctgttttgggaattttttttctctcttgaattcttgggatctgggtttgaaatttacactggtacgtcgtttgcagcaatttatccaaagttcccaacagaacagtgacagtcataaatctctttttgagtatgatagctttctgaatgtgtgaggcaatacgaaatcttaagtggagcagactagaagaagaggaaaattaaagctccatatgcatttgttaactggaatgcaccaacacgcaatttatattacccagtggatttatttcagtaggacactgctggagttctttttttcttgtaccattttttaattgggatggaagtttggagaaattttaactttgttatgttcttgtttttctttttgcaccacttaccaggattcttatttccctgcccgtactaatgtcctactagcgaagtttcttgtgtttttagggctgtggatttaaatgtgcagatcaatgaaaattgggatatggactgaattttacctgtcttccaaatttagtcttgattgctttggttgggtatcacaactatcattagttttgtgcaataccaagtatggccccgtgtattggtatggtttgctttgttgagactgaacatacaggtgagttgtgagtgtcgaagaacttaatcaaaaaataaaaatgcacagctgacacgaacgcaatggcctttttggctatctgacaaaatttcgaatagaagagggacagtcctacacttgtacaaaattcgttcttatcctccccttacgactatgatatttatctgaagtaatacggataatatatattagtacattacatctttggcttgtctgaggttatcgctcatctaagccttcaccatacagcttctggcatagaaggtttgtatattaatcatgttgctttgcaggatgcaggaaacctggaggaaataaacagaatagggaagattttgtcaaaaagggatatggtgaaacaaagctccgagaggtagaacttgggatgcaacatgcatgaatttttcctcactaatgtacccttgtctctgcacacatcataatactccatccgtttctaaatatttgataccattgactttttagcacatgtttgaccgttcatcttatttaaaaacttttgtgaaatatgtaaaactatatgtatacataaaagtatatttaacaataaatcaaatgatagaaaaagaattaataattattaaaattttttgaataagacgaacggccaaacatgtttaaaaaaagttaacggcgtcaaatatttaaatatttagaaacggagggagtataacacttttcaatatactgcagcctgatctttaagcgcaagaagaagatgggcacacacaacatgcaagatatgtggaaggttgctggcatcactagttccgcgttcttgttcgggacagcattcatttccctttttgcagggagcctgcatggagaggaggaagaggatggaattctacaagacaagaagaggcttggacttgaagagtagtaagagggtttaagtttaaccttaagaccgaatataatggattagaaataatgcttccatccatccatatgcttaaatcattgttgacttgagacctccccttttatatcatgtaactgcagtacttagggggt

SEQ ID NO: 9785 - DNA, 9512 bp, Oryza sativa
gggaggagagcggcggcgccggccaccggccaccggaaggttcgtctcctctctctccgccttctgctccccccggatgttcggttgctttgttggcccccacgcggttctcgctgattcgtgtacgctcttggattgttgctgttagggttcgggagtggtggtgttgggtagtgaagtcggctgcggcgatgttgtccaggatctcgcagctcggggcgcggcttctgcgcgagaacagagctggtacgcacccttttcgtgtctctcttgttttttattggttaatcctctggaagcagctgagaaatacttccaaaccatgacgaatctatacattatcacgaatgattaaagaggagagagcgatcgatttgtatgaacgatatgcatgcttccactatccattctatggccggtttaggctgagccactattgttgagtaaatcttggtgctataccattggctttttattgttctccctcttgtgcagtagggaatttggcaagcagtacaaccagctattatcgaggtcaactcagccgacgttttgtcccaacggttagtccaatctgtatcttgttgttgtgatgcctagtggtgagtttggacgaaaattttgcataccctttgtatgtgttttcaccgagagcttaacttggccaagtcaactgtatcttatataccctttatgatgtttgcattctgaaatttgtatagctgttactgacaatccctacaaaaagagcaatcataaatgttttctagatatgacatggattttctgaaatgaccaatatgaattgtgcattctgaaactgagagacaaaagattttatctatctgcacattctccaccaccatctttatcttgggattatgttctgtactaccagaagagatgatttaccatttgcaaatgtccttgtatgtaatgagcactggtctgtaacttttcagaagaacatcttattctccacagcaacaactagtagtgatcgtgacgatggcagtcagagcaaggagaagtaagtatatttcctctcccctttcttttcctttttctggtatagcatgaaatttgaatacctagcaatatttgtattggacaaggtagtgatgtatcccatgtcgttgtaatgtgagtttcttcaatgtctttgttgtctttaaaggggcttctccttcagtttttccctcctaggaaatagctgtccaaaacaaccgattaatttttctaatgagcaaatttctttgtgctgcacaggatctctgtaacatttgtgaacaaggatggcacagagcagacaatcagtgtccctgttggaatgtccatcttagaagctgctcatgaaaatgacatcgaacttgaaggttactgatttatcattgcaactgtactatgctttcaattcttaacttcttttgctgataagaacagctataaaaagcaaattatgtttacccaatagacatggcgtccattattgattacttgatgttatttgacatgtttcatgtattgactattgactgatttttaattgtagttagtaacttggtctagtattttgggtactgcaggagcatgtgaaggttcacttgcgtgttcaacctgtcatgtcatagttatggtatgctctatataaccattcctttttttattatttttcatgctattgtagagattgaagtgccactaactagccatttcaattttgtccaggatgtaaattattataataagctagaagatccaacagatgaagaaaatgatatgcttgaccttgcatttggacttacagaaacgtaagtgaagatatcttgaaggttttattaatttggcttatccagtttcatggttccgtggtgcttgctgtctgattatcgtgcaaacaagaatgttgggtatcaaccaatgagtatgcatggtattgttagaatagtttaagtagttgatggccatagtgagggagggaggggaaaacaaaggactgggggcatttgatatgagaggatacgatatgcagttgcttccttaatcatcctgatatgtctccacctgtatctgtgtgcaacctttacaaactaattgccgctatccgtgacttaagctatatgcatgacataatggaaattaaagacaaagtaacttatcaaccaacatgttaaaatagccaagtgagatattctcatgctggtaagttgtaattgtataaataccatggtagctttgtatgcactagagtttttgttcaatttaaatgcgtgtcctttctaatctggcatcaattttgtgaactgtattcaggtctcgtcttggctgtcaagtgatagcaaagccagaacttgatggcatgcgactggcattaccagcagctacacgaaactttgcggtggatggctttgtaccaaaaccacactaaaagactgataactgagactgagaagtgagaacacaggttcttacacagcatcatcaattttgtagcccaacacttgtaacttaaacaacagcctttggtgttatgaggcttttgtgttccagagaggatttgttcattgttgagctcctcggttagttacggaaattattatttcatcagtgccacactaccaccgggtgaataaaatgcttcttctgcatgtttattggcttatatggtgcatcagcctttaatcttgacaaaaaagtgttgacattgtactggggccagctcttttaggccatctacaatgcgtagctcagcgagtggctttggctcacggcgtccagctcccgttcgcttgggcgcttttccgcccaagccgtcccccagtagaggcgcgcgtcttcttgcaagggacgcggctctacgagctcctcggctgggggaccgagcgaggagtcgcgttgggtcggctgtggctaggggaggagcatgtggaaaccgctctctcccccggtttttccccttctaccctcactagccaccggaggaaaatagataggcggcgatgagagagcgagggagtcgccgtcattactagtaacttctaactacacccatattatagtcaagtgcagtacttaaaaaaagatcagcgaaatacctacacaagcttagccctaactttggcggcgatggcaagtgaataggagcgcgaagaggaatttttgtgaagatgaagcggtggacaagacgatacacagtatcgtgttgttttttaggaatctttaagcttttttttgggctgaagtccattaaacatttactgaccttccacgggtttttagggactcaagtatatttgtctttgcagtatgcacgtggaaagtatccaataccttgaaaattctcttttcttgctgttacacaaccttttatttagaagagttggtacaatgtgatttaaataggtggtgaacagtgagctttatagtttacactttaactttttttacattaaagataagcactgtttagcgtatgttaaacaaatgcaatcagccaactgctgcgtcattgtttttatttaacaaaaaccacatatgtgtgcaactttttaagaccaatatctttggctttatgatgttcatgatatttcttcttggttgttaatagggagttggtaaatccattttgagtattattaattcatatttgacaccatgtttgccaataattgtttaataaaaccactcgactggttgatttatctactctctgagtatttatttagttatattcaactaattacatagtcagggctatacataattatgtgtataaaaaaattcttcatcagttttaattttttttcagccctccacaacctcatatttgggtttgaaagtattcaagagactatggaagagatattaaagagaacgaggaaagagggcgaggaaaaagaaaaggagattagggtggctgacatatgaagattaggatgactgaacatgtggccgtgtgagattaattttttttatatatttatcattgacatgtgggtcttatgagcggcacataggttgaaaccgtttttgaaaccaccgaataggttgatttacaccggtttttaaatatgaggaatgtattatactcggttttacgattgaaaggtgatttacacaggcaagagatggaggagggagataaaatagacttgttcctttcaaaaagtagcccaacatcttcattctctctcctaaaaacgaaacaaagggtacacacgaaaaaaaacaaaaaagtctcctcgtcgttgtcgtcctccttccgcggcacgattcgccggcgggaggcgggcgcgaactggaatcactgtagcagctaggctaggctagaagaggcgaggcgagtggtaaatgcttgcctatctaggccacgcaaccctaatctcaaatccgcccttccgccgcaattcgaattccaattcgaattcgatcccccacccctcccctcctcgaatctagggtttcacctcccctcccctccgctccgctcgccggagccccaccatggaccccggccgaggcggacgccggagggccggcttcgagcgcgcctgccgcctgcccaacaccgtccactccgagatcgcctccgcgctcccgctccccacgctcccgctcaacctcggcgccggcctcctcgacgacgacgaccccctcgccgaccccgaccgccccgacatgatcatgcaggccgccaacatcgcccgcatcctcgccgacaccgacgtctcccacctgtgagtacccaatccccccccttcccttcacttctccgcacgcctccacgctgctcatttcgctcgtgccatgctgcaggggcttcacggaggcggacaacgtcgagacggaccccagccagtgctcctggctctggagggaggtgctcaagcataaccccgacgccttcaccatcaaaccccgccctctcccgccttcccaaggtaaacgctctgcaaattgagccttcccctaggacctcagcctccaattgctccattctgccttgtaccatcgaattcaaaatggactggatagttacttacttctctggacttagatttttcttctacatgtacttattactgtgtgctaagcttctgttctagctttgccagcttcaaaatgcctgtatgaacagtagtattcacagtgactgccttggactaaacattccctgtgttgctgtctcgtgctatcatttagcaccgtgttgctgtgaaccttttagtacagttgcattgcatctcgtttgttaatggtgtgctgcatgttggatgagttgctgctctgctcaaggttaaatttgctttcaagtttcaacgatcgcagttccatgccacgaaaactgaatttcgtccattgttattctgagggcttttacaatgcttcagaggtactggaggtaccttcttctgtgttgaatatctacccttgatttaaaaaggtaacttagaaatagaaaacacatagacatgggcagttttgtaattgttctttgccaacaaacttctctccttgacggtcacccatttagttgctccatggtgatcagctcttggttcgctatttttcatcaatacctgtgcacagattcctgtaactaaattcaaaagtaatattctctacccttctaccccttcgtatgatctgtaaagacaagagacatggacctggcgatcctccttttcagaatatttcaccaatacgtgttgtgaaagttgattacttggttctagtcttctagtacataattgcttggttcccttcttggtcatgcttagttacatgaatatgcttttattatttacagagccccatgcaagattactaaatacagttttgttactaaatacagttttggcctacttaatcgtgcttggttctcctttatctattttcaagcaacagtaccgagtttattcccatgttttttttaatcgactgccgccttctaatttgatataaatatacaatcacgtatctaaccctccacctttttttttaacttaatacctgccccacatttttaataccttaccatagctacctttccttgtggatcattcgattacaagcgatgaacggatgtagcgcctccaaagcatcctaggtctcttctatttttcatgtggaaagcacttcagtgttctcttcttggttatctatgttgtacatctctgaatttagtttacaacaaacatatcatttttaaatacttctgtcagtcggtctacactttacaatgtaacctcccatgtgggctaagtttccttgtgatgttgtgctaaacttgtgtctacctgtcgaagctatgtgcctgccagtgagtgatgcatacaacagggttgctgctgcctatgtctttgggtccagatatgtctgcattgtagtgccccaaatagctctgttctgtgaatggccaaaggcattaacagtcagatgagacacggctttgaatacatatataacgacatgcagctgaacatacatgtacggtttggttcatgattgtatagggcgtaacacctttgggccccctaattttgcctaagcccgatggcttattgtggtttgtccattagagaactgctaaacttcgtatctttacttatggtatttgtatgtttatgagggctttccatttgtgatttcacgctgattctgtttaggccttggtaggtttagtttgcacaaggttcaagcttattttcctaaatagttatgctagaaatggatgattctctactatcttcaggccccttcattattgtctctttcatgtgcaaacctcgcagtattgtcatcctgcagtccaccattgcacagatccacgttccattaacggtgcctctgttactattcttacactacagagaatattgtcatcagaaaatttcacccaattgtattgccacctttttagtgagctgttttcagttgttgttgggtggtacttaatctttcattctacatgtatgctctgctatttctttctaccaatggaaatatttcataccaatgaatttgggctacaaagatgatgtaatctttgttaggttctatattttacattctaggcacataaataactaccttatctccccgcttttgccggtcgagtcacagtctttatctttggatgcttgtatggtggtactcttggcgcaacctaataggatagtttttcgtacggaactatgggtatcccttttgatccctctagctggtcctattccgattcattcacccagcgatcagtaatttggcaatgctatgccatatcttatcaatagtatcccaagtagatggcaagatgcaaatagaggaaccaattaaagatgtattggagtaacaggatcaaacgagaacacaatgaaagtagagaggcttaaattgttaggtaccctgaacttagtaaattctatttaaaaaccactctgttccttctcttagttcgcccacatatgtaaagtatactgcattggggaccgtatgaaatttttaattttaatctgaaactgagaattggctgtaatgagtcagatagttgtgggaaataagacaagatccacttggtagctgcagggactgtatatggaaggatagaattgttgacttttatttgagcagcactaaagaatgattctcaattatttgggtaacaattaaatataacctaaataataccggagtccctgttttcttaagaattaagaatttcaatgatactcaatattctaataagatgaacccaagaatcacagcggtgagagcatgtacttttgtacctcctgctctgagtcgatctctggaagtagtgggcgaaaaaagtccttttgtaaaaatgggtaaaagcgtttgtttggattctgtttttgctgtttacacctcctgaaattcctgcattccaaagaagtccttggccttgttttttgttaataacatgagtgttacatggctctatagaagttgataaatttgctgctgtactagcgctgtaacgtgcgaaagggcttgcagcctagcggttatagtgctcaagtagcatctctaggtcctgggttcgactccccatgggagcgaatttcaggccttgcttaaaaaaggtcactcgttggccctttgtaaaaacacgtgttaagaatcgacctatggagggcggaccctcgtgtaggaggtaggggtcttgaagcacgggttaaggactgtttttacgcgttaagaatcgatctacggagggcggaccctcgtgtaggaggtaggggccttgaagcacgggttaatgactgatccatagggagcgagatcgcatgtgggggatcagggttcgtggcctttcttggccggtttggttgaggcttcttcttaatgaaaagtcgtgggggtggtctttcccccaccagtcgagtttttttagtgctgtaatgttcttttctttttctgcacctccatgtatatgtaatgctattaataacttaccgtcaacatggaaaatgctaagataagaatttgtcatatttcctttttctcattttggctgcttttgtccttgcaatatagtgaaatattgtccttccaatatagtcaacatggaaaatgaattgatagcagtgctaattctacactgaaataacactatcaatatagtgtttgtttttgctcgacaaacacaattcactatgtggcttaccattcaattatagttcaataatctgcattttttggagttgtgaatgttttggactgtgttactctatcaagctttattgtgcatcatatctaacttttagttacattggtcaagtttttcagatccccttgaaggccaagaaaatcaaaatcaggagcatgagaagcattttgcgcatgttgcgccaaactttaatagcatgcgaaaggaccatggatttcctcgggatgaccctatcccacatagcgagcatcttaatgtatgcagtatgctagataccatttgtttcttactataaatgtgcatagttcagcctaattactttgtctttgtgctatgctattttctgttgtagaatgatctaacacaagatccagttgcttcaaagaagccaaaagttaggaagaaagaaatccataattctgcttcaagttctgaccctagcattcctaatagtcaaggtttactcttgttatctctatatctttctccatctgccttcatttttgttctcaaacactcagtggattcctgtttgaattattttttgtagaagttatcgccaacttctgtgagatggtagaagatttctgtggaagagtagaaattcctgatgatgcagatggtgatgagtggctatcaattccactgaatgatgctaaagttcttgtaaatgaaatcacatttgttcggtcaaaaaagattttgcatgagattccgatggatacacttacaaggctattacatgtgatagaccgtcagatccggtgttctcaaggtttatcaatagacgtgaaggaaaatgtcagcgttgggctgcagg

SEQ ID NO: 9786 - DNA, 42780 bp, Oryza sativa
ctatagctgtagcgcgtttctcgttaaaagcatgtactactagtatcacaaattacaggcccggtagatcctactactaggagttaatagttcctagaggtgcgaggtgtgtcctagatagatatccgatcgaacatccaataatcatccatgtcagcaggaactctcaacctatgaaatgaaggggaaaaaaaagaaacagaagagggaaaatatatatatggtcactggatgctgctacttttatacaccagaagaaagaaaaggagggtgaatatgtataccagacataaggaggaggagttggttctcctagcgagcgttgacggactggcatgagtcatctagttatctgcgccacaaaaggctgcagcagccagcgaaaaggaattgcctctgctgctgctcctgaatcgcgtgaaatcatgggggtcgcccgctcgtctcgtccgtctcatcgctccccctcctgtactgacagacacgacgagattcctctcctctcctctgctccccttctcttccttccatcatcgatccgccgcagggaggagggatcaggcgacgaccaccaaaaacccacaccgatccgatgagagagagagagagagttgggaggccagatccgatctccccattagtaacttatccctggaaagaagaagagagggaggggcacgcgaaattccatccctgcccctctcccttatctgactcactccttcccttcgctcgctattcacggactcatcgtacgctcggctggagtactttattagggctggctgtgttttcccaactaatctcttttttttccatcatcacgttttttataaacttctaaacggtattttctttcataaaatttatatatataaattatttagaaaattaatattgatctattttttaaataaaatatagctaatacctaattaattaaatgctaattgatagctttgttttacatgcactgtaaatttaatttcggaaccgcaatgaacaaacacagcctagttgaggctgccttcgcaaatctatcgatttattagatatataattacgttgacaatatttacataaattaattcgtttatattttttttatgaaatttaaaatttttaatgttaactcactgttatttaacatacatcctttcaaatatatcttacatctaatatctatagctctgtcaaacataatttttatttttattgaattccgatgagaccccttggtgccaaatttaaagccccatagttattgattgttttgtgcattcttatccttatataagtggaaattcaaacttttaaaacatgattttatgaattttttttctcatcatagtttattttataatattgtctttttatcactaacaacacgaatatataaaaggaggcaattttgcatctaaccctattttgcacaccacctaccaatttgaccccttctatgaacttcgttcgtttgatccttgttttaataataactaaagatatagtttggacttattatgttaaggtaatttgacactattttctcaaatcttttaaattagtttgacctaaagattattttttgtcaaaaatttcggtttgacagatgtttgacaaatttaatatagactagaaaaaatacccgtgcgttgcaacgggtaaagacgttatttctataatatattaagagctgagcaataaattgaaatattgtatcgctatacattataattgaaaaggttaatgaaaattctaatattgggatcgctatatattataattaaaaaggttaataaaaatctttcttgggttttgagccgaaagccttcattacttttcagcccaaggccagtccgctacctccctttatttggcctgcttgcttcaacccagccacgagtgaagccgttttcagccctaggccggtccgctacctccctccgtttggcttgcttccttcgacccatcaaatccggctgaatctttctcgatcacccaaaaatggttaagggtttttgatccacttacctcttttcgttttacccaaaatcaaagcgtaaaactcgagataaaaacaatgggggaagatcgtcgtcatcatcggcaacagttagattaaatccgcaaaataaagctaggaaaatcatggagaaaataatgaggaaggagtgggaatcgatttttttttcaatcaaattggagtgaaaacgcacaatcgatatggcgccggcacagcgcaagggttcaactcggtagacgtgccgcaaatagattggataaaaaacagacgagaaaaaccaaaagcgcacgggataaaaaaacaggtgacaaaaaaaccagaagtgctcgggagacacgcggtgaacaaatcggatttaaaaaaccggaaaaaaaaccgatagcacgtgcatagaaaaaactctttctcgtgaaaaaaaagcaaacggactttttttttgtttttcactggcgagacttttcttttccttttttactgtagtcggacgatttttttttctttttttactggtgacgacataagctttttttttctttgttgagtcggaattttttttaccttttgagtcggactttttttttcttttttacctactatatggaaatttcttattatttttaagtggagatagagatacagagattaaaccaaaacataaaattaaaaccgattgaaacacggatgacgtatcaaataccggcaaaaacatcttcaatttttataatagtagagatagagatttgacaaaagtgtgagtaaactataacaaattcttttgacagcatccaccaaaaaatgcatatatcgaatcaaaaagcatacgtacatatatattttagatcaaaaggctatcgcccagctttactgaaagcataagaagtctgtgtacagaaataaggctggggattccagcttacatatcaagttcttagccaacgacaccggcaacaaagctgctgactcagcacaaacataccatacaaaaagcaaaagaattaccataggatgacacataggataaaagagttttgaaggcactctcttcacagtgcaagcaccactagtgggacccacaaatatcttcaccaaatccccaactgcttctcctccctcctcactcatcacgccaccaaatccccaaatccggcgtcagctcaaccctcctccatcgcccattcccccgccgcctccgcccctgccgctggctatcccctcctcccttcgccggctcctcttctccctccgccggcgtcggccggctctcatcttctccgggccgagcggtggcgtcgtcctccgggccgagcggcggcggcgacgtcctccgggccgagcggcggcggcgctatcctccggaccgtgcagcggcgtcgtcctcaaggctgagctgcggcagcgtcctcgaagaagcggcggagcgacctggccaaggcggtggagctcggcatcaacgggctcgactcgcgtggcagcggagctcggcgtcgacctgtccaaggcgacggccgggagaaggaggaggtgggggagtagatctggccggcggctcgttctcggcgttctctccttggcggccgcggagcccgctctctcctcggcgcgctcgtcctcggcgttcttggcggcggctcaagaacgggcggcgcggttgtcctcggcgttctaggcggcggctcaagaacgggcggcgcggtcgacggtgccgcctcgcctcgccgtcggccgagcgcgcaccggcgagcctttcccctccctctctgtccgccgccccacccctctccctcccctattccatcctgccgccgctgccgcatccatccagccgccgccgccatttttgtttcatgggagccggcgccacagtgcaagggagagggcacggggcggcgaaggcacgctgcccacagtgcgcatgcctcgcgatttcagcgtcgcccttgacgaagtttcacgtcgctatgtttggtcacgagtttctctgtttggtcccgggtcttagcgccacgtcgacgaaaatcctacatagcacaacaaggttctgcttcacgtcctcgcactgtgaagggcctaagagctaccaaggcttttactagttactgccctctatccggcagatcagctgcttcttcctacttcttggatgctggcatgcagtgagaccctcaaagcctccagctctcccctcagcttcaatggaaccaggtttttccactgtaagaaaaatgacaatgctttataaggcacatacgtacatatatatagtacaagcttaccaagtaaattataatgttcgcatctattttttatgtatctttaacgatgatacaacagtgatattaaacatacgtaatggccacgctactactgtctaacagcataacgtcatgtcagccttcacacataagcacacgcatacatacgtccaacaagcaagtaccagcgagcattctcccaaaagtttttcttcttagaggtggggtaattgtcacgcccagaaattcccgaatagaattccaaacagaatgtgcattaaaatccccgtccaggaccggccggggtacacaagcgacaaagttgacatatagatccacgtcttacaaacattataaaagtcttacataaatgcagcggaaaacttaaaggataactggagctaagccttgacttggactgcagcgggaacaccactccacaggcatcctcgacagcacggacgaagcctactcctcggagaaaccatcatctgacgcatactcaaattctggggtttggggaaaatagagcaagactgcgtactacccactgtactcagtaagtcataccggaataggggtatgatgcaggaaattatcaagggatagctataatggttcatttgcataaagcggacgattataaacagaagttgaaagcagtaaaatagttgtaataattaatcaatattaatcatccactgtccaacgctataccacgttgtaacaggcccaaccatccacctatactagtcaattccattagactggtctagggtgagtataatcacggtgaatctagttgaccgcccataaccgcgggcacggctattcgaatagttttactctaatcagaggtgtacaactgtacccacaagacacagccccacgacacgtttccgtgcgccgacatgccaccacgacataccggaaagaggccgtgacaggacccttcgcataaccccctctaaccaagcacaccacacctcaggtttcacccccactcctcgcaaggcagcgggcaatcccctctcgtgcctaggtgaatccggaagccgcataggccgtcgcagggtccatccaaactccatcacgcccacccttacctggatgcgtcggctagaggaaagctatattacaagcccagccgttgcccacgctggcttgtggaaagtacgaggaattcttccagtgtttcccacgaaccgttccttaattgccatgggtgcgaccatcaaaaccatgcacccacggcccaccatttaatattaattaattaaccaacaccggagcggtgagcattaaccaacaacaatcctagaatttgatatctatgcattaatgtagttccccattgtgtgctagttgaactaagcaaagctaagcattccctagtccaatctctagtcatgttatatcccaagctaacaaaggaacatgttaccagatagcatggctatgacagtaggtaaacatcccatagtgatattgtaaaacaatgtagtatttgaaggaaaacaatggagcatttgcaatataggatcaacatgttcaagtgacaagcatgacttgccttgctctgcagctggaggaatttcggcgacaatttcaaggtacaccggagcgtcgggagagccggaatctaagcgacaaacaaagcaaacaatacaaacatgctataagactactgaaacagagaacaaaatcatttttaatggattctacacattttccttgatttactgagacttgaatgggcttaaacggagctcggatgaatcagttatgaattttagaagattcactgtgtttttactataaacggaaaaatccttaattgatttattgcgcaataaataaatcccggggagagagagagggcggcgccgacatgcgggccccacatggcagtgactcgagagggcggtccacggcggaccgggtccacggaccggggaaaaccggcgtaccacgtggtgcacacgtggcaccgacgcggcgtacacgcggcggcaacgcggcggccgaaccgacggccccggtagatcggacggcgggggtggctcgcggccggcgcgcgcgggcacggctcaagccggcccggcggccatggcgcgcggtggcgcggcgcgcatgtggcggcggcgcgagatggcgaccggcggcggagagaggcggcgtcgcggcggctaagcggcaacgcggtggctagcggcgcgggagagagagagggagggggaaggggaggcctcaccgacggcgaccgacgacggggagcaatggagggcggcggcgacggcaggacgatctccggaaccacctagcgaacaccgtggaaggggttagtgagggagagggaattggaagagggtgaggacaccggccgaaggcggcggccatggcggtgctcaccggcgaacggcacggagtaggttccggcggcggacggggtggcccgtacgatggcgaatgcggcggcgtcgtcggcgcggatctgcgcggcggctagcggcgaccggagcggtggcggcggcggcgaagaggagggcgacggcgctagggcgttagagggcacgggagggctcggcgagatggggaaaaagagagaggggtggcggtgacgcttaaatagaggaggggaagctcggacgtggtcggtagaggcgggaatcgccggccgacgcgggggagtgggggaggagagagaggcgggattcgaatttcgaatcccggccatctcgggcgcgggcgcgggcgagagggagggggagtgggtgcgggggatgcggcgcatgcgcgggcgtggccgacgtggcccggaggaggcgggaaacgtgggcgcggcggtggttgcggggcgcggcggcgccggctagaggaaggggacgggcccgacaggtgggccccacctgtcggcgaccccgggagagagaggagggaggcggctggctcggctaggcctcggcctgtcggccggcccagcgggaagggggggggaaaggagaatgggccggcggcccaattgaaggaaaaagagaaaagaaaaaggaaaaagaaggaaaatagattttcctgggattaaatattgcttgtgctcaattttaattggttaaaattatttctagagctctgaaaattccactaaaaatcttgttagaatatttcgacatgtagaactcaagaaaaattccacatgctaaatccgattattatttgcattaatttattagggttttctcttgcttttacaccgatattttctctggtggattataaattcaatttaggcttgggaaagaacttcagggtgtgacagtaatcctggttagaggcggggcttgcccgggtttaagtttgcttgagaccggctcaccattcttcatgtcgatgtaattaaaactttatttcccccaattttaatgaaattgaccggtcaatctttggccgtcccgacaaaaaaaaaagaaattattttgttaaatcctcattcccttttactcctgaagcagactatgccggcctgctgttaatctcatcactctctccatcagctgcattttctataatccttctcagacaatctatttccgactgttgtagcttgtgataatcttttataaaaagagaagaggaaaaagaagaagaagaaaattgacctgctcgggttgcatatcctcttcttttttcttgagatggttgggttaatgaaagtgtaactggtgcaggtatataacatgtttgcgtggtgctgctgaaattcgtttgcgtttgcatggtagaacacacctttacccttcaaatttcaagtaaagttgtgcgaaccttgattgacccttgtgtgctgtacagtcatgttgttagtactggtatggtatctttgttttcagttcatatatcttcgttgttttctacgaaatttcaataaagtttgtgtgaaaattctctatgctacatacaggttcttgcattcacatattccagattttgctctctaaggcctcgtctgagatagctgaaattgataggttgatggataatgtgatttttgtgatagccatttgacttttaaagtagtactagtagcttggaaaacatacaaacaagaaatcaaggttgtgttagttcacactaaaattgaaagtttggttgaaattggaacgatatgatgaaaaagttggaagtttatgtgtgtaggaaagttttgatgtgataaaaaagtggaagtttgaagaaaaagtttggaactaaacaatgccttagttcacaccaaaattggaagtttagttaaaatcggaatgatgtgatgaaaagttgaaagttaatgttgtagaaaaacttcgatgtgatggaaaagttgaaagtttgaataattattttggaccaaaacacggtccaaataagagaagataatccctccggagcgtcgaagagtctaatctcctgatggtgtacggcggctacggcctggaaaccagaacacaagcacgactggaaaactttcgacttcggggtaacgtggctcatctggaaattaagaatgcaatgctcaaatcttagacggaagagcagagcaatttatgacggtgtttacatgcaggtgtgtaaaattttgacgtgtcatatcgagtattatataggatgttgcatagggtatttggacactaataaaaaaataattacataatccgtcagtaaaccatgagacaaatttattaagcctaattaatctgtcattagcaaatatttaatgtagcaccaccagggtttcaaaaaccgccgggggcccggttaccgtcacccggcggtacggcggttaccggcggtaaccgcggtaaccgcgcaaaaccgcgacaaatttacaaatcgaaatttgaattcaaaaattcgggcaaaccgcgcggtttggcgcggttaccgcgcggtttgacgcggtaaccacgcggtttggcgcggttaccgcgcgatgtgtaatgggttgcacagtaacgggccggcccattttttttttctttttccaattttcaaatttattctccgttttgctctcaaatttgaataaatattactcttttttgagaaatttcttcaccataaaacactataaatcaagcactaccttcactattttttttgatttttttcttttttttttaaatttttgaatttggacgaattttattaaaccgtaccgcgcggtacgggtaaccgtacccccgcggtacgggcggtaaccgcggtaaccgcgcggttaccggcggtttttcacacctgagcaccacattgtcaaatcatgaagcgattaagcttaaaagattcatctcgcaaattagttgcaatctgtaccataattattttttagcctatatttaatatttcatgcagatatttaaacgtttgatgtgacatggtaaaaaattgtaaggtgggatgtaaacaggcccagtgcaggagtggaaaacttggaaggctgcggggttagcaagcaaccctacgattagtagcggttttggtgtgtggcaaaccagtggcctggttcggtgtgagagccttggctctgcttgtactacaatacaattttttgaaccctctccttttcaatatatacttcggccggctacgccggtccggcgaaatatttatcaacattggccgtgtttatatccaaactttcaacttttttcatcacatcaatctgtcatatacacacaatttttcagtcacatcgtaccaatttcaacccaaacttttaactttggaagaaactaaacacagccaccgtgaaacttgcatagcacaatgctttcccatagaaaagattcggttctatctctcttactttttttccctgttatttaagtttcactgctaagcaatatgcatatttcactgatgtcttagttgatttcagctgtttgtaatttgcaattggatataaggttaattgctctactattttgtattacgaaaacttgaggaaggcttgcatatattttcagttccggttccatctcgaatagatactttatcgaatgcctagcattaacatttgtggcgttgagatgttataacttaacactaaaattccggtttgtatttacataaattttttgacattgtttattgttcaagtaagtttttcataagagtcaaattgtcaaaatttcggtcgtttgagacgctgcccatactccgcattctccttccctgaagaattgcagatacacaaggctcccattttaccttttctttttttttaaaaaaataacaagaaccacgcataaaaatttaggaaccgcaactggttaaaagatcagtgcactgcacatttataaacagcaaacaatgagaagattaacaaaatcagcggcgcatgaatagcccatagaacgagcgctctgaccagtacgaaaacgtggagggggaaaaaacgaagccattaaattaaacagaaccaagatcgcgcatgaccactactgataacataacaaaatgtagtagaagacgagcaccatacatcccctcagtgtcacatgcatatactgagaacacaattcaaatatatgttaatatgttacacaccacggttaggacaaaaggatattaagtgcaatggctgttatgtcagcaataacaagtcatcacaaacacacgatgagagctgataacaggagaacaagtgcttcctttcccgaatcgtttgcatgcatacttacgcactcccatctattttagcactcaaagtcccaactgcactggacgcaataaatatcgctgcaacattaccgccccacattagcttatctcgaaactccccattgggcaccccccaagaagttaacagcctgtgtatatgcatgcacatatatgaagctgaatccagggtgaaaaaaaaaagaataacaaacttgaacttgtaagctaccacatacctgttgagataatttctatcttcgctcttcagtttcctcacttcctccacatcttcaacaatctccctttgtgccatcgcctcaaattcatcaaatcgcctgatacttttgacctgattatcattcattaccttgaacatcaattgtgacaagattgatcaagaaacgagtcctattgttagagagagaagaattcatagacttcaatatcaatagttttcaggatgtcttcccaatgttaagagaataaaatgaacatttgcatactgcagggtaaggttagaagttagaaccagagcgggccagtgctgtgcagtggtttgcaatttagtgagttgagtaatcattactaatgcaagctatatttttctgttagtaactcttcaaaatgattgtattctctgcatatgctttctttttttacaaatataatctaacatgaatcacacacacccacatttctttaactatatgcaattatttttttaggcatacaaatttgagactggtgcatacatgggttatttgcattcttaacatgtactgcagaagattgacatttcctaacttcaatctatgttggcaacttggcatcaacaaggaagcaaaaatcacatcgttcctagaacatatcctctctaagctttgaatggaagcctatctagcactccaaacatatcctctcgaatttgcaatatctttgatataacatcctaaagtggattttgcaaggtggttttacccatgcaatatatgtggaacatacacaccaaactctctcctatgtatcaatctctctctctctttcaccaacaaaccaagcactggaacaatgccaacataccatcacagttggtcaaaataaagagtgaggattgatgaagtatcaaagtatcgttgtagtttgccaaaactgcctgtttaagcttcccataggcaaaaccaccatggaaaatcacattctatggggttatatgggttaaactgtaaactttttccgtgtgcacattttttttgggtgtgtacgtgttctggggggtggagtgggggatctgaagctggtgttgaagttccagttggtggattggacttctgttcaaagtttaggaggtggaccatttattctaaccaaacagcattatattcatgtggccatctttttctcccttttctgttgagaaagatactcccttttatttaataagtaataacacaaggttgaactacatagaaagattctcccttttatttaataagtaataacacaaggttgaactacataaatacaagaaaaaatcacatgggagtcagagcatcattttaagaactagtataacctaccagcgatagaaaatacaaagcacatttatcttgctgaagtggccaaaacatcatttactgatagcccacctaacaaagacacgatacccataggtagcggtgtacgatacctaggtaccatgctgagtcagcaacataaactgcacgattcaacactatggcgctttatagtctttatgtaacaaaataatgcctttgctagtacatttgacagtctttgataatgtacatccctgacttgttacccgagtaaaaactaatgtgtgattgtgatagaaccaggacaaaatatacgaaaacaaaattagaacgagaaagcttgtaagttgtaacatataccaacgtaacttgtatcatacatatgcggaacgataaaaagaaaagtaaattttgctgtatatatgttctagatcataattattatgtctggtaggataggatttagatggtaagtaaattacctgtattatattatatgactggattgttatcatttcacagaaacagcgctccaagtaggaaacataaataagtgattacaatagcgaggtcagtgaccttgagttcgctcaggctccctcacctaaggggattgtggtgcggaattgatccgctccaatcctgtcccttcctcatagggattagatgaacaagtaacagggagagagatggatggatttaaattggcgtgcgtctcttaaccgcacgaatgcgccatcctccctccctcaaagtatttgtatgcagatagatttttttaataacttttgatttgtaactgttgtataattgtgtaagaaacgaagggggcaaaaaaaaaaaagggggggggaacgggaggaggatggaaacggattaggtggtacctctcccggggaggaagatgaggaggataatctgctgctgcacaaagagcgggtgcggtgggggagaagcctctgcagggcgggccgaagcaacaaaggcgcggacatcgcgggcaccgtgttctgactctgagctagggtttcctcttcctccctctcgattcgattcgatgcgagttgtagaggcttaggctgctggaataaaataaaaagaaaatcagaagatgatgggccgggcctacccagacagagttaaagcccaaatccatcgccacctcttgtctctcaagagaaacggctccaagttcttttcctttttctacttactattattattatataatatatataaataatcctcacctacccgacaatctctctcccaccccacccctttctcgtttcgttggaagaagaagaagaagaagaagaaggtggtttcgctggaagaagaagaaggtgaaaccctagatctgatctcggatgacggcgcgatcgttgttggccggtaggatggtggcggcggctcgccgcgccttccgcagctggcccctccacacaatcacaaccaccaccaccaccgacgccgccactgccatcgccaccaaggaacagcacaaggtatgcaggagccttgattgaccacctgcctatctttgttcatgttgggttgattgatccgcatccatatccgctcgcgcgagcccttcttttgatttcgattctgtatctcgtaatttggtcgatgcgtaggtggtcagtcgtcttgatgtgatggaggatataagctttccctacatgacacgcgagatggccgccgtactgcggcggagccgtgttgcggctgtcgaacacaacaattttaacatcaggcagcttgctaatccttaccatgggtatgttggcttctttcctctctctctctctctctctctctcttatatatataactggagtatctcggacgcaacagcacaatcagtttatgcatattgatctaacctgtctcaatttgcattgttcgtaggccggctgatggagatatcctgtatgacagggcatggattaacaatcttgctctgctttttactctctccacgttatttggggcgtttagtactctagccaagctaaagcagacacggacagtggaccaatgtgtccagacccaaactagttaaagcaaccactgaggttgtatggattccagtcccaaacttgttaaatcaaccgctgacgttgtattggatatcatactctgtatgtcgtaatacttaatttcatatgctattgtcataacttgagaattacttcctatatgttagctttatatgtttctggatgttctgttgtgtctgcccccaaaatacaacttgctcagttaagatttctcatgctactttttgatgatttgttcaccatgtcgttaacatggcagcagtattaggtttaggcacatctttcttttgttattacttattgcactggaatatcatcaagctagaatgtggactacctactagcatagcaagttacagtagtgtattatagtaatgatattgagcttggatttggcatatgttgtgcctacacgactcttttacatgaatcagagtagagtgtgtggcttcgaaagctgcctcctttggtccatcatgcctgctcccgtaacttgctttaaaaatgcataggaagttataacctactactgggagtagctactcccaccctagtagatgttctcctcactttctaattgatattctgctatataactagttgattttctgctccatttctagttgaataattttctgcacattttcagttggtagattgctcgtttcatgtcatatatatactgctttttttctgccctatattctgctccttgtcaagatgatttaccgatcctcttcaagtgaatgtatattccgctcattttcatgttcatattctgtttctttccaactgattattttctgctcccaacgaacatgaaaccatgccgaggataatcatcatctgatctcttttaacaaatcccataatgggttttgggaatagcgtggctccaagcaaaggaattaagagacgcagaatcagctgtagcaagtccaactagcatatggaagtcctcgtggacagataggcagtaacgcagtacaaacattttgtgccttatctttgtgtttaactgatccatctggctaacgaacttctttgtacaggaatctgctatgtattcttagctgcgtgcagcaaaattatctagcaaaatgcaatcaatagcacaacaacagggcaatgaataaaactccctactcacctgagtacctcacaatgtctaagtgtccctttaaaaggcactagcaatcgtgcacatgcaatgcacattttcagccatatacatacatacatacatacatacatatatatatatatatatatatatatatatatatatatcataagatataaataatcacattaaaaaatataatttttatcgagcaactttatgatgctttaaaaaatgcataggaagttaaatcaatgtgcttcatcaacaggtgatctagtaacgatgcacagataccagttaaatagcatgtcctttattttaagatagctaaacatgtactttctctttctccgtttcacaatgtaagttattctagcatttttcatatttatattaatattaatgaatctaaatagaaatatatgtctagattcattaacatcaatatgaatgtgagaaatgctagaatgacttacattatgaaacggagggagtaccaaaattttgcaaatcaacataatctaaggaggctacactataaagaagcttgtaatcatgctaaagaaaagagagtcaatattgataatttgttttgttagaatgtattatcaaatttatattgaaccttacatatgaataaacatatctctgaacttctataaattacacatgtttatttacatggtgaatcattataatctaatacaaccacaacaaaattcctaaatgaatttcatggttatccactttcgataccatttgaagatctggctttacattcagactacctttacccgattacttgcatattttgaattcgagctctccattgatattttaccttgactaaatccgttggttggttttgatgaaaaaaatgattccaacttgcatatgcagctgtaacagttaatcttcaaagttcacaacgaaaatatgtgtaatattgaaagcaccttataggaaggaaacatgtatagaatgaatcaaattctaaagtaattaaacaggtgcaatcttttaacagtgtaatgcccatattttttattgagagggatggaccagtgaaccatcatctctgctagtagaaagtaaattccatgcataattctcaaagaatcagattaaaaacatttagtagcattatctgaaagctaaagaataatttcttttagtgcaacaaatgattatctctacattacattttaatcaaatttggaaaaatataggtacctgaacaagtgtaagcctagaatttggaaaactatcatcagctttatgaaatttattccttcgtttttgttgcatagaggatggtggatggttgggtcagcacctgaaaggaggagcatagtactaccattcacctaaatcaagaccaaatttcaaaagtttgtccaacttatttggtagtgccacatgttttttttgtgggtactgttggtacaaaatccaactagcgtaatcaatgtgtattctgtattcgatcggctcgagatgagcgaagtttacatatttagagcaagttcaatagtatagccaactattagctccaattcatctatagtcaatctaatagctcattcatacaataattacatactatactattaatacgcggtcccacctgccatacacacattgcgtcttggagtccgtgctatagctggttacaaatctgtagcccgcttctcttctctctccttatttatcttattaaaatatgtttgtagctggcttatagcatgctattgtacctgctcttatacaaaggccattgaaaggggaagttacagtgctatcgagatgaactgagtgactgccatgcaggccagctcttgggtctcttcgtcatttccctggggaataagttcatctaaggttccttaactttacactgaatccgattttcgttcttgaaccccaaaaccagatacaacttgtcccttaactgtcaaaaccggtgcaaacaaggtccctcggtggtttggaaggcggttttggctaatgtggcgcttacgtggctggcttgactaggtcttcgtcccacgtggcattgacgtggcgcttacgtggcaattctatcccagaaaaataataaaaactgtgggcccacatgtcaattacacaaaaaataataattttaaaatggtggggcccacgtgggccccacatgtcagcctcactcctcccttcatccctctctcttctctctttgttcttcctcatcctcactcccctctctctcttcttcttcccggggagtgccggagcggacggggcgggtgggcggtggagcaggcgagcgaggcgggctgtccgagctccggcggtgggcaacggcgccagcgacgggagcctcgaccgggggagaggaggcgccgcggtagctggagccggggtggtcggcgcggcggcgggtgaggtggtggtaggcgcggcggcggagagaagctgctgctgcatctccagcatgatgcagactctgctttccggattgcttgctattggaagaattgaggagtcgatcgactactattggaagagttgagctagataacttatcactgacagttaagctatagctattttttttctccatatctgaattttcttttgttgacaaaaccattgctatgcggccaattcatagatcatcaggcacacgttcaattcacaacaagtacttttctttgcgaatccacaatccccgctacgaccggctgcctcgccatgccagtatatgccttggcgaccccttcccgggctggtcgggagaccggcagcgtggtggtcggcgccgccgcggggtcttgcgccggccacatccccgccctcagtaccgctgccaccgctgtcgaactccatatccttctcgagtatgacggcgatggcgccggagtggtcatcctcgtcgtcggagcccgcggtcgagcgctccgactcctgcggctactggtccagctgtcgcgtgagcagccacggtcaccaccacgaggccgcggaagacgacgacccgtcggagagggaaggcggcagcgagggcgccgcctcgccgaggtcgccggctgcagtcagtgtccgaagaagagagaggataatggaaagaagaggatgacatatggggcccatataggtcccaccatttttttattttgtatgtgaaactgatatgtaggtctcatggtttttattattttttcggatcgaattgacacgtaagcgctacgtcggtgccacgtcagttgaagacagagtcaaattagccacgtaggcgctacatcagccaaaaccgccatgtaaaccactaagggatctcatatgtactggttttgatagttgagggacccgttgtatctggttttgcggttcaagcatgaaaatcgaattcattaaccagttaagggaccacggatgaacttgttcctttccctggtgacaaggttgggctatgcccaccaaggaaactgggccggcgctgaggaaatttaattttaacttttctaggggaaaagaaaaaaaaagtgaagcagatggttttctcaacagaaaaaataccaatagaaaaacaagatggatggtttctagatagagacaaagaaaaaaaaagaaaaagggaaagatcgactgtgtatagatggaaacaaaagaaataaaaagagaggcacgagagaaattgaagagaggcatgagagaaactgggaaggaaaaaatagaggagatcaggaggcactggagagaatttgggaagaaaagaaaaggtaaagaaataaaaggggagaacgggaggtgctgatttttcacgggagaaggaggagattgggaggaactgattttttccaggggagtggagattgggagagcactaattttttttcttcaagaggaagggagttgcgcgcgtgaggaggggccgagggggaggagaggagttgcgccgtgcgttgggggaaggggcggacaggagcgcggggccagcatggaagggcgcacgcgcgggagaggataagggcacccacaatggttatctataagctctttacaagagatctatgtcagcatatttttctatttggaaggtattaaacgaatagagagagcaaagctatctactaacttagagatagtctatagagaaaaacgaggcaatgcatgagagagctatagataacaatgtagacatactattaaggtggtttactattaatcgagtcaggtgaatgggagggggagggtttgggcttgttagttgctaaaacacctatgataggtatggcctcaataaatgcatgtttaaaaaaataaaattgactgcattaaaagaccaaaagggcatgaaagacaccatgtatataactttctagtttattgttgtatacaacgtgcttaattatattcattctatgactaatttcatgttaatacactgtcaagaacatcggtttaaaaaaaactagtcctatttctaacaaaacaatttgaagaacaaacagaagctcctagcgtactgtgcttccaactggtgcttcttctgcttacgaccatcttctccacatgataccgcggcgacatatgtacggtcgttggatcactaagatgatgaaccagcaacttatcccttcctatctttagatcttgactaagaaaagaaaggaagctgtcacgctacttaatctgcaaaacgaattggtacccgtcagaatataagaatgaattgaaataaattacacacgaatcacgctggcaaccgccggtgacggcaccggtgaacctcgcgacgataagtggcggcgacgatgaacctcatggacgaccggcggtggcgatgacaaacctcatagcaaccaacagcgtgtaacgtcgtggcaacgaagctagcggatgaccggcgacggcgacgaaaccttgcagacaaccggtatagcagccgtggcgaccaacctcgcggacgaccggcggcgtcacggcatggcgaccaagctcgcagtagcagtagcacagcatcatccaccatccattttgctttagaattcgtgctatcaaaaaactgagtattaaacgaattagcgtcctattcctatccctattccctaatccgatctgcgtccggccatcgtcttcttcttcttactgtgggagtgcaggcctattcttgttgggccctcaacagaactcggcccagcaactaaaaattctcacagcctctttttttttcttcttttctggctcgaaaaatctttttatttttcttttcgtttctcgaagttaagaataggacgcagttcttctctcggctctcgctctcgtcgggagaaatttggaccggcaattctgttcccaaaaaaaaaaaatcgtacaattccgcagcctaaccctagtcgacgcgaacctccagccgccggaagatgctgcgaccagcggcggcggcggcgggcagggccatccggcgagccgcgtaccactccgacggcgcccctcctccccgcaagctccggggcccccgattcagccctctcaacaggcacaaccacgaggtacctcagatctatagccttgttcgtgcacccatctagagtttacccacccaaatttagtgtagaaagagagagtttttcatgtcttgttcaaagtacgaattagtcccaaatcctcctggctcagaaacccagtccctccttgtgtcatctgtttatcattgcacttgtttcctcctgctatcttcaaaaatatcactacctttttcctgtgcccccaaccttacacacacacaaaaacaacaactagggattcaagtatttagttactgcctcaatattcatgtgcaactttccaaagtattcggttcgccttcttctgggattactctatacggttgttatgttgcaatcaaaagcacactcctcttgggtaagagatggcactactgtcaaattccattatgccatagattgtccatgcttatttatgatgaatgaatttgtacaattgagttatataatttcataaggtttcaggcgttgtgatgtttttaaggtgtgtgttaagcatctgtcacttaatttgcactagaattctgactcttgctgttaccacagattaaaagcttgtcttttgttcaagcctccatctctaatttatttatctctataacttaaataccttatcttagaggttcaattaagaacgctctcacaagaaaaggaaaagctttcttgcgcacagtgcacttgtgccaaatgatgcatttaaagccttcatcttttgttcctccttcctatgttgttcaaagttagtttggtgaaaccctcgtggctcagaaaacaatccctgtgttgttcacagttacacctgtttttcctacaaacttgggaaatcttttttcaccttttcctttttttctttttacaaaaatatacttgtcctcccatattgtcagggtttaactactaccaattcccaaatattcggttcaagtgccaacatcaaacttcactcagttttaaattcggtatttctgatgctgctgcaatgttataactaataatatgccaattgaagctcaccccccttgatgaaaataaggcactgtcaagaaagaacggagcttgctttccttctattatggccctctgaatgcatgttccctagattatatatcattgtgtacacttacttatgataaatgagtttgtagggtcgtgtttccctaagattttggctgtgctcactgtgaagttgtaagaaatccagtagttcttgtgtgcttatgtagtagcatctgaacatcttactctaaatttttcaattttaagttgttcttctacagttatacaaatattgttagcttgtttattgcgcaagcattcatatacaatgtttttccttgtcatagtggttgaattaagaatctttaacatcttaaagaaaggctatgtcgggcgcagcacacttgtttaaaaatgatagattttaatccttcatctttagtcctcgtttggaagtgatgaaatgtggatggaatcaaaatggatggtctacttgattaacacggtgaattaatatcttgagaaattaacttaacaaatagctagaaacaagtgttctaaacaatacagtagaagaaagttattttcagaaatcgtattttcggaagtgtggagcaaataaatcgatccagggtagattacagttgatcatcacttcagaaaggggccttagttttatggatgacttaattatcactgtgcgggtacagtgatattgaacgtgctaaattttatggagaactgcagttaaatataattcttttgtataaatctgatagcagatgtagatgtctaatattacgcacgttgatgtgcaggttgatgcgttgctcgaggaaatcaagaatacgccggttagcatgatttccgatgacttaattatcagaactgtgcggcagtacgtaaacctctgaattgcagcttctgttattatttgttgtgtgtcttgttaaccatcctaaattgataattactattacctgtccttgtctgcttctctagttctattttggctcgtcagcagattcttgttcaaaatgttctccgatcatgggttattgctgcagcagttctctcaggctattgctgggggtacaacagagtggccaaacgtcctgtggctggctctgaaccaccaacagaagatgaggtgtagaggacttgacagtgttttcttttggagatgggagtctagaagtctgggagaatcaagaacgtagtgaactaagcatgtgtcataatctatcctgtgtatcagtgactctgtgttaactataactaattagtcctagagctaattggtgtggggattctgtaatgagagatctcgttcggtttgacctgtacatgtttctctggttgcggattctgttgccgaaactgatatgtgtaatgggagatctctttgggttgatctctgctttattttgttgagcaaatttgcaagaagataacggtttttgcccttttttgaatatcttttgcctcctcacgaaaactgacacgtgctaggctagtttgtaaaaaactcctcgttatatacataatcttacatcgaccctctcaacacctgatgtctaagctgttttttttttaatataattgtgaagtgaaaaatctgctttcagggtagcactgtagacataaagagtataggggtgtttctgaaaacaatcttcccttgttccacctatccccactccgctagccaatcaggaggcatattcatcagccctcggtcgatcgtgcaaggtgggccgtgggctgaaggcggagtcgtggacgcggagacagaaacggcgtcgcttcagctgcaatttttagttccccccttcttttttttggaaaaagtacaccgaaggtccctcaacttgtcatcgagtcacagaatcctcccccaaccgtaaaaccagatatccggggtcaaaactggtcacaataggtccttcgatggttttgaccaggttttgtcgtacgtggtggctgagtcagcgtgggatctacatggaccccacatgttagggtgccacgtcagcacacactctctctctttcccctcctctctctctctccccctccttctcactcttctctgcctttgactgtaggccggccagtggggtgaggcgggagaggaggtcggcgccgtggcggctgctggcgtcggcgggggctgcgatgggggagaatggagggcgtcggcgtcggcggcggcagcgacatgggagaaggggagggcgtcgccgcacgggtgaggtcgaggacatagacccggccggcggctcggtggagctcctcggcggccgaagatgggcctggggaggcagtagtgacgcgggaacaacgcgggcgtgcagcggtcatgcgcgtgcgtcgttggcgcgtgcgtccccgacggagcgagcgagccgccactatctcccctaccagccacccacccgaggacgagctcccgcaggttggggtaggctgcggcggggagctcccatgcgccagttgcttaggctatggacgtccaggaattggactgcgtcgtcgacgtccttgccatcgccgccaccgccgttgtagaggcaccgccctagaagggcgccgccttgggtggccgtcgctgcttggtatgcgtcattgaagtagttggaccacctgaactcgtccagcactccggcgttgtggtccatcgtcgcgacggggttggcatgtcctaggttggtggtggcgacgttggcgcgctgctgactgctcggcgtcagtcgcggcggggctgaggtcgtccatggaggtgagcgtgctggagctagaccaccggtggaggaggatctcccaaggaggcggtggtgcatgccgtccgctgcctccgacgacgccacacttggccgccacctggcgtgccgcctcgtgcaggtgggcattagcgacgtcttcgccgtgcccggggacttgaacctcacgcttctcgaccacctcatcgctgagcccggcctccgcgtcgtcgactgctgcaacgagctcaacaccggctatgccgctaacggctacgcgtgggcccgtggcatgggcacctgcaccgtcaccttcaccgtctgcggcctgctgctgcacggccgccgtcaccgcagccattggttctggaatcaggagacgggcgacgaagcaggcgccgccttcaggaatcaggagcgtgccagcgcatctccgtcgttgccgtcggcggtagctcgtcggagtggctccgtcgtcgtcggcggtggttgaagcgtgtggctccatcatcggagacgacagcctcctaggaccggcacagttgaagcgtgtgggcgtggctccgtccggcaccgtcctcgtcctctcccttgcgcaagtgaattgggcagtcgtcgagctcgaggccgcgtttgctgtgagccaccgccgcgctccttccccgccgggcttgtcgtgcccactgcaccggcgacgcactccgtttctcccgcgtcgttgccatcgagcgacggctcgctcgctccgtcggacaagaggagaaaagtgagagagagatgagggagggagagaatgggggagagagagagagggggagggtgatgacatggcatcctgacatgtgcggcccacgtgggacctactctgactcaaccgctacatcggacaaaaccggagtaaaaaccaccaaaggacatcaagtgaacggttttgtaagttgagggatgtcatatatctggttttgtggttggaggacgattttgtaattcgatgacaagttgagggaccatcggtgcatttttcctttttttttttgccaatatctattttaactgggctttgggccagaaattttttgggtggtcaggggaccaccctttggatccgctggtgatgctgaggaacatgtgaattgactgtcaggggttaactcatcatctgagtctcatcccagagttgtaaaacctgggacagtcgttaagtatcatctttgaccgttaattcctgcataaaggaatgcaaaatataatatcaaattaagtggtagggtttactaaccgtttcctctagttttggtaagtatttatacgcaagtgattttttggatgaatttacacccgtcatgcaaagaaatatacctatatgggactaaaccacaatgcaccgtcttaggggcccacatgtcatcccctagaggaaggcagtggagagtggtggggctcacaggccccacctccaccttccacaatgatagttgtgggtacaccgacctccacaaccgccattccaaccgtcatatggttatataaaaggatgagctccagccgttgcacaacacacaacaacaaaaacaaaactcactttcatattttaggcatcactttattagtgtggaaaaaatagatagagagtgaggggaaggtctggaggaatgccggagttgtcggtgctctctcctcacttgtacctcggtggatgcttcatttaataaagtaagtgtttgagatttcttatggtatttaattagcatacttaagtgagatatattctcaccattgcagattcgacacttagtatttatattaagagcttgtttggttctttaccctactaattcattggcagtgctaaagtctaggcaaactttggcactaccaaaatattggtaagataaaattatttagttaacatttgaattgctgccaataaaaagccaaattcttatagtatagtaaagaaacttctagaatataaccaaatagaataggggcgctaccaaatatttggtctcaattcaaactaacacacaaactattcaatttgccaataaactagcatcttaagtcgtgtgttcacacggttatgacctctccatctattaaaatattgtttgtgttaatggacataatgtttaataataattaataataaatatgtttttaacattttttttaagaagtgtagctataacattaatggatttatatatcttgatttgtcattaagaatatcatcgtaacaacaaataatttatcatatattagcgcaaccattacctcctacaatatctaaaagagtcaattgtagtaataatgtaaatagccacatttcttacgcgttgcaattctttcatcaccagttgaaaaactgcatatgcaccagccttcaagatcaattgacacaaaataggggatgcaaactcaaagctttttcatctaaacgaaatggcaggagacaccacaatcacattcaaatgttgcaaacctcaatcagtttagttttgtcccatgaagagaaagggcaagaagttcagagacctgttccctccataaaaaaaaaaaaccccacatctgggtttgaatctagacataggtcggctatgttaagaattaaatccagaagtgtttttttatggagagagtaattgctttatcatgcaccaagcttttccttttcaagatcctacaggagatatgtgtgtgtatttgtattaaattgaaagaaagaaacagagaaactaagtcccaatgtaaagttgagaagccaaagattacaaatatgtagtccttaaaattccaaccaaccaacgaactatcatttgtcccagaccatagtgggaaacctcctctaaacttttccaccaaaaagaaagttgaagtttatgtattcactttatacccagtttggccaatccaacagaatcatatgataaatagggattgttgacagctgagaggccaacagtctggagaaaatctttgggaaactatgcagaaagcttatatgctttataacccatcacctcaattatttttttttagacaacaggtaattgcattacccaccttggaaaccaagcccagagacaatccatcacctcaactgcattcctgtttctagacaacatacaaaacaggccaccatacatacaaagatgaatgaatattggtacaataaactgacggggcatttgcgtttttaccctattttaaggtctaactaccaaattgaccttgctttcttcagtttgctattttgaccctctttttttaaaacgaacgttaggtctggccctattccgttaaggcaacataatggtgttaattcagagagaaatgacttttatgccctcactcatttgactctattttttcaaagttttttgcttgcctaattttgtgtatttttatctgaaaatgtgacattatttttactaagataagtgacaaatctaacttaggtttgagggatttgacaagtttgaaacagatttaaattttttcagacaaaattcacttagatttgatatattttcgacaaacttaacatacatttgacagatttttgataaatttcacaaaaaatacataatccctctacaccagcagcatgcagtcctccagaccaggagagcaccggctccgtctccctccagccgggcaagaacaaggagaggcgagagaaagacggagagcagcaatagcaaaaacaaagcagcaaaattctagggagagagctacaaatcggacgtccgatgttgaaaaaaaatcggatggtcaaatgtttcagttgaccgttggtacaacattaagttatacatggtgaaacaaaaaaaatcagcctataaaacatatagaaattttgtgaaacacaataagaacacatggtgaaacatattgctatcacgtatgaaacattaagcttttattgtccgaaacatatatttttctttcacaacaatataatcatgtgatatcttgttgtaaagatttaattataacgaattcaacggtgtgattgaatcgttcatcggataagtagtttagaagaaaaaagatttttaatacgactaaatacttgcatcatgcatggtgtggggagaaagctaatagatggtaggagagagagagagagagagaagaggcatgagttatacattggtgaaacaaaaaatcagttgttgaaacattgagttatatatagtgaaacaaaaaatcagttgttgaaatattttaaaaatttttatgaaacataacaaaaacacacgttgaaacatattgctaccgtgtctgaaacattaaatttaacggattgaaacatatgtttttgtttcatcggaatgtaatgatgtgatatcttgttgtaaagatttaattataacaaatataatggtgcgatcatatcataaattggataagaagttgaggagaaaaaatattctgaagaccattatagcatgtatgtatttgtgaagtggacagggaggtagtagtttatccgtccgatttttgttggttgcgtcgaacgtctgatcctaagcatttttgaaattctagcagcagccaaacacctgctggcgagctcccgcgccatcctcgacctgcgctgcatgcctccttccgcggccagtggcggcgggctcctgtgtcgcgcgcctcccttcgcaccccgccgcggccgcgagctcccgtgccacgcgcctccttccgcgcccagcggcggcgggctcccacgccacgcgcctctcttcgcaccccgcggtggtggcgagcacctgcgcctccctccttccgcacggagtagctgctgccgccgtctgtgcaccggcgctgagagatatagggttgagagtgactggataggattgggagtgaatggatagggttgagtcatgaaaggtattttggtcagtttgattaataatgtgatttttttcttttcctaaatgaaaccctaacggtataatagaaatagggtcagacggtaacttcatttttgaaaagcaggatcaaataagcaaactaaaaaaaaaaggtcagattggtagttaggctctgaaatagggtgaaatgagcaattgtccctaaactgatagtatgaaagacctacatccaaggccaccataacgactcaacattggtagaattcaccttgtaattgtcctttcaactggtgccaagtatcaaaccctaggatagataaactgatactaactggattaaggatttgagttgtgatatttcctatgcttttctctatcccaactctgctctgagctctgaaggactgaaggtgctcaactgttgatccattattttcactacagaattgcgacaactactcccgccccgggacgatctaagaaacccttgtagcactccaggatgaggatggagtcaggatgggaaggggagagtaccttcactggattggcggtggtggtgggttcgccggggccggttgagggcgtggccgccatggaagaggcgcggcgcgggcacgacagggaggcggactgccgtctggatctccgccgccatgccttcccttgggtgggtgtgtgtctccggcaacaaggcggcgggggctcgccggcggcgacggcggcgtggcgagaaaatgaagaggtgaggatgatgagaatcttaaagcaatcccagccgttgtaaatcgcttggttttttccccttaataaaaccaaaacaaaaggaaaagctggagaaatccttgtaaatgtatgggcctgggctgaatttcagggggccacctacaaatcatgcctcggtgtcatcatcgtgtttggatctcctatgacatttcttccgcgtttagctaccaatgtcgattttggggttggttttataataggtaaaatgaagcaaacaaaagaaaatacacattgattgagataagagtactagaaaattgttggcatgcaaacaatactttaatccgttcaaatggggcgctgtttcaccaagtagatcagaattgtttcactaagtagatcgaaattgtttcaatattttaaaaatctgaaacacaaccaaatcacctcgtgaaacattttgctacaaggtttgaaacaatggtttccaaaaaaatcgggcattgtttcactttatataaaaacaatgtttcagcaaatagcgaaaggatgtttcaatttgctgcaacatttgatccatagatagtgaaacatcatgagtacacttgtaaaacattgttggtggaaaaaaatgaaacagattcacttaatagagcgtttctaatacgtgggtaatttgttgcaatggcgcgtgtggtgaggcgcgtggtaggaacagcgcggaggcgcgggaagcggtgggcgcccgatttttttttgccactgatcgggcgcctgatcgctggcatttctgggatttcagtccaatcatatctcagttccagatacatgtgcatcaaatgtactgctctattggataaactttcttttataaaacttatacggattaaggagtaacattaatttaaggtatgttaaaaattgtaagtttaataaaaataataagaacaaagtcttgtctatctctttattgatggctagcttactttatagtttatacaagagcttctcaatatagagatgtagtaagtcttatttatcaggtcgtcgataattacatcggtgatgctagctttagtgttcaggacaccgacttattccgagccattcgttgtgaactataatagcggaagaatacataaatttaccttgggagccctaacttctctgtaatctcattctcactaactaggaactcaccatgatctactgccaatgggaggcttgtctaactttgcatttgctgggctttgcaccattttagtagcaaagcaacaaaggtttggtccatctaacataacacttctacgagctttgctacgagatgatgcgtattttaatattatatatatactagataatgctccgcgctttgctacgagatatatgtaaaatcaaaggtgtttttgattattattctgtgatgaataattggccattggagattattggttttgttatttggaatttattcacgaagtggttttggagatgattggatttcacaggtgaatctacaggttatcattttatgtgaccggtcagactgggctgtgtatgccggtcagaccggcggtgatcgagcggtcggactggctagcccgcggtctgaccggccgacactgtgtcggtttcggtgatggaccgggagtcggcttggggataagacgacgtccgtggtggtcagagatcatgcgggatacttaggctagagctgatgaaagtggttgatggagattccatatggcatacgatggagttattgtgtgcgtatgggatgcggagtcgaatttggaaggagtccaaatttggtacgattggtcatgtaaagtttctttcttgtattagtgggtttcctaaggtgtttaggactcctaatatgagtttggttcatggctttaggctgcctatctcatgtataaatagagggggagcgtgagtgtcacgcccggaatttctatccaaaattccaaacgcttacatgtgtgtgaaccctcgtccaggaatcagccgaggcacacaataacaaattgataatagagtacaattattactctaattaataagcgaataaaatgtcattacagaggtagatagttcctctcaatcaataaagatctaagcagcggaaaaataagaaaaacggcgcagacgactccactccacaggcagcttgaccagggctacacctaatcctccacaccatcagcatcactgtagaactcttcctctgataaatgattgcaaggtgagtatatgacatactcagcaagccacgcagcaaatatgcaagtgcacaaggataccaaagaatggcataatatatggctcatttgcaaaagcagcatttagcaaacatttgagaattataaaacagtagagtaattaatcattaattttaatcaacactaaacagcacacccatgctgctcaggcccaaccatcctgaacaaccatacccggctgtacatatctatctccaaaccaggaatataccattccaaaccaggaggctaaacaaattattaccagttatagcatcttttattatgatgagaagtgtgaaactaatcacgaaagacattgttagacccgcccataaccgcgggcacggctattcgaatagttttactctggccagaggtgtaccactgtacccacaagacacagccccacaacatgtcaccatgtgcctcaataccaccacggtacctcggaaaggagctgtgacagtacccctcgcacaacacaatccaccacagcgcacctttcctggatcataatcacccttataaacaaggcatggactccccagcgacccccgtgggcttatctccgccacttctcagtctggtgccccgcaatgaaccatgttatacaaaaggtaaagccgttgcccacgctggcttgtggttggcacggttaatgtttcacaaccgaaactcgtgaaccggtccttaattgtcatgagcacgaccatcaaaaccatgtgctcacaacccaccattatcaagttttagttggcaaattaattaattaaccaatcacgattaaccatcatgagctatcattaagccatcattaaataatagtgagtcataagttatcccaatagtgtgctaatgtttctaagcatggctaagcaatcatatctactatctagctgaaccaatatataaagctcaactagtcaagttatgataacccaaggtatcaaggaataaagtaatcaagaacaaaagggctataacaaacattaggttaattccacccaatgacattcgaaaataaatgcaatagttgaatagaaacaatagctttaaacgggatcaacatgctcaaagggatgtttgggatctgtgtgacttgccttgctggccttggaactcttcaaaatcttctcctgcaaaaacggactctccggaaacgtcggaatctaaacagaaaggagcaaaatcaccaaaacagcacacaaacaagcatgaacagtacatgtggatatttttaacatgtagatctctattttagaaaaaattagaaacttgaaccaactaaattcgagctaagatgaattagttatgaattttcaaagattaaatcagattaaatcatttatttagattttaattgaattatgacgcaataatgaattatttttgaaaaggaaaagggaattattgcgtcagcggctagggttcacggtgaaccgggtgcacggcggcggctcacggaaacgaacggccgatattgacccatccaaaacggacggccaagatccatcggtccacggccagaccacgagagacgacgacgatgacgtcagcggtgacgtcaccaccggcggcggctcaggcgcgcaaactcgccggcgaacgacggcacgacgacgcgaacggaggacaccaacacgtagagggcgacgcggcgaactcaccggtgaccaaaacaacggcggaagatcaacggacggcgatggcgtcgaggaagaagcggctgcaaccttcggcttgacgacggcgacggtcctccggcaacctacggcgacgacggaggggcggacgaggtcggcgacggcttggcgatcacgacggcagccttcccgagcgacgacgacgacaggatcggcggcggcgcacggctggacgaacggctacgacggcggcgctaggctacacggtgctagggctctaccggcgacgagaggcgaaggcgagggtggcgacaagtagcggaggacttggggggtccttttataggggttggaaggcggcggcgaagacccacggcgaccggcgacacgaaggaaagtctagggttcggaggagagagatcgatccgaatcgaactcgaatccacggatttccaaacgatttagccgacgattccaaaagagaaaaggtagaggagatcccgaagatcttttcccctctattgatttcaccggagaaggaaaggcacgagcgaatttggaaggagacggcggcgcggctcggctagggttccggccgggcgacggcgcgaggaggacgacgagtccgacaggtgggacccacctgtcagcggccgagcgcgcgcgcgggcggctgcgggcggactgggccagcttgggccggggagagggagagagaaggttttgggccgactttcggcccaaagccaaaagaggattttaaaaacctttttcaatttaaattattcatgaaatgcaattccatttattaaaaatacttccttagctcaaataaatcccagaaaaatctaggaattatagagttaagcaaagtatttaatgaaattttatctggccccattttatattggaatttattatttaaaattagatcttcttttctaggcttttaaaataaattctaataattccaattaaacaacaatttatatgtttaggatttttagggtgtgacagtgaggcttcccggtatcgctttagagagcaattgagttgagttttgagttagggtttcgagtttagtcgaaatttttgtaaggtgtgatgttggtgcactttgtaaacacagagagaatcaataaagtcatcatctactttaagagttcttcgatttgtgtttcaccgggtttcggcggtctaaccagcggtgcaccggcggtcagaccggcgggcacacggcggtcagaccggcggcgacaggagtcggcggcaggcattctcgacagttcgaccgatcgatctacatcggtcagaccgacgttcatcaggcggtcagaccggcgcaactacttcggtcagaccgcgatccatcgatttcgagggtaacttttattttcgctaaaagtttttggtttttgggtataccaaccattcacccccctctggttggcttagttcttgtgattcgttcctacaatatatgttagatattgtagaaatgattaaatgatttgaattgaaatattttgaaaatgatttaagattgatgatttagcatgtgtatgtttagctttagaatgaaataaattatagatataattactatatgcttgcatgtagatctgtatgtgtttagtgggtattatctttatagaaagaagagatatgaacatgtgtgtgggaggaaactaggataatgtggcctacatgtcaaagattgtaggatcaaatttaattttagagtcaaacatgcattagcatgaattattttattattaattttatcatcacacaaatctgcttaagtccgggggtcatatcaaaggcttacttctgctcttatattacttaccactatacacaccacgtttgtagaacatcgatcgacattcaaaaaccaggtcgttgtcatattaccaatgaaaaatacaacttatggctgtgctaatcccatcaaagcaactaattcaccaattaatagaaattacaattagaatgaacatcaaacagacaactatatataagtcaattattgtttattaatttcgaactatattatatatatatcacccatattcatatatagctaatatatatatctctatgtaccctattaattattatctttccagtgatctcaacacgaataagtaactacttaccgtgctaattaatccatcgaagcagctaattaagattaataattaggctacaaattaaccccaaattaaatcgatggtgtgcatgcttgtactacccatcatgcctcattgccctaggcaccatgtcatcaaggagccccttgtcgacgggaagaacactcgccggcggcgacgacgacgacgacgggtagccgccgcagctggcaacaacctgcagctcatggttgcagtgcagaggcagctgtagcagcgacgacgacgacgccggagtagtagcagcaagcggcatcgtcggcggcggcggctgcaggttgctgtacagttgttggtgcgcggagaagggtgcggcggccagggcggccatggcgtggatgtgcgagaagccggcggcggtggcggcggcgcgggggaaggtgacggtgtggtgggagtgttggccctcgtaggtggtgatgacgacggaggggtcgtcggaggagcgctccacccgcttcttcaccgtgcacttgctgttcgtgcacctgtagtagctcctgtttttttttttatatatacacacacatgttaattaattaatttaaccaagagattgattgattaatttatttgcaaaaaaagtttgggggctaattaattacatttgcagaagaaatatatacatgttggggggagatcagccagcttatattagcttgttacattttagggttcaagggtttaggaccaatgcatcatctagaatactactatagtaagtagtagtaactacacttaacaggtatactctctccactaaaaaaaatataagacttggtttgatttggtatggtctccaatgtcaaactttgaccgtcaatttctcccaaattacattattattggtactgaaactaaaaaatagatgaaagtgcaagcaaatacgaattcaacgattatctttttttttgtttctagacatatacatgattagactacttgttgatcaaaagttgtaaaatttaaatcttaaaatacgtgtgtgcgcgtcttatatttttaaacacagagagagagagtgtgtgtgtatacgttatgaataaaagccatcaaaacaactgcacatgctttatatccgactagaaaatttgtgcacaagagcatatagaagaaaattaatggtagttgcctaataaggttatggttgtattatttaataaaattacaaatagtctttactctagtgctgaaaggagtaatttgggggatatttctagcttaaaacatcattcaccgccattgtaacagccaaaaaccattggagtttgcatcataacttgagaaagatacgactacctaagtcaatttctatttaattagattatgtgatatcatgttatatatacatactagcattcctttaattatagcagtcgtcctagctatacttactgcaaccaatagttattaacatgattggacacatttttgttgcatgcgtatgtggctcaccgaaatgaaatcatagaaaatcaaagtatacaatgttaatcaaatccagaaaattaatcaacgcatttcattccctgagttgcttaatttgcttcgttggcatattcatgttcagaatcgaagtaccgtgattgtaattatgaaaaatattggagtagatacgcttttacaacacacgcatacaactaactaaaagtacgtcgtccttttcgttcagcccacaactttaatatgtgaacccactgtgctgatactcactcatagttgctgcactactgtatcaattaatcgagaatgaatgtatatatgtgctgaattaattatattaatcatgcatatcaggaactattacttaattaattagaagaagatcgaaattagagaaaccaaattaaagcaaagacatcttattactacagcatgcatgcatttgtaatactccatatatgaatttatatgtataaaatgtaggtaggcaccttggaaaaggactgttcttgacggctttctggccatactttctccagcgatagccatcctccaggtgatcgatctcgctcttcgtcatgaacgcgaaccgcggttgccgcgccctcttcttcccaggcgtcagcgacttgctcctgaacatacataaccacacgatgaaaattaatattgtagagaatttccgtcagaaaggtatatagttcagatcgagaatttaaaagttatgaaaagaaaactactactataagccatcaagtagaagtagctaggcaataagaaattatgttactgacgacttgcaatgaaaatgtcctaactcgatgcctaatactcctatatattcatgatcctgtcttaattaattaattaattacgtttgttctctcaccagatcgacctcttttgcaatttaattcgcaacctaattccaacacgtactcgtacgtacgtattcgtacttccttttgtagctagtgcgcattatctaggctacatgcatgcaccgatcgattaattggcaaatagtagtataaattaatgaaacataaacacttccaaggtactcatagatttttgctatataatatgagagattgagagtatatatatatacacgtatgtagagtacgtagtacgtgtctgaaaaatatacactactccagtacttaattatctctagcaaaaaaaatgaacataagctcacctaaaagctagcatatatatgtaaataaagacaagacaattcaatttaagaggaacacattaaattaattaggaaattataagcacatgtgcgatggaggtttagcacgcgaatcccggcgcaatgttcgaagaagattaaccacacaaacacactcccttggctagaagctagtagcgtctttttttaccgttttgcccctcggagaaatgcgtaaattaattaattaattatccacgtaaacgaattggccaccgttaaatcatctccatccaaacaaaatgcaaagcaaaaaaaaagaggaaaaactgaaaaggagatagaagagacttgaaaagttttaaattaattagttccttgtttcgaattcaattcaattttatagtatgctaagagaaccataatttggataatttggagggaaataacaagcgatttatcgagtaaattaaattaatctcttgcaacaaattaactgcgattaattattgtacttacgctgcctcggtggacgcggcggccggcttcccgccgtcggcgtcgtcggtggagcacgacgacgcggcgccgtccgcggaggacccggccggcgtctccggcagatccagcggcggcggcggcggcgtggccagctcgcccggtggatccagcggcggcagtagctcccccacggcgtcgacgacggcgagcccgttggcccagccgagctcggcgaatatggccgacgagtcggcgtacgcttcgtcggcggcgaacggccagtcgccggcgcccgccatggccatggcacactccggccggccggccagccggaggagcagcagctagctagtagtgcagcagagagagagagagagagagagagagagagagaggtcacttcacttgcttggcttaattaatttctctggattttaatcaacaccgcttggcttgctttgctccccatgagcctttttattttgtagtagtagcaactccagtgtcctcccttgtgtcgttagtgagctgctagctagctagctgtggtctctgcatttatttcactcctctctcatacgttctctccgtcgtaaaataaataaatctaatatatgatatggtatattttatatttttaatatggatagacacaccgtctagatttataatactagaatatagaatgtgttacgttccgtattaagtttgatcgtttcagaacggaagaaatacttattcatattattgtctctatttccttatgatgaaagttaatccagcctctttatatagtctggttcaattggttgagtaaccgtatattagtaaaatatacaaacaacgaaaaaaatataattagaacttttatatctatattattagcacggttcaattaaaagataaggcttgaaaataaactatgataaaataaatctctatctaatttaaattttttattgcggttaataaaatcaagcagacgacgtcatctctacaattatatataccctatattttcaattaaaataatttcaatgcatggaaatctaattaaacacttttagctaatcagatgtttaggagaggaattacaaaatttaaaatttaacaagtaagataatttagatggaatttccaatcttataattaatatttgctaaacaacttaaaaatatctaaatatttaagaagggacgaaggtgaattggttatagctggcgcgcggtactttttcttcactgcgaaacagcggtcatgatagtgaaataacgcaagtatatatgtgcaccgtcgatcttcattctgttcacacaactactcagctatagctgctactatcataaatttattcatttttacaattttcagatactgtttgaatagcatattggctatatatatagcacgtatacgtagctaacattattctagataatttatatagcagctaatgcatttatcaactagctagtagcctagtagtagtatattagctagctctctacagtattacacatataattaattaatcaatccggtaattgaagttggggacaaagatatagttcaactcaaatcgtttagtttcgcttaagtcaactcaaatcattgtcattgtcatatatacatcagctctcgctagcgtccaccgctcgtcacttaattttactccactgttaattttcatatactaatatcattctgaaattaaactgtcaaacccaaaaccttaattagaactaacttgtttgtattttgagataaattacttcagtctctcgtcatcttgcatcgatctttggacctctaactagctagctggctggatctctgtagtaattatattaattactacaaatacgtacaagcatgggaccaattaagagcaagtttaatattacatccaactactagcttcaaattatctatagtcaatttaatagccaattaatataatagttatctataaatatatattacaatattaatatctggtctcatctgtcatacacacattacgtctgagagtccgtgctgatcgctacaaatctgtagcccgctgcttatctccctcttcttttatcttctcgatatatgtttatagctggcttatcgtccactattgtacctgctcttaaaggggtgtttagatccagaggtgtaaagttttagcgtgtcacatcgggtattatatagggtatcgcatagggtgttcggacattaataaaaaactaattacagaatttgtcagtaaaccgtgagacgaatttattaagcctaattaatccgttattagcaaatgtttactgtagcaccacattgtcaaatcatggagcaattaggcttaaaagattcgtcttgcaaattagtcgcacaatttttgtaattagttattatttttcatatattaatacttcatgcagatattcaaacgttcgatatgatagggtgtaaagttttaggacgtgatctaaacagaacctaaattaaatcatgcatgcagtactagaccagtggaccaaacagcatcgagtatttgcagttcattctaacgtaacgtacgtactagccgataattattagtacggtattttatgagcaattaacgccaccggctacaaagaatagtactactccctccgtcccccccaaaaaaaaaaaaccagtcctaaatacgtttcagtgccctaattgcgatcgatcgatctaagttatatatatatattgaccatttaattatagttgataggtccggctcttatccggaatctcagattaattttctggatgtcgatcgctttgtcctcacgtccaccgatcgagcggcgccacacgttaatattatcaaaatattataaaccgaatttttaaccatattaaacaattggtggaaccaattgccagaacccatat

SEQ ID NO: 9787 - DNA, 24187 bp, Oryza sativa
ggcggggctccggccgccggcgggcggctgggccgcgcccatcgttcatggcgaccggcggcggcattctttttttttaatttgtgatgattcactgagatgtatttgactgagaagttacaaatttgtgattcattgtttggatctgtgatgtatttgagtaatttcttaggatattgtgatgtatttgatttgtgagtataaataactttatgatttgtgatgtggatttggtgatgtgaatttgggatgttagttagatttggggattgatttggggatttgcctacttgattcgggagaaaatgaaaaggaaaaaagaaaaagaaaaagggaccatttgcactgccgctattgtctctttagtcccggttggtaacatcaaccgggactaaagatcccctctctttagtcccggttggtggtaccaacggggactaaaatacatctttagtcccggttatttcaaccggtccatctttagtcccggattcttactcccggttggagaaccgggattaaaggggttcccaaccgagagtaaagatggtttctccaccaatgctcattgcaacgcatggacatatcgaccctaaaaataggaaataaaaaaattctatttttcttccgtcctccgactccagtgcaagccatgagctttccgatgggaagtgcgcagccagtttcatcatccgccacgcctagctctaactcgatctgttttttctaagtacatagggaatataaatagaggctatataccctagatttttttctaaatcctgcactcctcccgcacctctcagctctctcccgcacttctcccctcccctcacctagctctcctcctctccccggtgctgacagcggcggagggcgtgcggcggctaccggtggaggaggcggcggcggctaccgggggccaccggcgctcccctttctcgctccttcccagatctggcctgaggggggcgggggtaggacggtggccacacgtgtggcggtggcggcggcggcggcgggaggttgccagcggagggccgcgactaccgacgggaggcggaggttggcggcgggtggtggcggaggagggcggcggccgctcccggaccctccctccctcccagatctggcccgaggggggcgtggggagggcagtggccggcggcgctcccctccctcgctccctcccagatctggcctaaggggggtggggggagggcggtggccacgtgtgcggcagcggcagcggcgggaggttggcggtggcaggaggaagggggccgtgcgcggcggcgtcagaggaggtggaaccaatggcctggtcggcatctcggcatgcgcaaggaggaggaagcggcggttctgggcaccaatcctctcccttccttcgccccagacgtcggtgccggcggcgcaaacagcaccggccgctcccttcccagatctggacggaagaggggagccggctagcagctacggcaaaggcggcgctcccctcgccctcggacagcagcgccggacggaggtggagagccgtcggccggagggggatgccgacgccggcgggtagcaccggatttttcttctgtttcctcgctttattttcgcagtcaggccgcggacccgtttggattttcgcaggcgttaggatagcggcggatgtctccctcacctacaaaaactgtttttggccgctgtaaaaactatttttctaagtagtgtacccatctcactggaagcacgagagtcgagtccgactccaacaaaaactagatcggatctccttgcgtcgggcacgcgagcaggagcacggatgccacgctagctccgacgccggccaggagtggtgctggggaggatttttttttattttttttaaatttttaatttttaaaaataaaccatttaaaaacttatttttcaagatctaaaccttttggccacgccagccggactgacatagcaaaacaacattatcacgtcggtctggttgacgtgacaatgctatttagcctcatgggtttggctggcgtggcaccgttatttgatctcatcattctcgttgcgtggcaggataaaattatcacgcccgttgtgtgaccaaaaggttcagattctaaaaataagttttagaatgatttatttttaagatgtaaaataaaaaaagttcaaaaatcgctggggaggcaggctaatgaggtgatgagggcggccaggttgatgaacccgatgagccggacgtactgggtgctatggcagtaacacgatggctcatcctccgggcagagagagagagagagagagagagatcagagagagtccaaggggattgatcggtcatcctctcctccgttctgcagctagcgtgagtagacgaccagacaaattaagttacgattgtgaattaatttgtgattaacgagaagcatcgatcgttcccaattgatccaacgcgttcaagatatattaattgccgccgtgacctaggccctttttgaaagattagcacagggctaatattgagagctaatgtttagtcataaattggtaggataaacattattctagggtggtatgtttggatccatgggctaattcaagactaaaaggtagagagagagagctgctttttgatagtccccacacaaaactagccccattagcaccctttggaggagctaatgttttgaggagggctaattcactttagcctcaaattagcccacctgtttgaatccttaagagctaattcagagctaaaaggtgaggactagtaattagcccatagaaccaaacaagatcctagcaacctatccacctcgccgccggctgccgtgaatacgatcgaggtgagagcagcagccaattgatcagcacaccacgttgtctacttgcctttggctaatttgcctgattggattcgtcaggttagcgtagagccttggaggctacgatgaatatcactgaatcgatcatgcaaccaccagcgcctagcgcgtattgccgaaagatttatattagtttcaattattattaatatgatactgttgtacttttataaccaattcataatttatatgaagttaaccattaacgtgttaatcttttcatttatcagttcatcccagataccatgtcatcaagtgatatgtacaagggtatacgatgaaacaacaaataatatatattaattattactttgatattaatgtctctgtcctaaaatatagttatttctaccacagtgccttgttctaaaataaagctattttttcacctacctcttctcaaccaatcacaaccattcttcttgacatgctttctcttttcactcaatcacacacttcctctaattttctcacatattttcttaatatccgtgtcaactttaaaaatagctatattttagaacggagggagtattaagtgtttccacttttagttttgtcctggccactcaaatctctggattgagactgaacggggctacacacgtgagaaaggaggacgagtagagaggtcgctgctactagacagggaggcgagctcgtcgtggtacggtgacagggtcatcgcggcccacgaagatggtgatggcaccagcaagttagcttgggctgatgaatttttattttattttttttgaacttttttaaatttttattttaaaaataaactcttctaaaacttatttttaaaatttaaaccttgtagccaagtcagcccatctggcgaggaaaaattactatcacgctacttgctgcgggtgtgataatttaatcctaccacggcaaccaggatggtgtggtagtattattttgtcacatcagttcaagtttcatatcttaagtattgaaaaggtttatttcaaaaataaaaaaaatatgggtgactagcagacggtcgagtgtggccatgaaaaaggaggtgaggacgacttgacgggttcctttttccttagatgcattttataagaacctttccgtgcaacatcgttcgaccatgtcagccatcatgactactacatcggcgcgaggcatacatcaaacactaataccaaaacgatttttgtttgcagttgaaagggattttcgcgtgcggatctcacgcccgtctacaacagggtgcctgtgaaaatatgaaacttttcgtgcgggtgacgcaccagcacacgaaaaatcagatttttcgtatgcgggtggcttatgtcgcccacacgcaacaaaaaaaaagacccccaaaaaaataaaataaaaaacataaccctagccgccgccctcctcgtggttgccgctgtcgtcgttgtcgtcgttgtcaccgttggtggcggtgccatcgccaccttccaccgctgcccaccgccggatctgggcgggagaggggcgccgcctctagacccggccgggcgggcgaggggcgccgctgccggtcacggccgcacgcaaggacgcgctagctgccgccgcccgccgccgctcccggccgtcgccagccgcctcgcgcctgttgccccgcgcctgtggagaaagagacgagagagagagataagaaataggataaggacaagtaggtggagaggataagatagaaatttttgaagtagttgagaggaaaaaatacctgaggagggaggggattttcgcgtgcggtactcttaagatgctcgggtcttcacgtaaaaattggcttattttttgcgtgcggacctcttaaggaatcttaaggatccgcacctaaaaataggaggacgatttttccaaactcggtcagttatggaccatccggaatctgacgaggagttcgtccaggaaaatcgtttttatatttgtgaaatgcagacttgtcttgtcggagcaacatctgcttattggactggagaatttaaggaagtaactttcgtcattgtcactatcaccttctcaaacgccgtaacttggttgagtttatgttttggatcaaagttgtcaaactgtagcacatcggagagaagaaaattcagcgaatgagttctgtggctaggcttctgcaattcaaatagataaggataacattgatgtaaactctagagtagaggtacaacatccgacatgaaggggtagcatcacataccttgcgcagagcaatttctaacctttttttttatttcccgttgcaacggacaactgtgtctcgcttacttggcctctgtttctaaataatatttgacgccgttgacttttttaaatatataattattaattttttttctatcatttgattcattgttaaatatacttatatgtatatatatagttttacatatattttacaaaagtttttaaataaggtgaacagttaaacatgtgttaaaaggtcaacggtgtcaaatactccgaccacgacatataaaaagttaaacggtgtcaaacacatgttaaaaagttaaacatgtgttaaacatgtgtcaaatacgtatttagaaacggagggagtagtacgtaggatcttatataactgtctctcttgctctcgtcgagaagggaaggatggtgtccgaccacgacgacggcaagctgccggcgcagtggaagaaggtgtgcgtcgtcggcggcgggatggcggggctggcggcggcgcgcgagctgcggcgagagggcctcgacgtgacggtgctcgagcagcgcggcggcgtcggcgggcagtggctgtacgacgcggcgaccgacgccggcgacccgctcggcatggccggcgtgcacagcagcgtgttcgcctcgctccgtctcaatagcccgagggagtccataggcttctccgacttcccgttccgccccaccaacgacgccggcggcgacgcgcggcggtaccccgtccacggcgagctcctcaggtacatcagggacttctgcgacgcgttcggcctcatggacgccgtcaggctcaacaccacggtcacgcgcgtcgccatggcaccgccgcggcgcgacgggtcgctgcggtgggcggtgaggagcaagcgccacggcgaggcggagacagaggaggtgttcgacgccgtcgtggtggccatcgggcactactcgcagccaaggctcccgaccgtcgacgggatggataggtggaggaggaaacagctccattcccactcgtaccgcgtcccggactccttcgccggcgaggtcgtcgtcatcgttgggtgcagcgtgagcggcgcagagctcgcgcttgagctccgccgcgtcgccaaggaggtccacctcagcaccaagtcgacggaggagaccatcacgtcggcgatgtccaaaagtgtcgccaggtacgaaaacctccacctgcgaccacaggtcgaacacctgcgcgaggacgggactgtggtgttcgacgacggctcgttcgtcgtcgccgacgctgtcatctactgcaccgggtacaactactcgttcccgttcctggacacgaacgggaaggtcaccgtcgacgacaaccgcgtcgggccgctgtacgagcacgtgttcccgccggagctggcgccgtcgctgtcgttcgtgggcatcccagccaaggtgcttctgccggtgttcatcgaggtgcaggcgaggtgggtggcgcaggtgctgtccgggcggaggacgctgccgtcgcaggaggagatgcagcgcgccgtcgaggagcacagccgcggcatggaggccgccggcttgccgaagcggtggacgcatgacatgttcttggacctggaacgctgcgacgactccggcgagcgcacctgcggcttcccgcggatggagcagtggaagaaggagatctttttctcgtccctctccgacatggtcgacgacatggagagcttccgcgacggctaccacgacagtgacctcgtccgcgacggcctgcgccggcacggctggactcccgtcgcgccgcggccgcaggaggaggacgacgacgcaaaagcaattggagtggcgaacatataacaaaaattaccgggtgcaatacgtactccctccttccctaaatatttaacgccattgactttttaaaacatgtttgactgttcgtcttattcaaaaacttttgtgaaatgtgtaaaactatatgtatacataaaagtatatttaacaataaatcaaatgataggaaaagaattaataattacttaaattttttaaataagacgaacggtcaaaacatgttttaaaaagtcaacggcgtcaaatattttggaatggagggagtagtaattactctctccgtttcgaaatgtttgacaccattgacattttagcacatgtttgaccgttcgttttatttaaaaattttgtgaaatatataaaattatttgcctacataaaaatgactttttagcacatgtttgaccgttcgtcttatttaaaaattttgtgaaatatataaaattatttgcctacataaaaatatatttaacaataaatcaaatgataggaaaagaattaataattacttaaattttttgaataagacgaatagtcaaacatgtactaaaaagtcaacggcgtcaaacatttcgaaacggagggattatctaattattagttagtatattaattaaaatggcacattttagttatgattggataaaatatctaggatcctgtgattgaacgtggaagcgccactgcttattagactccaataatttctgcttaagcctaaggaaacaaaataaatacacggtaattcgaaaagaagtgctggcctgtctgtatcaagaggattttttttttgacaccaggtaatacaccttcattaaccaggggctctaggcaaatcgccagaatccagctggtggaatacaagctcagggacttggttgacatgcactgtgagagttaacagaactcaccccatacttagctaggcagtcatccactttcttgcaagacctcggacaataccaaatgagacagctaacgaaatgagaggaaacaaagacttttatttggcgaaataagcatccatcttgatgacgatcaaagtccgccgatgtggcgatgtgagagcacgtacgctgcagttctgtggcatccgtctccagtatgattcttgtcatcccaagctgcacaactttctcgatactgtggagcgccgcggtagcctcagcctacaacggtgttcgtacgtactcacatcaaaagatgcatcagtgttgatcttatatgtataaatagcagtgggggtctgagcatactaggtagagttacagtccctcctcccatctgcatatggtaaaaaattttagtggggtcttcgtggggtctctcatagttttcacgtcagtagtgggggctcgaaactccgctgccccatgctggatccgccactgcggccggtggcgattcccatttttcattcatcatcatacgtggagctcgatccaactgcagtttttcaaggtccattgtatggtaaatgatggcatcacacacctctgaacccgtgagcttcttgtcatccgcattggccttattccctgcataccaccactcaagaggatttttcattgtactcaaaactgaacctttttagttttgttcagtttatccaattactgctagtagtttatttctccgagggggtgtaccataatgtaataatctgttcgatcattgaatgcaaactaattaagcatttacaaattagtataactaacttttttatgacataaacgatttacatctgttagtataactgaatatatatcatatttgtagtcgatcgtgtatatgaccatatatatatctaactaaaaaatacggaaggattcggtacttttttggtttgtctttttttcgttggtttctttttgcccgatcgcttccaggttttctgtccatctggtttttctcaaccgatccgttgcacgcacgcatagcgcgcctcccgtcatgggctcatggccacgtcaatatgtcttcacgtgtgttttctcctttaattgactacaaaaatcgattctcactttcccttatcattttcctcatgatttaccctaatagcgatcatagtgcttcactttatcgctaagctcctaccaactattgtatcactgaaaaaatatctttaactgttgcaacgcatgggtatttttttctagtgtatttaaaaggattgtatttgttctttctgaagtatttaaaatggatgatgtaatcttatcttcttcatgtagctggtgttgagtagtttctttgtcgagggataactatgtctagtcaattctaacatttatcttccccgcaaaaaaaaaattctaacatttatcttagcaatatgttattatgatttgtctgtgcagaactgcagatatgggttcatttgcactaaagaaaaattaaaccactcctgcatgacattaggtagcagcatcttcttgttggaagacgactgctaatacagtagtcaagatgcgagtattaagtttatgacctcagaaggtcaagatgcaaatgttactaaacaattaaagaaagcagttgagcaatgggatgttccaagattaaagaaaggtgattactactcctttgaagagcatcttatattaactttgtgttgtaaaaaaatgatgagcaggtaaggcatctctgactctacatgagagcacatactttggtcattaatggtgattataatgatatattctgtatttattgtttgctgcattcagtttgattggttgctttgttcagagctgtttctaccaaatccattcaagttgaaacatctccaaaaaaaaatcaattttaaacggactgggagctgtccatgctgacccatgttgctctgtacaagctttatttaaatgtgctgcaaatttgattgcaattccatcacgatggcatcctgcaagaaggtgtgcgtgatcggcgccggtgtgtctggcctcgccgccgcgcgcgagctgcggcgagagggcctcgacgtgacggtgctcgagcagcgcggcggcgtcggcgggcagtggctgtacgacacggcgaccgacgccggcgacccgctcggcgtggccggcgtgcacagcagcatgtacgcgtcgctccgcctcatcaccccgagggaggtgatgggcttctccgacttcccgttccgcccaggcaaggacggcgactccggcgccggcgaggtcgacgcgcggcggttccccggccacgccgagttcctcaggtacatcagggagttatgcgacgtgttcggcctcatggacgccgttcggctcaacacggcggtcacgcgcgtcgccatggcgccgccgcggcgcgacggctcgctgcggtgggcggtgaggagcaaacaccacggcgaggcggagacggaggaggtgttcgacgccgtcgtcgtggcgtccggccacttctgccagccaaggctcccgaccatcgacgggatggacaggtggaggaggaggcagctgcattcccattcctaccgcgtcccggacgccttccatggcgaggtggtggtgatcgtgggctgcggcatcagcagcaaggacatcgggctagagctccgccgcgtcgccaaggaggtgcacctgagcgcaaagtcgccggaggaggccatgacgccggcgatgtccaagattctcgccaggtacgacaaccttcacctccacccacagatcgaacacctgcgcgaggacgggacggtggtgttcgtcgacggcacatgcgtcgtcgccgacgccgtcgtctactgcaccggcaacacctactcgtacccgttcctggacacggacggcaaggtcaccgtcgacgacaaccgcgtcgggccgctgttcgaccacgtgttcccgccggcgctcgcgccgtcgctgtcgttcgtggggatcccggccatggtggtggtgccgctgttcaacgaggtgcaggcgaggtgggtggcgcaggtgctgtccgggcggagggcgctgccgtcgccggaggagatggcgcgcgccgcggaggagtacaaccgcggcagggaggccgccggcgtggcgaagcggcggacgcacgacatcctggacctggagtactgcgacgactacggcgagcgcaactgcggcttcccgcggctggaggcgtggaagaaggagctcatgtggtcttcctacctcaccatgtgcgacaacctcgagaccttccgcgacgactaccatgacagcgacctcgtcgccgacggcctgaggctgcacggctggatctcaccggcgacgacgctgacgcagcagggcgacgatgacaaacggccccatcttttatgagaaattccggcttattaccaacttaaaataatagtttgcgaataaaatttttatatatgtgtttttagctatttaaaaataaataatataaaataaactataatgaaaaaaaatcataaaatcaacttccacattaaatttgaaattcaaattttgacgtataagtataagcataaactaaatgatggggctcaaagatgttggctaaaagtgaacggaaatgagttgagctgggtgtacgtgagtgtgcgtgtgttatgagcgtctgcgttttttttttaaaaaaagcacaatatttagcaggaaaaggcactcgattctaatcagttcagcttagcattattgaaagaaaaaggagggaatgtataagtatattaaataatgcaacgcaacacataggaagtataagcataaactaaatgatggggctcaaagatgttggctaaaagtgaacggaaatgagttgagctgggtgtacgtgagtgtgcgtgtgttatgagcgtctgcgtttttttttttaaaaaaagcacaatatttagcaggaaaaggcactcgattctaatcagttcagcttagcattattgaaagaaaaaggagggaatgtataagtatattaaataatgcaacgcaacccataggatacagtctcaaaatgttgaaaggttatgtatgatcgatcttttcacaagatcaactttatctcgagatagaacaatacgaaaatttacgcatggttctactattactatatagtactaattcataaccggagtatatgtcagaaactgagacgatttaacaagattcaaatttcaaaatagatcaggttcagtgattcacacaccaacatcaacatacagtgcaaactctggctgcacatacgcacgatgtcgttgttttttatttgtttgttgttcttgtttgtgtactgtactgatgggctggccatctagagataggtctaatcacattggcaccataccaaacctgagctcacgtgctgacaaccagaggtgaaaaaggatcggattcgaatggatagtagtcatactatctcctgaaccattattttgtagtagatttggagcgggtgtggatggtatatggatgtggagagaatcatttcggatttctaaaacaatgcaaagccaatgtaggctcaactcataaatggattaaaatcatcggatatgacgtctatattcaatcaatgtaacattaagtcatcaattcaacaggcaacaatataataacaatatcctaagcatttaataataacatcacacaacatatcgatataggacagctggtatcacattttaggtgtcatggtggatgaacaagaaatcaaattctaacttactattgatatatttttctaaaatgaaatctcgatgtctaatcgctaaacttttaaatcctaaatccaagacttaaaaaaagatccaaatagagtggatgagctaaggaaattatcccaaaatttactgaatgggttgtctgatgtgaaatggaccaaatagagtggttacaagatatgggccaagaaaatcgcattgtttaccaaaccctccaccacataatctgcttagaatatcgaataatctgcatccatcgcatatcatcggtatcacatccggcttcgtatccgcatgctaccattcaaatccaactctatatgcaccaaatatctatgaactcttatcatatccttgcttcgggaggatttggagcgaataatatcgtctctgttttgacctttattgacaactaaaaatgggctctaacaaaatatcagggaaattgtagctacattagcatgatggcacacattcgtgtagaggcatagtttcaatgtccaatgatggcgcatgatatgattaaataatcatcatgtgctaagcttgcccccattaaatagtcacgtcgttccaaggatactttatatatatgcatgtttatttaaataatactatttcttagggcaaaatgagcttttgttagattaaagcaggatttgcaatatttgctttgtatccgcatgctaccattcacatccaactctatatccatcaaatatctatctatgaactcttatcatatccttggttcaggaggattcgtcagttttgacccttactaacaactaaaaatgggctctgacaaaatctcagagaaatggtagctacattagcctgatgacacacgttcgtgtagaggcatagtttcaatgtccaatgatggcgcatgatatgattaaataatcatcatgtgctaagcttgcccccattaaatagtcacgtcgttccaaggatactttatatatctgcatgtttatttaaataatactatttcttagggcaaaatgagcttttgttagattaaagcaggatttgcaatatttgcttcgtatccgcatgctaccattcacatccaactctatatccatcaaatatctatctatgaactcttatcatatccttggttcaggaggattcgtcagttttgacccttactaacaactaaaaatgggctctgacaaaatctcagagaaatggtagctacattagcctgatgacacacgttcgtgtagaggcatagtttcaatgttcaatgatggcgcatgatatgattaaataatcatcatgtgctaatcttgccccgattaaatagtcacgttccgagggtatatacgtgtgatcaggaataatagccagagtcacacccttttgacaatgatcttgcaacaatatatacatttttataatataatagaaataaattacatctccgatatttatcataagacacacggtcataagtttgttaaatatataagatttttttccggtccaacaaaaaatatctcacggtatcaaatcgtttccgattgatggatctaacactgctcatcctgcctagctagatctaacgattaaatacgatttagtaccgtgagggaccagtaactttgagatattttttactggaccgaagtaaatctctaaatatatacatagagatatatagctattctcggctcttttataatgtagagtaaagtataaaaggctattttttgtttacatctgcatgtaaattaggtgaaatatatttgtcacacaataatatattacccctctgctagaattaatatagagtacttttctttatcttatatttcttagggcaaaatgagcttttgttatattaaagcaggattgcaatctttgtgcaaaatctcagctaggtctgatgtgggcttcttgccacacgtacgcacttaataaaacccataatcgaagcagcgatacttgcttgtcacttgtatcatgagttgtcattacgatgatcgacttacgaagttacgttttgtttggcataatttcacattcggtttctgtagttgggtatttttaattgaagaaatccacgtatatggatatgttgataatatttggatggagcactttatttctatttaaggtaaaataaagaattttaagccgctttaatttaaattgcaaagctcaaattgaacgtgggatttgagattaaaaccgtgtcaactaggttgtaatatcaaagatataaaagggccccgttaattaagccccttaatctcagcaacaatggcagatctccgatcttaggccgcttgaggaagcccattagttaactgattatgtttgcggtggctcatgagattgttttcagcctaccacaaggtccacattcatctttcaaaaaaaaaaaaaaacaaggtccacattccacacagtttttgtggctgtcgcatttaaacacaaatctcagcatcaagcatctagaccaagttgttggattcagcttaataaggaagtgttccctcggtccaaaaatatgttttcttttcttttcttaaaacacaatacaaatacagacacccacaacgcacgcatactcaccctgtaacatgttcttttcacattccatacaaattttgtgactgcctcatctttatcacaaaactcaccataaagcgtctaaaccaagttatcggattcaatttagggagttagtactccctctctgtatctctaaatatagtaactttatttaaactagaaatgttgccatattttagaaataaggtagtccattagttagtgaaattaaggtgccatttttcaaaacatgaagaatagattcttctgtagcaccacagaatacgagatatatgcacagagccagtggcggatcttgtcttgtgatggcgttgggatttgggcattggacatttggacattgatttcagatgctaatcatgtgatcactacgttagttggccactaatttaaagatttttggtgagaagatttgttgatcgacctaattgtctaacactaaagcaaaggcacaatcggaccaaaaaaataatagaaataagagcaaacacatctatataatcattgttgcgaaaattatttcactgataaaaatattacatgacaaatttagtactattatagttctccattttatttagtgccatgcatagtaagtacaattgtagtatagtttgtgtatatataaaaaacaattcactaattgaaagtacgtttgtagtatagttttgtacaattcctttcactaattgaaagtacaatactcttcatcccagtaatatataaattcgtcatagctaaattttaatgttaagtctggcactgcacagagacagagctggcaaagttgtcttgacacgttctttccacattccagacaaatttaattaagcatcaaaactctccttaccttaaatatagcaacatttctagtgcaaattaaacatgaaagttaccgtattttggaacgaggacgtctagaccgtcaatgaaattaaggtgacatctttgaaaattgaaaatatgaagaactttgcagcaccacagaatatatgcacagagctgataaaagttgtagtaagaatatatgcacatattatctttttaagagacgatatagtataaatgcagacgcacactacttgaagttagtaccatgcacacgtgagacatgtgggcataatttggctgattgcttcaattactagaacattagcgtgctggttggcacgctttccttatagcccgatacattgttcagtgtgtgtttgaaacatgaaaattttataagatattttagcagttagttcaactttcatgttccattaaatattgtattctcttgcatatcattctgagcataatctcctgtaatgttaatttgggattgtgtgttctctacgtttccggtggacgattaattataaatgttgagtttctaataatttcttgatataattaaatactattaagtattaaaaaagtagaaagtaggtggagttaaatattagacggactctaaaaaaaatattagaagattaataagttttcttaaaaaaggactgattgtaggaaaaaaaaagttatgggaaaattgtaagcttacaaagcttgctctcgatgatctataatactcgatccaactcctaaatgctagaagcagaatttgaaattaagttttggcctatgggcggtctttgtgttcactccacccctcatttttctaggtcactacagtctgctcctttctctttttaagtaaaagcagcaaaaactttgttgggcttgagctacagaaaagctgaaaagccctgccaaattgatcagtacgtgtcgtaacactcacctcttatttaattttcttcatgtcttacttctaaccattctgtcattttccaaccatattttatttaataaggggtattgtagttttttcactccatacttgatctccctaagaaaaagggcaggaatattttatacttttggagaaagtacaattgattcgcaagatatgatgataacaggaaacagaaaaacggaggaattgaaatggtcgattggcttggtgctacacagtgatacggtagccgaggagcatgtagctctttttttttattttccttttttaataactctaagttttcttctatcggatatttgaatgcatctaggagtgatgttgctgcaaagggctataatctagatatataaatttggatctagatactttaactggacttattttaaattatgatttttatttgattggttctagaagtctctatgtttattgcaagtgatgtacagtttagaagctaatctggaagcttgcttaactttttttttctaccgcatttatctgaatatttagctgtgacaagtggaccaataggcacacatggaatgtagattaggcgtacatgggagcttagtactcctaggatttgctctggtccaacaaaaagtatctcgaagtatcggtatctcatgttatcaaatcgtttccgatcgttagatctagctaggttggacaatcagaaacgatttgatatcgtgaggtaccggtacgttgagttacttcctgttggacggaagcaaatctcttatataagctagctactccaactccaagctcattactgtgtctcgcttgctctcgtcgacaaggagaagatggtgtccaaccacgacgacggcaagccaccggcgaagtggaagaaggtgtgcgtcgtcggggcgggcatggccggccttgcggcggcgcgggagctgcgccgggagggccacgccgtgacggtgcttgagcaggccggcgacgtgggcgggcagtggctgtacgacccgcgcaccgacgacccgctcggcgcgtccccggcgccggtgcgcgtgcacagcagcatgtacgcgtcgctccgcctcatcagcccccgcgaggccatgggcttcaccgacttccccttcctccccgtcgacggcgccggcggcggcggccgcgacccgcgccgcttccccggccaccgcgaggtgctcctctacctcaaggacttctgcgacgcgttcggcctcatggacgccgtccgcctcagcctcaacaccagggtcctccgcgtcgccatggcgcctcctcaatgtcgcgcccccgccgtcgccggcggcgagcggaaatgggtggtcaggtccgtacgcgtcggcgagcgcgacgacacgggtgttcaggaagaggtgttcgacgccgtcgtggtcgccaccgggcactactcgcagcccagcgtgcccaccatcaaaggaatggaggcgtggaggcggcggcagctgcacagccactcgtaccggctgccggagccgttccgcgacgaggtgctcacggccacacatttctaatcacattggatgctcgctctgccgccaccaaccatgtcagtaatggtaaccttgtattgtcttgtgtgctccatgtctgcatctgcgtgaaggtggttgtcatggtgggctgcggcgacagcggcaaggacatcgcgctggacctcatcagcgtcgccaaggaggtgcacctcacggacaagtcgacggaggaggccacgacgccggcgatgtccaagctgctcgccaagtacgccaacctccacctgaggccacgggtcgaacacctgtgcgaggacgggacggtggtgttcgtcgacggctcgcgcgtcgtcgccgacaccgtcatgtactgcaccgggtacgtctactcgttcccgttcctggacacggacggggtggtcaccgtcgacgacaaccgcgtcgggccgctgttcgagcacgtgttcccgccggcgctggcgccgtcgctgtcgttcgtcggcgtcccgaggaaggtgccggcgccatggttcttcgaggcgcaggggaagtgggtggcgcaggtgctgtccgggaggaggacgctgccgccggtggaggagatgctgcgcgccgtcgacgagcactaccgcgccagggcggccgccggcgtgccggtcaagtacacgcacgagctcggcggcatcgagcctcaggtacacagaagctaatataaaacggatctcgaattgttcttgatcgatgattaatcttgtttaatttgttgaatgattgatttggcgcgccatggatgagcagaagtacatcgagttcggggagaagtattgcgggttcccgcgctacgaggattggaagagggagatgatcgtgtccaccatcagtaggagggatgacgacgacatggagacatttcgcgaccgcgtcgacgacgacagtgaccatgtccggctctgcctcaagagctggcactgctcatcacctgctcgacatcaagcctctcttgctgtttctgctgctgatggccatcctcctcctcctcgtcttgcacagacggccaaggccatcgctgctgatgctctgtagctctcaagtctaaacgattggggtgtatggttttaatcctaaggttctgtgttcaatcctcaacacgcttacaatttctttttaaaaactctccctctaaatctccttttttttaagtctaaactgaacatgttcaggttcaggttcaggttcaggccatggctgaatttgagtcacccagatgatataaaatatcaggccattaagttttcaggaagaacattggcagaggatatacaagaaattttggcatcccgtcagtcatcactgctgatgaacaaggcagcattgtaaggtttggtctcgcttcttcttaaaacggggcatcttcttcttatatacaaaacgtcggcaacggcctgaccgttcgaaaaaaatgctctctaaaggtaaacagctaaacagacgggaagttgagaaagtattttatgaacctagatgcatggcaagtttgcgttcagagtttcagcattttgctggctttttcatggctgctaatctggtgaaaacattagattaactttgtgcagaaagctcagtgaaaaacctgagcctccagcctatgtcacaaagcttttctgacccaacaaaaatctctaatatactaaaattatacttcattagacagtgtgtgcactgcagtataagacttagcttgtgcagatgtaagacatctggttctgatttccctcactgaacacaaagttggctgctaatataacccaggcacacgtacacaaagaaaataattggaactcaataatttaatccaccctaattatgtcttaaccatataaaaaactttcagaaaccaaaagtatttcttctccaatgcatcagattactcggaagaagaggtagacgacgtcgcgtccggctccggcgcggcgacgacatggacggcgaggcggaaggagaggtaggcgtcgacgcaggcgtactgcacctgctccttgctcagcctgcgcgcgtcccacctgctcgtcccgaccttcctcggcttcgtcgtcaccccgtcccacccgaggtgctcctccgccatgcgctgcatcgacgtgttccccatgccggccagcgaccgcagctccaccgtgcgcgccacctccagcccgtgctgttcctccagcttgcggcagtcggaccgcacgccgtagccgacgaacacgacgcgctcgtcggccaggaaccgccggagcgcggcggggacggcggcgtcggcgtgcgcgagctggaacaccaggcaccggtgccccgcgcacagctgcagcgtgcccggccggatcgtggcgcggcggaacggcggcgtccactgcacccccatgccgacggtggccacgccgtcggcgcggaggcgggggccgaggcgccaccgcgtggcgtgcacccaccggcgcgccgcccgcgtgcgcggtcaccgtggcgaccacctggcggccgccgacgcgcaccacgtactcgtcgtgcgtgcgggtggagcggtggaggcgagtggacacggcggtgaccatgatggcgcgtcgccggcgtgtcgagcagggagacggcagctttcaaagttgaaatcacacaccggattggatccaaaattccgggaaatttacggtttctgtgaaacgtctatataacttgaaatttgcaaagacaattatacattttctcggtgcgtgttaaggcacgattacaaccctatttaattgcgataaaattaaattaattgtgactaactgactatgattatgtgttggtgcaatgtacgaatgtgtaacaaagctaacacttggcactctattttctattttccatatataagacatacttatacatacgattgccttacaaaagtcagttacatactgacattagtactttatacatgacacatttctatgaacttattaaaaattagtaaaaatatggtacattatggtgttcacggactatcattaggatggctatatatgtaggggatatgtagagattgttgcctcaacatcaatactgttgtaccgtttgaaatgctgctttcttcccttaataaaaccggctggcgtttccttttgccgacatggcaaaaaaaattgctatatatttatcgataaattttcttctaaaaatttaaacacagtgtaattacattataatttgcaaataatacaatgtaatttatatgtaactttcacataattttaaaccattcgatttgctttaaaatttttgcaagggagatagaaaaaaaaatcacaacacacacatgtgaggggattcggtcctattacctctgtttcacgaaaataatgtcacctaggaattttaaaagttatatacaagttgcactatatttacatgcaagttacaaatataattgcatcacaattgtaatacatttacatatgtcaaattatttgttaaaatttgatgacaaatctatagctagtcctagaaaaaattacaatttcataataccaagtcattcacaattacatcacattattttcacttacgtttatccaccaatacgaagtgcaatgaattagcacgattaatagataatacaatatacaagcacactgcacaacacaagcgcagacacaaattctcaaacacaaattatcacaggttgggtgtacaaaaattcatctgcaccactgcatctaaataaaaacatcttttcttacatctatccaccaaaagacgcttgtattatagtactccgtacatagtttttaccgaaagcgatcgagtaaatttctcttgtagtaaaagtaaactgcccgtacgtacgtctcaccgtcgtcgccggcgtgggcttcagatgtcgccggcgtcgaggtggacgccgaggtggaaggagaggcatgcgtcgacgcaggcgtactccacctgccccttcgtcaacctccgcgcgtgccacctgctcgtcccgaccctccgcggcttccacaccccgaccaacccgaggtgctcctccgccatgcgcttcatcgacgcgttgcccatgccggccaccagccgccgcagctccaccccgcgcgccacctccagcccgtggtgctcctccagcttgcggcagtcgtggcggacgttgtgggcgacgaaggcggcgcgcgcgtcggccatgaaccgccggagcacggcggggacggcgccggcgcgcgcgagctagaacaccaggcaccggtgcccgacgcacagctgcagcgtgcacggccgccgcgccgccgccgccggcgcgcggaacggcggggtccactgcacgcccatgccgacggtgatcccgtcgccggagcggaggcggcgggcgtggcgccacagcgtggtgtgcacccaccggcgcgccacgcccgggtgcgcggtcacagtggcgagaaggcggcggcggcggcggcggtggctgccgacgcgcaccacgtactcgtcgtgcgcgcgcatgcagcggcggaggcgcgtggacacggtggtggtcttggcggcgaccatggcgcggcggcgccggtgtgcttcttggcttcttcttggggtttcttgggagacgacgtcgtttattttagcaatggaagcagaaaatctttacctttttataactattgattgattgacttgccacttccaattttcaaaacacaaacctaatacaacccaaaattccgtgaaattttttcaagttttctaagaaaggggaatatgaaaacctttcacagcacgcggccttgaatttgcagagtatatgtgttaagccgtgttagtgtgtactgtacgtgtagtattaggtttagccccgtttctcgagaagataagagacatccctatttcagtttatgcatgtactaccacactgttttactttgtgataacttttacttatcacaaaacggatacgatccaaaatcccagaaaaattttcaactttcctcatagaaggggagttttgcatcttttatagagttgtaaactaagtataaataggcttgaattttgcaaagagaataacaactcatcatggtagtatgtgttaaggcacgtatatgaatgcgtaaaacattgtttgcatatgttccagtttttaagtactccctgcatccttttgtttaggaagtttctgacagtgacatgtttgacaaaatgaaagaacatttgaaatgacttttggaaaatgattttcagtgtatataccaacgtcaaatattaaaatatttttttgagttgtatatcagcgtcatacaaaaatggaagaagggagacaatattccccgtgcaaaaggaaaaaaaaaaccttgtaagtatcaaaacacgattccagattatggtgacatcataaatttagaagctggtactctagttactttgatttttatatcaaacgtagttatatacaaataatggtcttactatgatctatcacattatacttaaatcacactccacatttatcaacttaacaattgttgaattttttttagataatgtagcaattggtgatacatgacacatctaaacattacaaatttacaataccaagtcaccaacaattacatcaaattattcttcacttacacttacacttattttaccactagagtaccaattattattattaactaaatcggcatag

SEQ ID NO: 9788 - DNA, 13162 bp, Oryza sativa
agacgatctttttcttctccctgaaggtttgagatcgatctgcgacgaggaggagcgaggaatcgccaactttcttttcgaggaaattgtaagatctcgcgcgacctgttcttcttggtgttctgtcttgtacttggtttacttggtttgttttgtgtttgatctatagtcttagatgatctgtgaagaatagttgttttcggtacagatggtaggaaaggtagaggaggacgatgctgcgatggccggcggtgcggaagcacggcggcatcccggtggagctgcacgtggcgcgggcgtcgacgggcgaggcgggagaggaggaggacggcggcggctgttggcaggcgagcacggtggaggcggctgctgttggcgccccgtcgccgcccaactccggcggcgcccgccccctgctcagcttcgtgccaccgcccgtctcggccccgtcggcgtcgcctacccgctgaagaagagaaaagagaagaaaagggaagaaataggagatgacgtagatagtatgacatgtgaggcccacgtgatcccacgctaactcagccgtcacatcgaataaaatcagggtcaaaaccaacaaagaacttcaagcgaacgcgaacggttttgatagttgaggaacgtctgtatctggttttgtggttgtgggatggttttgtaactcgatgacaagttgagggaccttcggtgtacttttttcatcctagaatatccacgtgactaggctgggccacatctataaagggccgtattagaggcccaacaaaacgaggcctaaaagggcttcacaactgaggaaataggacccatttctcattccggcccaatacattcacaagctaaccgacgcagggatcctacaactgtcggttggtaaccagtaacaaaaattacggctagtttaccattaattcaattgctggtactggtagagcagcagttgtttgatccctgtcactcaccgactacatcctcttaagcttaagcttggttaagtaaaccaaaattagtgtataacacaagctaaccaccattaattagagtaattaaactaggactaatcaataggagtagtaggtaggtaagtttacacaaggtgacagaagatgccaagcaaaatgagcagctgtgaagagagtgaagacatggagtggtggagaagcaaagtgtacaacctcttctttaactgtagcctgcacatggccacatcacatgctgcatcactcactcactcacccactctctcctcttcttttctttttcttttttttgctggcaccaacaatcacatgcacctcaaaataataaaaataaaaaaggggaaaattactcttgctgaactcgtgtgagcttaagaaattactgctccgatatagagggggggggggggggtaaaaaatgtactcttcttaattcacacttgctacctaatggtagatctttgcaacacaaacatctcaaaataattttcgatcgatctctaggagaaagaaaatccaaccggccggacaatgctagagaaatcaagaacaaatgaacttacaaattacaaaccgagcaagaaaggaggcgagcagaggtagatcagatcagatcagaatcagagcatcctgaggaagatgatggcgacggcgaggagggcggcgtaggaggggttggcgagagaggaggcggcggcggaagacttggacttggaagaggcggtgtcggacttggaggaggaggaggagtcgccggagccagaggaggaagaagatgcggagcccttcttggcggtgacggcgagcttcatgcctttgtagcagtagccatagctgcagatgaagtagtagtccttggcctccttgagctggaacgcgtagctgtgccccttgctgtagctgctaatggcgttcgccttgtcgcagttgtcgtacccgacctcgtccacctgcaccacgtccgacctcccgttctggtactcgaacactgcttcccacaccattgcgttgcgtcatcaatggcgatcgatcgagacagatcaagaagagagagatgaatcgatggaggtgcttacggagccagtcgcccttgtagaaggggcggtgcttcttgacccaggcggtgtagtccacgtcggggttccaccccttctcgtcgcccaccgtgtagttggtcgccaccgccgccgccggcagcagcgccaccgccaccaccagcaacggcagcatccggtggcacaccatctccagtggcagatcgatcgatctgagctctgagctgagcttgccttgaagacgaaggggaccttgcctcacctcactctgctctgtcactctggttgtctctgctctgtgtttgtctgcaatgatagcagctgtatgtatatatacctccatatctcttgatatctcatcctcagcttcagtaaaagacagtaaacttcactgtcaaaggttggatgcccagctgcagctggtagatttacagctttgttgttgttgtacattttgtacacatatgcaaacagccatactctgtctcaagaatataatgtgataaattcactgcctttttttctattagggggtaattaactgaagtttggtgatgatgtacagtgagacaaatgcactggctttattagggggctataaattatcttcagtttcatgatgctgctactcatttgtaactgtattagttactcattgctgactaaacttgcgcaattgaactatgcacctttacagtagtataagcagtgctagtgtgcaattgaactatactcaaatcatcattctatgattatcatatatggatactgaataattatgatatcaatggagctagccagggaaagtagtagctgcccagctgtattatttgaagtgatttagaagcaaaagccctttcttattcctcacaaacattcttagtctaccaaaaggattcatagttctccctataagaaaaggcaaaatgccagccgtggtggttgcgaaaatatatattgtcaacttatgcattcaagattgataatataggcaaaacgacaactgttagttgattgtgacaacacgatgatcatatgaaaatccaattcagtggaaagctttctgcaaagttggcctaataaatactatactagttttttttagaacaaatgctatactagtttaggtagctctaatcatacaataaacagaaatggtgaaaagctcaaacagctagctagctgcatataaacaatatgttcaaccattttctattgacaaaaatgaattctagaccttgtgctagcgtttcgtattttccagtacaaaacatgagtaaaaaactaagaacttcctcgcattccagattttactctaactgttgtactagtagccccatttggagaacaaagtttaactaaaaactgtatgaagcaattaaactctcacacaatcaaatcaagatagatatacaattgtaaaaaaaaacatatctttaacctggaagtgaggaggagatccaaggtcaatgaaagaagacaggtagggagggccatgtgaggagatgcctctccatttgcccctttatttccgacaatgccactcaagttgatcagtatcttcttcatggcaccagtagctgtgtactccatgagtgtaattaactttcttcttctctccaactgcttcagctaactttcttattaatgagcaccatttttctgctctcattatatcatgtggtttgcttctgttacctgctgacctgtgtttgtgtgtgatctactatctgcagactgcagctaccacttgggcttgctttgtcacatgcagttttacaccttttatttctccttaatacaaggtaagtgttggatcagtagcttgctcaatgctcactcatcctgccaaagagagactacagacttgttctgaactgtaaagtctgttgtttggatcctctgcatattgttcagtcttgtccttttgctttacagcccttttgcaaatgcaggaaccgtgtgataaaacagtagtagaagtttcatcaggctcatggttgaagtaacagtgaggatggagccagggcgaagccatgattcttcgagtgcatggctagaaaataataaaatgcatttttttcatttagatattcttagcttaaaatcgcttactctgcattggaaaattctgctgccacatgtagtgttactctgcattagccaaaaaaaaagaagcaaaagcaaaaattaacaggtgcctcaagatttgtgttaagtgatatcacagtaatgttaacctatccaatgtagtattagttagtcatattctaactggatgattggattgattatggacagatttaaatttgctcgtatggatgaataaagcaagggacgtgtgaaaattgtacaaaattttgatgggcctgatctgggccactttgggccttgacactctaggcggactagtgcaacatatgccccggcccatttacaccgccccgcgataaaaactgggtgagggcgaccaagaaccctaggctgtcgcggatccatcccatcccatctcttcctcgtctcccactcctccggtgagccttgcctccctttttcctcgattcagttcatcagatctttcggtaaatccaatcgagttgatagggtttgatgtcctaatctatctatctctctctgtgctgctgctgttgttgggggtggcaggattctttctgttcttggttgattgccggagatgtcggattcggaggagcatcacttcgagtccaaggccgacgccggcgcctccaagacctacccacagcaggccggcaccatccggaagaacggatatattgtcattaagaaccgcccctgcaaggttatacacctctgaatcttgttattgggataagacttttcaggacttgcatctaactgtactgtagtgtatggcgacttacatttgtgtatggcgacttacatttactgtattgtattgtattgtatggttgtgttgagtgtatggcgacttacatctaactgtattgtatggttgcgttgggttaatggaatttgtcatggtttatgtctgccgttagcaattaataattgtagatttggatgtgttaaaggtattagatccactactcatagcaaatggactctctgttgtagatgtggatagaacaatagatgtacaataatcttttctttttttttatgagaccccatttgctcacatatttctcctatgcccataaaagttgtcgttggttggtgatgtatgccgttctttagctgatgaaaaaccatctgaatggtctcctgtctcgcgatatgctgcacaattaacttaagaattgttttcaataaatctttctgaggcatagtcctgcatattttttttattgaaaatgcaatgcagagataactctgtatgtttggaaagaattctatttttccttaggctttttaatcgtaaaaattatcatatctatggttcttgttataagttaatgattcactgatacattagtgttgctaagtttgagctatgcccatgtagtagtgccaggttatataccagccaagtgatctctttcactttataacctctgcctttactctgtcttttagacgttttatgcagttttgtcgatgtactgatttattcttgttatgtaccagaatttgaatacgctggtatggttttgcttgtaattttctgacttgattgattacgtgttgcctactgagttaaggtttatttaatttcgaattggacagatgatggcaagaatgatattttcccttatttgtacatcttatggacaaataaactgtcactttttgacccatcattttttgacccatcattccctgcgcttttctgccataagagagccattcgtagtataacatgtattatggtgataagtttggtttaatctatattatatataggtggttgaggtctctacttccaagactgggaagcatggtcacgccaaatgccactttgttggtattgacattttcaatggaaagaagcttgaagatattgtcccctcatcccacaactgtgacgtaacatacatacagatcatgctctacagatcatcccctaatcccacaactgcttgctttaactattttgttatccatgtatcatgcaggttcctcatgttgatcgtactgattaccagctgattgacatttcggaagatggatttgtatgtttgctttcaacctttcccttgctttatttgtttttatgaaaagcctgtacagtttctaacatggtaataaattaaatgaattttacaggtgagccttttgactgagagcggcaacactaaggatgacttgaggcttcccactgatgatactctgactaaccaggtcaatgatttagctaaaactctttatcatcaatgtgtgttatctcttcaactaccatactctgactaaccaggtcaatgatttagctaaaactctttatcatcaatgtgtgttatctcttcaacttccattatatcttagtcgctttcatgtctgaatctcagatcaagaacaatgtgtgttatctcttcaacttccattatatcttagtcgctttcatgtctgaatctcagatcaagaacgggtttggtgaagaaggcaaggatatgatcttgactgtgatgtccgccatgggtgaagaacagatctgtgccgtcaaggagattggggccaaaaactaagcggctttgctcgattgcctgcctgcctacgatactttgctatcttagtgttgagagctgagacacataaatagaagttttttttatgctacctgtggatgaaatgacgatcaaaaccttcatcgattttatgttacactggatggtcatgagatacttgttaatgcttttcattatcagtttcaagtatcctttgaatcgagtggcagctgtaattcgtatagtaaaagtgggaaatccattctgctatgagatgtgccatgggagcagccgtccaagctcaattcatcaaattttatgttacactgaagattaaactgcagcaggtggggcagcccaagctcctaaggaaacattcttgctatcatattctggttttcttctcatagagaattctagctttgatctaccatcagcaagtgtgtattaagaagagtacatagagataaaaagaaaggcaacaacatagatgtgaaataagaacatgaggagagtacataacaggggaaaacaatataccatcctgaaaatactatgcatctatacaatcctacggtgaacaactagccactaaataaaaggtgttgacagcaaaaaaaaaaaaaaaaccataatccagatgctaaaattactccagctgcgttcatcactgttaaagagccactgattttgattctaaaacaaagttaattacgcctgcttgaaagcgtgtgcgttggatatgacttcttaagagagaatttcctgcacataatttcatgcaacattacgcctgtttgaaagcgtgtgagttggatatgacttcttaagagagaatttcctgcacataatttcaaggtttaatccgatgaatgattaggtagaaaaagaaagcaacattagtaaactcctgtaccctgtcttctccatcaaaggtgacgaccctgaacgggttccatcctgaattactgatttcagctttcccgtttgatcagagaagtgcagaaacaacgtcatcttcttcagatagtgtttggttgcaggcattggcgaatgctttgggatcaagctctcccatcctcttgatgccaatgctggctcgatcacttgttaactaactccttcaaaagcctgcacttacaatagatattgatgttgatcatcagacaaagaaatcaagaaaggaaattcgatgaattgagttacatgtacgagttgtttccggacggcctgcaacttgtaattgcttgttcgttcattgatgagcaattgagcagagcttggtttgagcgactccattgctcacacatcaagtgattgatactccttagatagcaaagctcaagataattgactttcttttcctccggacgcgtaaaagtagcacatcaatatattaggataattgactttcttcatgcttaactaaatctatttcttcacgattgtgtgagttcgcaagatatgtatttttttcttcatggtcctgtatcgagtctatgttttatgtctatcaaacatatgtgaccaagtagatttatagttgtaaatctattttagaacggagctagtactcgaggagtataggcagagtcctcatcagttgttagatggtgatcgatctccccatgaaaaaaaaaaactacaactaattagactccaaacccgtgtactccatgctgatgggagtataacttaataataataataataattacgaattttcaaaatatcaaatcatgaaaatatctcataataatgtttttccttaagtatcaaacgatactgtaagcaacaaattgcagcacacacacacgtccatgggagctcaacgcttcctcgtgtgtcctccactgcttaacgacgaactggatggcttcctccaatgtcgccttgcgcttctccttgtagttccacagctccgggaccgggcatcgttcactgggattgtactccttcatctcacgcagtgccgttgctaccaacctgtaaacttcttcaccgtgttcttctttcaactccctgagcttgccatcatccccacagagaatttcctacattggaggatgcagatcacatacacaaccgttaatcctaatctacacaatgaaattggtactgtatgtgctggttcgttaaaaaaaagaaggtaattttaccatccttgaaaagatacttagaggtaccacactttatagactaaaatttgatacctccaggtaaggttggaaatttcggtcattttggacccctccaatacgatattatttcagccgaaatttttcaatttttttattttttttcatgaattttggtaatatttgttcaaattcaactaaattttgttcaaaatttcggacccaaatcggctaaaccaaaaagtttaaccttgcctccaggtactaagtacctcgagttacaaaaaaaaattaatataaaatttaagtattttgagatacttttataaggaccataaaatttctcttgaaaaaaaacatacacaatcgttggtactatgagcttgctgccattctcagagagaatttcctacattgaaggatgcagatcacatacacaactattggtactacattttcatcatccatttgtcatcaagatatggcatgaatcaaactgattgatcatcgtctatatgaatactgactcctgtttgctgcgctcacagcgtttcgggggtggcgtgctcgcttccggcgctatccacgtcgacgcggagcgttagagcggctggttttgctgcgtctctgttcgcctctttctagccgttggatcgtggatggacggcgcctatttgatgtggcgtttggcccttccttttaaccatgttgatgggcttgcaaacaggagatcgacacgttagtctacgcacctatgcgtgcctatgcgtgtgttcgtttctttctggccgttggatcgcggatgggccgtgcttatttgatgtggcgtttgggccttggtttaaccgtgttgaggcgtttgcgaacaggagatcgacacgttggtctacgtgcctatgcgtgtgttcatgcgtggacatctcctatggtccataactctatgccaatgtggctctaactgaatgggtccagtgcactcggtgctggctgttttggccaatcggtgttgtgtgtcagggcggacatgcatgcgaggttggagcagtggagtgtcagggcagacatgcatgcgaggttggagcagtggaccagtagagatggcttttgtgagcatggtgcacatgatctgtgtcaatggcaggcgggccctcaccacagttctttgtgggccgccatcgtgcgctcttcctgccgtaatggtagtggagatacgggatcctagggtaaaacttgtgtatgggatgtgtccatggaccagtgtgcttgctacgggcactgggatgtggggcttggccaatgtgtctgtggtgcgccgggagttttctcgagccgcgtgtgctcctgctatgtacgacggaacgtggcacggtcagtgtgtggtttgttgcgtgcactcgggtgcactcggttcacggatattggctcgctgctgggtgggccatacagctggttggatagcgcttgtggtgtgggcagggtttacacagatacgggtcgaggtacaggctgaactgttcatgtttcacgccggtgaaagaggaacactttccctatgcttgctgcaaggttttctgctccctcgccttctgctcctcggcattcgctgttcctcttctccttcggtgtgttcgtcgatgtgctttgctgagcgataatggcgaacgcgaggtttgtacggatgaattacttaccgatggtttgcttgggtgttgccatagatcctgagcgaattgcatgtattttgtaggtgatttgagaagggctttgctgctgtgattggttgttcttggtttacttcaccctgttgcttcggtggactttctggtgatctaatctagtataatagatctggcaaaagagaggtatttgctgtcgctagcattttgcaggaacttattttccttttttggggttgcctcttgcagttcatctagctgtttggtcttgctggtggtggtgggtgagtgttgggtgcgcaggctctggggtaagaaaagtttctctttgcattttatctgtttggtcattttctttgcatgtggtttggttttcttgtgttggctgttgttgtgtgtgtgctgtcgttttcttacgtggagtcacgtgactgggccgtgccacttttttttattttggcttggtatgcactttgtttggtggctgtatactactacactgtattatattatcctgagtatttattcatatagataccctacggtagtgtgtctgtccatcgttggacacataagagcagagtggtaggtcgagtgtcttctttccttgaatgcttggctctggcctttccccttattaaaatcttctagccgttgaacttgggatgtgcttttctgtagtctcttctctggacaaactgttctcctccacttgcctatcttatcctctcttattttttttccttctcccattggcagtggtgtagccgcgatgttcgccgtgggagtatctcatgtctcgctgctgaatgccgctgctcagcattgcatgatacctagcattgcgtacctgtgggagtttagctccgatggtacgttgttggctggtattgaagtcagtctcccgtcgattggttgtgccagtcatctggacactatgttcttttgggagacggccttagctccacttcagagcgcacatgaaatggttgctgcaagagcactgaggtgtctccaacatcgttatggttttgtagtgcatgactacaattttaactctatgctagcttacagacggctggcacgtgatgctgtgcaggctgcattgtctgcttctggttgtgtggcacatttcagatcttcttatggtgcatttgttccttggtgtgatgatgttcttaggacatgtagctcactgtattttagttttttcgtagaagacatggaacaaatgggttcttttgaaatataggtgtttagaagttcctatctggttttagactgtgtttgtattgctcttggctattcggaattggcagtttgtattgtcagcttttcatgtattgtcagtaaaatgatgtttgtgttgctgatctgtgctgattgtataggcatgttatactgatgttgaaaaggccatgcgatagagtatccagagcacgtgcgagccgtgaaaggcataaagcgcgtgctttgacataggaaatatgcatgaggagcgccctggctttgccaggtgggaccaaaagagctcgctctcttatggattttagccctgcattggcagcttctaatagacaacgacgccgtctgcttcgaataggaaattcttcctttctttcgggtgagggatggcacaaatcgtatattaatctatgtcacactaggtgccttgcttaaaactaatatctgattcactgcagctaatgttgagcttgatagaggtagttcttcacgctctcacaaggatcatgttgaggctttaaagggtttgtgtttatttagatcccctataattgcgacggctggtttagcaatgttatgttagaagtttattgattgatgatcttgcagcatcgtacccggggaggtcgtactatggtgcaccgacgtacgagtgtttgtactgtggtgctgtgttttggttctaggagagggttaaaagtctttctgctatttcaaaacgaaaaatagtttacaatttgtgctgcaaaagtggtaaaatagagttgccgaaactacgtgaacctccagaacctcttaaaccattgttgaaatttaatggagatgcacgttcaaagagatttcttaggcaggtgcgatcttacaactctatgtttgctttcacctctatgggtgcaactgtcgatagaacgataaacaatggaagtgcaccttatgtttttaaaattaatggtgttgttcatcacaaaataggtagcctgctaccagcgcaagggagaaggcctcaatttgcacagctctacatctacgatccagaaaatgagatacaaaatcgaataaatatatttgaaaatgatggcagcaatagtgacaaggctgatcctgctatagttgatgctctgtgcactatgttagattcgcataacactcttgtgcagaaatttcgttatgctagagaatgcttgaacgagcatgggaatcagcatttgacgttacggctgatggggtgcaatgcaaaatctgatgtgcaatataatttaccaactagcggtgaactagcagcgattatagtgggcgattactcagtagctgagtatagttatgatatacttgtccaggaaaaagatgatggtttgcgacgtgtgtcctctttgcacccatggtatatgg

SEQ ID NO: 9789 - DNA, 14631 bp, Oryza sativa
tatattatgggacaaagggagtacctctgtttcatattatgctttgacttttttcctagtcaaacttctttaagttggaccaagtttataaagttggtcaaacttaaagaagtttgactaagaaatagtcaaagcgacttatagtaggaaatggagggagtatgtgtaaagcttaatggagtttttttttcctattctttgcatactatttattactccattctctagctgcacgtctcaaaattaaaaccaatgtcacaactcacaacatagtaaacagtcctgtatgaagttttattcaaggaatagttttaggaattcaaggacagttttgcatttatcctgtatgagacgtggaaactgttgtttcttttgcttccaatgctttgtaggtttgttattctgacaatctcttcttttttctgaaactcagcttttgggccgatcattgttttgtcttggactgctccttaggtatggttctcaactcatggcagcatccgaaaatcaacttgatttcccaaagattatcagcttgctgaagaaggaatatcttctcaaggatgatttcagcttgaaggttcgaggtttgcaggtgtgcacacttggaatcaattactgcacttactggcactagaaaaactagatggatggatggcatgtccacctgtctagataacagaatgttgctttagtttcatttatttttcatatttagaaactattcagtactagatgatatatttttctgtgcatgcaggctttgggatacatacttattgcaaagcctgattttatgctacgtaaagatatctcaaccctaatagagtcatcattgtcttctgttgttgattatagattaaaggtatacactctcttttagtaatatgtaatggcacatgctctgtatagactgtttaaaatggaccctcctgtccagattcaaggattgcagaacctttttgagtatctacgtgatgcggaaagccagctcaatgcagagagtactggcaagcctacacccaatgcaacaaacggtggaagtgaagtgcctgttgctgcaggtgctggagatactaacatatgcggtggtattatccaattatattggaattctattcttgaaagatgcttggatataaatgatcaagtccgtcaaactgcactaaaggtgaattagaccaatgtgcatacttttacaattgtcctttatattttacaatataaacaataattgtttttttttagattgttgaaattgttctccgccagggtttggttcaccccattacttgtgttccacaccttatagcactagaaactgacccactggaggggaactcaaagttggctcatcatctgctaatgaatatgaatgaaaagtatggtgacctaccttctcattcttatgttccttttggacataatcttctgattgttaggagttgtttgcaggtacccttcattttttgaaagccggttaggtgatggcctgcagatgtcatttcgatttttcgagtccacaatcagcaatcatgatatggtggccacaaacatgaaatctaatccaattgcgtttgttaaacctgggatatctcgaatataccgcctcatccgtgcaaaccggaattccaggaacaaatttgtacactcaatagtccgtaaatttgagggtgataaccgcagttaccccacaattagctttctcatgtaagtagccagattaaattatgcttgccaactctctattactggataatgtatttgactacaaagttgcataacaattgcaggtactgtgctgaagttcttgcgtctctcccattcacaagccctgatgagccactttacttgatatatgatataaatcgggttattcaattaagagctggagcagttgaggcaaatttgaaaaattggacttccatgtatcagcagcaagaaatggtgggtatgccaagagacactggtgatgttatgcatgagcctgggggatgctctgaccaaaatttggttgatgtctctcaaatgatgcttggcaatacatgcagcacgccagttgttaacatggccaaacttcaggtgagttagagagaactatcggcgtagtggctagtgagagttcatcaatgcatagatcggtgagccttttttttttttcatttcagtttgtttttgttgtcaggaggattgccatggcgcgatagccctgcagctccttctcaagctgaagagacatctgaaaactgtctatagtttaaccgatgcccggtgtcaggtttgccctgccagtcccatatttgaacattgttaatcctaagatgattttactgacacaagttctatttgaactttcaacattacaggcattttctttgaaggatccaccaaaatctggcgaaacaatctccaagcagaatatcccattgaacattagtaataccaacaccagtttgccgagctgcccgcaggatgcagcacgtgtataccaggtagcgatgctgaaaaattctggatttgtggggaacaaagttgtagtagcatgttttattgtctggggtttggcaggcgctgctgtgtgtgtaacatttgatgtgaatttggacgtgatggacaggatttcaagacagtgctgcgagaagacaccgtggactacgggatgtacaccgtttcggcccagaaaaaacgtccgactccaagaagctcgtcgagagtaagaagaccggcggctgttacaagaggccgtggtggtggtggtggtggtggtgatgaggacaccgatgacgaagattggactggtggtggagcaagagtgctggacttcagcgctcagggtgggcgagtaacaaggcagagggtccaagtctgactggctgctgactgactgttgttggtgcttcttgtgtacattgtaggaaattttataggtaacaggggaggtttaggtcgtcttaggggccattgttagtacatagaagcagaaaaaaggaaaggaagatatctagcttttacttagatgccattaatttggagcactccttttcttttgcttgctgttgcccaatttagatgttgtaattgctctcgggctctggcaatactccaacaaacaggttgtgctcctttctaattcaatggaaaagaaatgctttcttttgcttctcacttgagtgtttccactgtctttattctcgacaacacactgcattttttaaagtgaagacagaaagtggtcaagaaaaaatgagtgagtacattgctggctggcataaacaatgaggcgtgtgtgatttacgcttgaatcgtgctagctccagcattttctccttgctattaaagaaaattgggctgggacttgggtgcctggtttcgttgggtttgacgaggaaatcaccaagacgaattcaaaaatcgaaacaagacgatgtgtcaatttttgatagaattagtagttgttgactaatctgattgatggcagatgatgtgtcaatttttagagctatagtagactagtagtagactattacgaatcattaaggccgagttagttacaatttttttcttcaaactttcaactttttcatcacatcaaaactctcctacacatataaatttccaacttttctgtcacatcgttctaattttaaccaaactttcaattttaacgtgaactaaacacagcctaaacagctcttagcctaagccaattattggctatgccacatactcccttaattattggctatgccacactccctctgtccctaaatagttgacgccgttgatttttttaaaacatgtttaaccattcgtcttattttaaaaaattaagtaataattaattattttcctatcatttgatttattgttaaatatatttttatgtatacatataattttatatatttcacaaaaaaatgaataaaacgaacggtcaaacatttgctaaaaagttaacggcgtcaaatatttaggatatacccctatgaacatcacgtcgcctaccactgaaagaacaaagtgctaaatcctaaaaaaattgcttccatgtagagttgaacccaggatctaacgtactactaagattcttgtaaccaccaggctagttttggtttgcttccaatttatacccttgctattacaaattatatatgttatataaatttagtagtgacaaaacttaccaaggtttaaacactttctaaaaataaaatattagtagggcaagaattgctagtaaaccaaaccagctcgtaatcaattcatacatggcaagggttaaaacgtcttttctccttaaattattggggaaaaataaatgaaaaacaaatgtaacggaagacagagttgtatataaactctgaaacatttcgatctcggagatctaaaaattacgaaataataatattacatatagttagatcgtgatagattctgacgtgtgtaaagccgtgctaaaaaaaatcaatatagcagactcctctctcggtctcggtgctcctcaaaaaaaaaaaaaaaaaaagcaaaccctaacgcctgagaactgaggagcgaaccggcgggatggcggcggcggcggcggtggcggcggctgggagggcagtccggtacggcgtgttatcgaaagcgctgccgacacggctgcacatcaacagcggccgaggtctcgacatctccgaggctgagggccctctcgataggtacatccaggtgttgatggtgcgtactcctctctaccgcaaacccgctactttgtatgcatacttcgttctttacattcgatccggtttacctcaagaggaaggggattaaaaaaaaattctgttccaaattaagtctctgaatagtcaagtcaaggttcccggctactcctgatctggctggctttcagttgagcaaatagcctcctttctaatcaccttagcttgtaatcaaatcttattctacctagggcagctgctgcttaattttctgcttttgatcatcctgtgtgatgagtaaccaaccaaatgttaaccaattaaactcactggaatcgattgattgttctttaacttcctcaattcacgttcttgttctcttcgactacgaagagtcggatttttttacttttagcgaaccattcgactccgcttatttgccctggatggccctttaagaggggataatctgtttcgccaagattaatgcaatgattataatgttgtttttagaaagattgagaaatctattgagctaaaactctgctagctttgtttggggggaattgtgaaataccataggttccccaacatacttgcaggttattattgttctttctattttcttagttataccctgtgattaggcctggattgaaatttacttctgttttttttggaccttttccttgaattcttgggattttgggtttataattatcgtactaattttatacatttaccaagtaaagtctgggatggctctgtatagaactatagatatggttagcaatatattagaaaataaaggggatttgaaagatgagttgacaccatgcaagggcctattgataattgaaatttgaaaacttaacttgagtcaacgagtcgtggcttgcatgtgcaagataatggggtgctcttcatgttaatgtcaaaatgtcactattctaagtgattcttgggagatatgtcattttaacatatcacatctagttctcttttagttcattgagctcagtcgaaagaattgacttggtaattttcagtatttatccaaagttcccaacataagggtggaagtccaaaatccaaacctgcctttttaatgtatgatagctttctgaatttatcaggcgacaagaaatctctgctgagttgatactcatcataaaccaaatcgtattatatcttttagtggatatggaagtttgaattagccgtgtcaatatgcaaactcgactgtttcagaagctaaggatgtatttggttccttgcatcaatatcatcttggctcagatcatgcagtagccagcagtttggtttcctgcataggccaatgagcctgtctctgtgcatgcaaaaagttagctggagcatggcctggagggaatgagttttagtttcattacttaccggcttggtttgcttgagtcaagaaaagcttcccatgagcattgtcccctctagataccttgaaaaatgtgcagatgcatgaaaccaaagtacttcagtcgggggattgggcaaacaaactcaactagataaacagtttcaacatgcgcgctggaccatttgaaccaggtttaatgggaccggccaggccacccagcacccaggcaaccaaatgcaccgtaagtatacatgatagattttgtcaggaagggtgcttatcagggggtctgactttgtcttggctgtgaagttcttctctcattgatttggttgcaaacttttgctagcatatatggactgagttttatacctgccttgcaaatttaatcttgactgcttgggatctggttttattacaaccctcattaattttatgcaagaccatactatgcatgaccaagtatggtcttgagtgttgaaatgatttgcaatggattagaaaaatctagagactgaacaggtgtgctgtgattgtgcaagatctatcggaaacaactgacatgattgcaatgggcattcggccatttgacaacaaatttccaatagaaaaggggcaatctttcacttctatcaaatccatttcttccccttaagactagggactataaaaaggaacttgagtggaaagctttcaaatgtaactatagcttcattataattgtaagataatcacaccataaatatactaacttcattataacttttatttactgtatataacttgtatgtgagtattaaaaaaattcatgcaatttcatacatatgatatatagaggttacaatgttgttatattgtaattaaactacaattatactatagttgtaatgtagttcaactatactacagttatgtttgaaagttttataccaaaaatcatgtgactgttttttagcagttccctaagactggtatttttctgaagcactatggataatattagtatattacatctgttgcttaactggggtatccattatcataaaacaaatcattatacagcttgaggtatagaagttttgtattaaccatgtcaatttgcagaatgaaagaaaccttggaaaagtaaggagtatagagaagattttgtcaaaaagagatatggtgagagaaagctctgagaggtacttgggatgcgtcatgtatttttcctcactaatgtacactctgcactcaccctaatcccttcgaatatactgcagcctgatccttgagcgcatgaagaagattggcacacacaatacgaaacatgcgtggatggttgctggcgtcactatttccgggtacttgtttggggccgcattcgttgcccttcttacagagtcccaactgccaaagcgtgaagaggagaaagaggcttgaattctgccaagacaagaagcttggatttgaagagtgaaagaagagtacaagggtttagaagtaatgtagtaccttccatccatgcttaaattgttgactcagacctcccttcaacatttaactgagacccttttccttttttatatatttcatgtaactgcaaagtatgctgtgcaaatgcttaccggtgtttccttttcgaatccctaatagtagaattactcttaatatggttgtcttgttttctggatgtggtcattaacagtagcaacaggaagcccgggtaaatcatgtcgttctgcagaatttggtgcatattgagagccaacacaacaaatagtcccccgttcccccgttctatttaacttgtattatcacgcacgtttatgagctcttaaatggtacgattttccaaaagaaaactgtttaccagcatctacatctcttagagaacttaaattaacttatcaactttccaatctttaatttagtcagttaaggctctgtttgaatctcctgaagataaaaataaaaataaagattaaatgttttacgtaaaagataataacttatgattaactgagttttaattattataaatatgaaaaatagattaatctgatattttagaacaactttcatataaaaaattttcgcataaaacgtaccatttagcagtttgaaaagcgtgccacgaaaatccaaaacttaatgttcactttgttgggttctcgaacagcgcttacacccacaaaataataaagtaaatttcatccataatcccatcatccaacagcgctttaaaacaaattatgccataattatttgcgagacaaacaatatttagatattccaatcatcaaacttccagaatcatcacaacaaacacaatcatcaaacttccaaaatcacatttccttcacagtcatcaaacctcctttgggtgttcctctagaagtaacagaagtatcaaacaaactagatgcgcaggtatcaaaagtgctcctccagaagtaccaaagagtaagtactacaaaatggggctacaaaatccggagtcactctcttttgccctgctgaggagcccatccctgtgactgcgaacctctcactcgctctaggacatcaatcttaccgaacactttctcatacgcagccacaagccgaagaaagaagtatccaactgtgggtatcagaatgataacgagcatggtgaacttccccttcttgtcctcaggaaggcggtagccgatgttgtccaacacgccagctatgcccttgggtttctcaaggctacaatgcaaacaaaaaaaaaaggttcaaacgtataatgaaaacaaataccacagaaaaaagaacaaggtaaataccaaaaagccataccttttaattattgtgctcatagacttggtaagcttggttaacatttccacattgccctcgctcaaagtaatcatgtgctcagccctaagtaacaatacaaagaacattagagtttaacagcctttcatgagaaaaaataactcttaaacttgacctaatactaaccaggtctgcatggctctagcaaaaatgcgcttttccaagttggacatcggctgcacaacatgaataatattcagaacaatggtaggtgaatggccgaaggttttctatttgctgattgctaccattcaacaatgttttatgttagttttgacatatatctgaaaacagcagcctgtatccacacattagatgtcatggtcgggattacgtatcgtcgcagagggcgtgtggttccgcaagcgtcgccgggcggaacggcggagtagcgcgcggaagctgcgtgccggatgactacagtgcggcgattggatgagttcagattgttagtctgtttatcagtttgttagcttgtttttagcacattggttaattcgtgtacgcctatttagaggcacagtttcggtggagtttaattaagcagattcaatctctagttctctcatctcctattctctatttgctcatcccttgctgttcatcacgggtcgtcgttccaccaaaccccctcgtccaccgccaatcacacattcatatcacatacgttcttacgccggggctcgtgacaacttggtatcagagctcatggcaacggacgaatcctccaccaacgcagccaccgtcgcagccgcagctgcggtcgcagctccggtctccaatgctgacatcgccaagctccgcgagtccatggccgacgtacttcatggcatgtcgctcctcgcatccaaaagtgacttggcggatctcagccgctcagttgccgtcgcctcatctcgccttacatcgctggagcagcagggtgctgcatcgacctcaactccgccgcgactcggtggcgacggaatgttccggcgaccaccaccaccaccaccaccaccaccatcatctggctctcccccaccaccaccaccaccgccgcccccgccgccgcctccgcctcctccaccgctgttcacgagacggtctcatgcgccccaggacaacagttctggcacgggcgttcctcgcttctataaactggaatttcccaaatatgacggcaaagacgatcccctcaattggttcaatcattgtgaacaattcttccgaggacagaagacaccggatggtgatcgtgtatggctggccacgtaccatctcaccggtgacgctcaggaatggtattttcactacgagcagcatcacggacccccagattggtacgccttcaaggaattgtgccatgcccaatttgggccgccaatccatcgcaatgccctgggcgaactgaagcggctatatcaggcctcctcggtggctgcctaccagacaaaatttctggcattggcaagccggacgacggagccgctcactgacttgcaacaaatccagcttttgatgacaaatacaaaaatacttatgttatgcttaaagaacatttgatgacaaatcaaatcacaataaaataaataataattacataaattttttgaataaaacgaaaggtcaaacatttgttaaaaagtcaacagcgtcatacattaaaatacggagggagtatattccagtgcatgggtttgctgaaccaaagtagttgaaagcttagaaagtgtagagaagcatactataagcatgttaccatatttgggaaactagacccacaaagaaatttcatgaaccatgcatccaaagaattctgactcatattccatcagcgggcaaactttgacatcctgaaaggaaatcaggagaaaaaaattatccccatgtggtatgtgaagtatatatattgcattagtgcaattatgttctatgtgtatcctttcttggagatgcatttagtccaagtgacagcacatgggaccgcccgaaaagtcgattacccagatgaaagaacattacaaacccaccaaaaaacaacagaataatataaccacagtccttatgccaacaatgtgtggtcaataagaattgaattaggttctgatattgcaaaagaagtgaatcaattatgatgagtcaatgacccaattgtgtttattctcaacaaccaccgcagactattttggacaaatgagtagaaatcttaacaaagcagttatcttattcactacagaccaacaaaatggagtgatatacagcaagaaagaggaggaagaatgaaataaacatgcccaccttcacatcagttggctggaagtagatgaagagtactcaataacaatacgaattaagaatccaataccaaacagagagatatcaagcaacatgataactatgcccatctcagatttctataccaacctttaactctcccatagccaagcacgtaagtggatgaaacagaaaggcttacacaggtaaatttatcaactgatgcatgtcaccctgctaaattacaagggaacgaacctgagtaagctaacctactagaataccaaccacaggacaatttggagatattccaccaagataacttgaaacaactattaaggaacaccctaaaacaacatctaagaaagaaccgagggcataatcatgtaatagaacaagtggtatcacacagaaaaagagaagagagaatgtaattgattttttcatgatttcctgttgctttagtgctttagtatagtatttctatgccctagcaacatgcttcaagaaatattgcaaaagatataaatgcaaggactagggagcaacgtcataggtttaaacagcaaaattaatttatcaaatactcatttgagatcaagatagtgcaaaccaggccaaaggcccaatttgtggcaaagaaacagagggagtacagattagtaaagcagtagaggcatcaacaggatatcctattcacaattaagacctataaaattacaaagtaatagaaaaaggggagtatccagagtgctttcgttgttggcctatgccctatgaaggtacagaacaccaggttcattacaactgataccaaaacctaaataatttagggagtggggaaggaccatgagaactttgtattaaaggtaccaacagtaaaacacatagattaacataaacatagctaaaatatgaaaaggtctggaatataagaaaaaatgaacaacttgcatgggggcatatgtgggctgcataaattacaaactttggtgcagcatctgcggtttaaacaaagaaaatgatgctacacctacatagataagatcaggtttgacgattaacgaacgaaaatctagatcaacctcatctactttcgttcattcatggatgtctacaaagataacgatcaatcattctctgcatatttaagatatggttccacttcaccatgctaaaatgttagcatcaggcctcacagatggattgtaaatgttccatcccatacatatatatatatatatatatatatatatatatatatatatatatatatatatatatatatatatatgtgtgtgtgtgtgtgtgtgtgtgtgtgtgtgtgtgtgtgtgtgtgtgtgtgtgtgtgtgtgtgtgtgtgtgtgtgtgtgtgtgtgggtgagggtatatgaggcagttctgaaggcgagtttctaactgggattggattggattggattgtcaatgtagcatctcaggagtgtccatgaatgattttggcctaaatcaacagttgaaacttgagggtttaattggctatttctcccacatcaatcaaatggacaaggcagacacaaatatataatgatactttgatgtgaagccccaataagagctcaagtacaggcagcaaacatgtttttcgcaggcccgctgcacattccaaaaaacaaaagtaagcaaaataaaggaataccacactgcaaaatgtcgtttggccaatgggccaaacaaacttacatatcgccaactagacaggacagaagaaaatatacagttgaatatgaatagtactgcacaatttgaaaggaaatgttttcagcacaagcacaatggaggttctaatttttgccagacttaatattaattgcaccctagatggtactttggaaaatgaagtgatgttaagtcagaaaattataatgttaagaaaaatcatgtgatctccatcaaacgaaaatgcaccagaaacaatggcatacaagagaatatagacccactatcttacaggacggcaacattcaaacatacccaaagtctaggctgtctttactctgaacacgtgagtctagaatgcagaagtctaggctgtcttacaggacgccaatattctaacctagattagccctcttctatactatctattggctaaacagcctagacctcagttcagagcaaagcgtgaattctgcttctatcaaaccactacagcttttgtgggagcgggtgcagaacacaccaatcatccctaacttctctttttgaggagtataaatataaagaatggttatctcaaattccataacatctaataaggaacaaacagaatggaaaaaaaaatacggtgtcaacacagaggctgctaaaaaggaattcattacagagctcaatctgcattaggatgatattgggaaaggagacattgcccaatcatcataatactcatagtaaaaagtctacttaaccccagaagtattatgattcgttcccttttaaccccctattaaaatataaaacggattattcaacccactaaagtatgaaaaccagttcaaacaactccctagtggtttggccatgtggactacgacaagtgatagtgacatagtgatggattcgatttaaaaattaattaagttcagttatacagcttggaaaagaagaacgttaatgtaaataggtattcccaggctcactgataagtgaacaaagggagcgattgggccagcttgagtaaaattagctaacatgggagccgcataagcaataccacccgccatggttgagtagactttctcttctatagtataatataatataattcaatggctcacccaggacatatcaaagcaaccatcagagctaaaagtgagttgacattatgtgtcttgtcattcttcataaagtattttatacaagtgtaaaaaaaaaggagggcttgtatcatttttttcgcatgggcacttgtatcatgtttctagttcaatgtctattcagatgtataggaacttgaatagaaagctaagaaaactgtgcaaaaaaaaatcacatgtatcctcgggggaaacttcaaagaggaattttagaattaagataatttgttcacaaccgtgtgcaactgattggtgtgcaccatatagtgctcatgcataggttgatttcccctctgtagggtacagagagaataaagttatagcacaagttactccctccgcattttatagcgtgtattttgtgtcacaagtaaaatgatttgaccaacagttactctattaatattttaataattatgagccacaaaattataaccagaagatatctaataagatcaattttgtgtcacaaaattatgtattagtagagaagctattggtcaaagtcctgtactgacaaaaagttaaatatgtcctataacaaaaagaaaagaatggagttaggatttacaatttcctacta

SEQ ID NO: 9790 - DNA, 13575 bp, Oryza sativa
acccccttagccattccagcgagtgccgagtggtcgtggaaaaaggcgtgatttttattctgatacaaaaatcaaaggcacgttttttcagggatatttttttgttcactgccttatctaaaaattcgtaagcactaaaaagcaggcaacttttgcgactgactcaccttgaacatggtttcataccaaatggattcacataagggaaagtgcattcgtccatcgagcagatatctccttgtttcatgtatatcatctaaatagttataaaaaatttaaaataaaataacaggatagattaatatgaaatatatcataccacaaacatataaactaaaattcaacttttataaattataacaaaaataataaatataaatataaatgtagaaaactatatttagtttaatttattgttttggttgcaacttgtaaagtgaaacttcccttacatgatacggtttattggtagccagaaatgtatgtcgccagggatttgacttcaatccatacaactcaagaatacttttgagttaccgacacctgtcattattttcttttggcgggaaatataggccctgtttagttcgcgagatgtaaatgaaggggttttcggacacgaatgaaaaaactaatttcacagcccgtacaggaaccgcgagacgaatcttttgagcctaattaattcgtcattagcacatgtgggttactgtagcacttatggctaatcatggactaattatactcaaaagattcgtctcgcgatttccattataactgtgtaattagtttttatttttatctatatttaatgcttcatgcatatgtccaaaacttcgatgtgatgtttttggaaaaaacattttgggaactaaacgcggctataattgatatcaatacaaaacactgtcaagaagtacaattgttttttttttgcccatttttatttattgtcgattaaagttgaaaattgatttacattaaaaataacggcaaaaaaagtactccaagcaaattgttgcataaatataaacaactaataatgcaaaacagtttaataattgagtaaagtgcattggcggtcctcaaacttatagggttgtgtcatatatgttcctaaactctcaaaatacatatccaggtcccagaacttatcaaagtgtatcatataggtcccaaatcgacacattccctttaagatcctacgtggcgctgatgtggcatgccatatggatgtgacatgtcattttcttttttcttcttcttttctttttatttttctttgttttcttctcattcttctttttttcctttcttctgtttgggtcacagagaaagaagaagaaagggaaaaatagagaagaaaaaaaagaaaaaggaaaaattttaaataggatccatttgtcagtcaaaatgatgccacatcattccgtgtggcatgccacatcaacgccatgtaggattctgaaggggttgtggtgatttggaatctagatgacacactatgataagttctgggacttgaatatgcgttttgagagtttagagacctaaataacacaccactacaagtttaaggaccgccggtacactttactcttaataatttatctctccgccgtaccgggcaggacgtacgccgccatgaactccttcgcggcggaggcgacggcggcagggtcgggggagacgagcgtccgagggagggaaagcgtggcggtgaaggcgaggcgggagagggtgatgccggcgccacggacgtagctccgcctggcctttgaagtgttagttggagacaagtgccgcgagggcgcccgagggcggcgaggtcgaggcggacgaagtcgaggaggccgagggctccgagggcggcgtcgtgggtggcgggcacgtcgacgaggcagaggtgcgggagaggcttgcagtgaaccatgcgggcggcgcgctccgggatgcggtcaaacaccttgtgcggcagcgcgcggtgagcgttggaggaggcgaggagcttggctttggcattcacatcagatttggcatccgtttaaggaggggaaaggcaaaaatattttgtcccccacatgtcacatcggatatacgggcacacatttgaaatattaaacatagtctaataacaaaataaattacagattccgtctgtaaactgcgagacaaatttattaagcctaattaatctgttgttagcaaatatttactgtagcacccacattattaaatcatggcgcaaatagacttaaaagattcgtctcgcaatttcctggcgaactgtgtaattggtttttttatctatatttaatactccatacatgtgtccaacattcaatgtgacagcgtgaaaaattttgcttgggttgtcatgaattcatcaaattgctatgcaagagggagtagttaagcatgaaactaagcattatatttctccatcatgatgccattcacaagttatcagaggcacataatagatttcggctccgccatgcatatgttattttcatttgtttagagaaggccatgagtttaggacgttttggatcaatgaaggtttccagaattaccgtcatagaatacaatttgctcttcttatgagattcgtagaaatccaccctgttccaaccaccaaacaagcattgttctgtactgagaagagcacaacaccccatacataaaattcactttgagaaattaatcaatttttgacaaacatgagttcatcctccagcagtccagcacacggctcgttggactttttcactgagaaataaaaaggaaatccattttactccccccaaacttttcgttgaaatgcttgaccccctaaataatttttcagctcattttacactcttaactattgaaaatagttcatcttactccctaacgatatttgtccttttcgtttttctatataggtcatattatgcaatgaaatttggtggtattgatattcattagaacttatctctcaacatcttttggaattgttttcgctgtttacataggttgaaagcaataaaactattttttttttgcggggagcaagaaaactaatttaaacatagaggttttaaatatcaagcaaatggtcgtgaaaaaaaatttaaaattattttagaattttaatattggtgttatttatggcactacaaaatctaaagctgaaaatacgactcatataaatagaaacaagaaaataacgagtaaaatgaatcgtttataatagtttagcaaggtaaaatgagaaaataactagtttacaaagttaagtgatccatcacaatagttcgagggagtaaacttgacttttcttaagatactagtgtattaagttgcgtattcgcgcagctataaactccctctctagattgcggtagtaataataagcttaaatttgtaatgatgattaatcataacctctttaaatggatgcatagctgatagttatatcagtatatcacacacatatacatatgctcatcactgttagatatactttgaatgatataaagcttagtcggatcatattaatctttattaaaagatgaggtttattcgtaaaccatgtgaattgtaaaattatatgcacaatatttgttggatctttctaaatataggttaatgatctatttgcaatttttttcctcgcaggaaagttgcatagtttttaaattaaaagtgtacattgtaaaattatatccataaccttactgttttttcttagtaggttaagaaagcttctagacaaagtgaatccaatggctcatatttcttcttactattttgtcttcatgtggattcaatggctattattttgttaattatgtagatcatcctagttaattcttgggattcatcattcacttatagatactactatttgagggtgtccaattggactttatccccgttcaaagccctattgcgtccacagatgggcctaatagcccacaagtgtcccttttttttttctttttatattttttgcgcgcgacgaggaggataaggagctcgcgaagccgcgcgggccactccgccgcctcccatgtccaccgccgccgccgccgccgccgccgccgccgtgcagcccgtgctcccctcctcctccgcctcaaccggaggccagcagcatggtgtactcacggctgaccgcgtggcggggctgctcaccggctgcgcgaccctccgccgaaccggcgagctccacgccgcggcggtccgcgccggcgtcgacggcgaccgggcggtgggcttccgcctccagcgcgcctacgccgcatccgaccgcctcgacctcaccgtcacgctcctccgcctcacgcccgaccccaccaccgtgttctacacctgcgccatccacgcccactcctcccgcggcctccacctcgccgcgctcgcgctgctctccgagatgctgggtagggggctcatccccacctagcacaccctctcctcctccctccccgcctgccacggcctcgccttggccgcgcccttcacgcctacgccttcaagctggcgctcgccggcgactcctacgtcgccaccgcgctgctcggcatgtacgcgcgcgggggcgacgccgacgccgcgcgcgcgctgttcgacgaaatgcccgatccgcacgtcgtgccagtcacggcgatgctcacctgctacgccaagatgggggcactcgacgacgcgcgcgagctgttcgacgggatgcccagcaaggacttcatctgctggaacgccatgatcgatggctacacgcagcacgggaggccgaacgaggcgctccggttgttccggtggatgctgcggtcaggtgtcgatcccgatgaggtggccatcattcttgcgctctctgcagtcgcgcagctcggcacagcagagtccgggaggtggcttcattcctatgtcaagaacagccggcgagttcagctcaatgccagggttggcacggcgctcattgacatgtactgcaagtgtggcagcctggaggacgccgtgtcagtgttcaacagcatcggcgacaaagacatcgtcgtctggaacgccatgatcaacggctacgcgatgcacggagatagcaggaaggcactggagatgttttcgcagctgcggtcacaaggcctctggccaactgacatcaccttcatcggcttgctcaatgcctgcagccattctgggcttgtcgacgaaggccaccaattcttccaatcaatggaggaggagtacgccattgtccccaagatcgagcactacggttgcatggtcgatctcctcggtcgtgccgggctcatagaagaagcattccaccttgtccagagcatgacgatcgcccctgacaccgtcatgtgggtgtcactgctcgccgcgtgccggcttcacaagaacatggcgttaggccagcagatcgccgactatctcgtcgccggtggacttgccaactccggtatgtacatcctcctgtcgaacatctacgcggctgttggtaactgggaagaagttgcaagagtaaggtccatgatgaaggccagtggcatccagaaggagcccgggtgcagcgccatcgaggtcggccgcaaggtctacgagttcgtcgccggcgacatgagccatcctcgcacagatgagatatacgccatgctggagaagatgaacgggattgtgaaagagcagggacatgttccacagaccgagctggtgctacatgatctggatgaggtgaccaaggagaaggcattggcagttcacagcgagaagctcgccgttgcgtttgggctcataagcacggcgcccggggagacgatcaagatcgtcaagaacctgagggcgtgcgccgattgccatgccgtgctgaagctgatatcgaagatcactgggaggaagatcgtgttcagggacaggaacaggtttcaccatttcgttgatgggtcatgcacttgtggagattactggtgatgccgccatggcgtctcacagctcataggattgatttggttttagcattgctactagattttggtagaatagaatgaagtgttgatgtttggctttgctaaaaatcgagttagtataggttacattttacagtctgcttccggctttcctgatcatgtttgcagccatgttgggaaatcggaggcaggcatcttattatagaaaacaaaatcaagttgtaccattcaaagtgtaattctaagcatcattctacaatttcatgcgccaaggagccaacaaactagcatcaaaacatctaccagtccacagcagctagcacaacctgttccatggcaaggatcagttggcacattcacacctgacctgagggtattcattccataataattaaaagttagtaacaggatactcacaaagaaccaaaggagttttattctaacacaaaactccacaataaatttgttggtttgtctgtaattgtccaattcaattacatactccatccatcccttatattttaggatggagagtgccaaggcttttgcagcttctaacattatgtggtctgcctttctcttaatctttttcacgccatcgtgagaatttcatagtacagttttgtgtgtatttgagtttacttttattagtacagttttgtgtgtatttgagtttacttttatttttttgtatgattatttcttagtatatttgataggttgatgttaggagaactgtgcataaataaaccaagcaatctcctcacctgcaaagctcaagattaatatttcttgcacgcataagtttatcttgagagatttggcacaataagtgtctccatgtatgataagattataaacagatcaagaaacgaagatactttatgatatgtttcataacttaaataggacagatgacaactaaaaattgacttttgggtgccaaactagtataacataaataaaatctaattaacataaagtgcagaagatcttagtcttcgcagagcataagatatagtggtttgatgtcatgtcaataacagataactcgatagagttgtttaaacactaacagcattctaaccgcaaaacttgataaacacaaattattttcatccaatctctcaatatgttgtataagtttctaaacattgacatcggcaccaaagtgcagaagatcttagtcttcaaagcagagcataggatatagtggtttggtgtcatgtcaataacagataactcgacagagttgtttaaacactaacggcattgtaaccgcaaaacttgataaacacaaattattttcatctaatctctcaatatgttgtataagtttctaaacattgacattggcatatgttgtataagtttcaaacattgacattggcaccactagcaggcttcacatatttttgattaactctctctatatatatacccgttgttatgaattcatcaaattgatgtgctagaggttttgggagtagttaagcatgaaacaagcatttctccatcatggtaccatccacaatcacaagttattaggggtattaggttctggctccggcatgcatatgttgtttttgtttgtttggaaagggctaagagcctaagatgttccggatcaatgaaagctttccagattaccacgagataattctatttgtacttaagtacaaatccactctatagtgttaatgtagatggtgactctatagagaaggaaacaagtcaccatctacggtctgtcctttagacaaacttgctttactgtactcagggagcctgtttcagatttttcctgaccgcatttgcggtaatatatgtgcattgaaggcatatatatatatatgtactactataagtaagaaaatcaagctgtatcattcaaagaataattctaagtaagcatctttatacaatttcatgcaccaggtgccaaaaaactaatataaaaacatctatgtgaaataacttgaaacaaaacaccagtcgacagtggcacaacctgtcccatggcaaggatcagtgggcacattcaacacccgaattggtaactaaatagttacaagctactcattcaagaataactaaaaatagttacaatttaatggagttttcatcggcgagcccgggaggctgcccgggctagctgggcggtggctccgcccttgcttctaatcaatggattattgtgtgatgcttgtgcttccgtctagtaagctggtctgctggctcatatatcccatcatcacatcattattgtcgtaatttcacatggcttctagggtgagagaagctaattacatatcttacacaaggaagtgtgcaccttggccaacggatcaaaagttattgctatcatcctgagatcagttgcccatcgaaatagttacctcggaaaaacaacttcaattcatgtttcactccttcaataccatgtactttcacttcttgaaaatccaaggagatgtgcttagttttccagtcatctggctgaccacaaatactttacccatcagtcacctagtaataaccatgcataatactaaataaggaggatgcaattttaccttccaaggctgtaagtccactatcagtacatccgtagcacatgaaatacacaagctccataagcatggggtcctgatgataaccgcaggaacagtttctccgcatgtggaagtatagttatgtagtccatcatgtattgcttgtcatcaaggttctgttgcagcaaagtttcgattagtcaaaaagaaaggaccacatatacatcacatagccacggaaaaaccacaggcatctttttgttaaaagaaaaacaaatgcaagggaacgagaacaagaacaagtcagccttgtcgtaatgctagaggaagtgtcgcaacatgttctaaaatattagctatcattatgcaaacgatgtcattaccatcatatcacatatatatgtccagaactaagtcatagtgttactttctaattttactctataatctaaacaccgaaaacctattaaacaatattttttctcttttaaaaaattgaagtataggtaatgaggtttagtgataaggaagcttgttaagactttattgaagggcaattagttggaatatactctattcgtaaaaaaaagagtaattgtagcattcaaaacatggtaattgtagcattcaaaacattcaaaacatgaattagttgggagggaaaaaaacctaaatgcctctcattaaatcattactcaaataaatcattttgagtcttagatttgagctgtgcatgtgaggaagttgtcggtttgcttatgcacaattctcttaacattgacctatcaaacgtataaataaactgttatatgtttattcaaagattcattgagttatacaagaatatcaacaataaggagtacgtaagttattctgatagatttggcatccaatctctcgatatgttgtataagtttctaaacattaacatttggcacaccactagcaatcttcatctattttagattgactatatatatgcacacgacacacgaattgttatgaattcatcatattgatgtgtaagagattttggaagtagttatgtatgaaaaaagtgtttctccgtcatgatgccattcataatcacaagatatcataggtataccaaaggtacaggctctggcatgcatatgttgttttcgtttgtttagaaactggtagaagcctaagacatttagatcctaagacgctcagatcaattgaagctttccagattactgcgagagaatccaatttgtatttcttgtgaatccaatttgtatttcttgtgagatttgtacaaatccacactctgttccaaccaccaaacaagcattattatgtacaagtaccacatacataaaattcacttgagaaattcattgaaatttggacgaataatggtccttcagctcatcaaagtaaaaataaataaataaataatagcaaaacaaatgttacatcctccaatattcggctttctacgccgctccatccattatggcctattcaaaacccattacattgagatatgagccgactaacctatactgggatttttcttctacgacaagtttaccattcacaatttgagtagaaacagaaaattgaggtttgtctttgctttaaaaaagagagcaaatatagagatggaaaaaagttcccattcccaaacttaaagtcagtctttgcttccggttttcctgacagttgccttggaaacctaagtcagtctttgcttccggaagtaactgagactgaagcgagaaaaactgaagcagaagctgcttggtgtgcctccaaaatgaccccaacgtcactactgtataacatcccacgttcaactccattttaccctcgaatctaaacactaaaaaagctattaacaccaaaaaattgtccataaaaatttttgaccaccacacacatattttgaatcaataacataataactatgcagaagaacacaaatcatggtaaacgatcatagcaaggtaaaatcagagtaccaaagctctgtatacatagtactgcaaccaggtaaaggtgacactaaaagtgtacatagtactgcaactaggtaaaggtgacactaaaagtaccagcaacaacaaccgttttaagttttaattgcagttttaccaccacaaggtatcacaccaccaaaaagtatcagataccaaagatcaagcaacatacttactaaccataataatgatcatcaggtgtcttggtgaaattgctttgccgaaattcatagaacaccccactcgtattctggtgtatttcaaggcaagccccagggtggcctgctacaatctcgcgtagcttctggcatgattcctcacttgcatcagccatacaatctaaagttatcgtcatttttttaagcgctggtgacaccaggaacagtagcgccacaaagttaaaatcatgctctgttcctctgaagctgcgaatttctgcttcctcgagaccatgcacgatggcttcccattcattccagtctgggtgctcatcacactcgcaattcgaatggcaaggactattcgcctgaaatcagtagacaatatactcatggctgattgattggtatataaacaaaatgaggtgtgacaggaaatatcactaaaaacaatgtagtgtaacatttaagcctagagtattgtgcccatagttgcaagtttgcgcatttaataatctttacaatggaatatcttaatgttcatgcctcatagtataaaagtaggccttctcaaatacaccaatcatatgacaaacataaccaatcttagaattatatcctaacaacgctttcaatgttgacgtaccgagtaacatatcagcccaattaccacgaattcaaatatattttctatctcaacatgacagtgatagagatgaaatggtttgtatcacaccggtagtcacctatgaaatcacaggtgcatggcgcaactaccaaggataatacctatgaaatcacatgttcaggaacaactaccaaaatggatgtgaacataaagccaatctaaacgacagaacattatagaacaggtaatgctacaccccctgagtcagcaaaaagaacttctaatttggagtttcttgtgcctttgcgcatacatcaagttttgttatagtttacaagctagcatacatatgaaaataggcacagtttaaggttcccaacgaaccaccagaaacatcagagctaagtatcatattcaaaccaacatggtatgtgctattaggaaataaagccttagtagtttaccactgttccatcaagtaatgtcagttgtaatcttttaacactggggcatagcgagagcaaatagaatactgaagttccaactgaatgtcctcttgcgtacaaccataaagacatggtattcatgttgggaagcttggttatgtattccatcaaatattcatatttatctaaatcctgcactaaattaaaaaaacagtcaaaaataagaagggtcatataagatagtacaagaaatgcagaaatatatagttttattcatctgtcataaggaatgctttataatttaaaatgagcatttaaattgacggaaaggtgaaaggggtgttatctatttggatattccatggtcacaaacaaacagttgcattgctaattctctataaacaaactctgagcatgagtatcaacactgaagattgatatgacacggagggggagggtggaatacaaaacatgggactttcgaattcagcttttagtgctatgctctacacttcttcttttttttatctgtttggccaacaataaggaaacctatacttgaattctaggcacatgatgcttgatcatgaataaggaaacctctatgtggtaatgtaatacaatttgaccaaataaacaaatactccataaagataggttatatttctcaactctcgagttctaacataataatttcttaattttccacgtttgaactatgtgtgttaatgatagttatttttttagcttaagctacgcatctcaaatactctccctattccacttgccaaattcagaacatggatgcatgccgatgtccgacactcgcatttacatctcgtaagcattgcaaacatgcaacgacagtaccaaaacaagaacatatataataaaaatatgccattcatgtaactacatacacttaatcctcccgtggtcccccttaactaattttgatggttcgatctcgcaaagagattaagaaccgtttaaagcgttttcgcgggaactacttgctaacttatttccacattagagtgttttcgcgggaactacttgctaacctatttccacattagagaacaggtgttatgttttccatgtttgaactatgtgtgttaatgatagttttagtttttttttagctttagctacgcgtctcaaatactctccccattccacttgccaaattcgatgcatgccgatgtccgatactcgcatttacgtctcgtaaacattgcgaacatgcaacgacggtaccaaaacaagaacataacaaaaatatgtcattcatgtaactacatatgcttaatcctcccgtgcttcccccttaactaatcttaatgcttaatggttcgatgtcgcaaagagagtaagaaccgtttaaagcattttcgcgggaactacttgctaatctatttccacaatagagagagcaggtgataagtactcactctttcatagctgagcaggaggtctagacggtagacagccgagaagcgccccaagagcaacgcgaattcctgaatgattgtgttgtccggccgaccaaagacaggaatggtgaaggcggcgagctgctggaggcgcgcgaagccgacgaaccgcacagaacctatattaaaccgatcgccccatcgaagagactccagatccggggcatggatcgagcaattccactcctggatgtagtagaagcaggatagcagttcgagcgtcctgaggccgggcgccatgagcgtgagctccatcaatccggggacgaactcgagctcgaaatggtggagggagtcggagtagatgcccatggtgtcaatcc

SEQ ID NO: 9791 - DNA, 26642 bp, Oryza sativa
tatacacgagtaaaatcaaacgcacatatacagtcacattataggcaatggaaggacaatcatcatcactacattatgcatgataattaggagtacaatgcaaaagtgcatcatatatactctcttcgtccttaaatatttgacgtcgttgactttttgaacatacttgaccgtttgtcttattaaaaaaattaagtaattattaattattttcctatcatttgattcattgttaaatatatttttatatatacatatagttttacatatttttttaaaaaattgaataagacaaacggtcaaatatatttaaaaaagtcaatggcgttaaatattttgggacggagggagtagtgtgtgtgtgtgtgtgtgtgtgtgtgtgtgtgtgtgtgtgtatatatatatatatatatatatatatatatatatatatatatatatatatatatatatatatatatatataatgcacgtatacgtaatatattctatctcaggtatattcaggtaggatattttgggacggagggagtagtatatatatataatgcacgtatacataatatactctatctcaggtatattcaggtaggttaattatgaacatatacgtactgccagcagtgttgtaccagctatgtacatgtgtttttgtacgtagagtacgtagcatgtctaggttggccgagttggcttcgtgtctgccacgtacgtactttaatttgtaattataccggccacagacagctcaaaaaattaatcactaatttctagctatgcatgggtgtgtttgagaggaggtttaatttgcaatttttttttttgcccattcaatgagttatttaaaaagataacattgtttcaattcccaactggattaactatattgagttctggagtgaaggttacacacatgatacatccattcttattatatttttctgggtttcctcaaagtaatcggtattatcaaatggctaaaatttctccgagttttggctatcattggccaaaaccacacctcatcctaatctcgctatatatgttttgctactaacaattggtcctcatcaatgatttatagagaggaagagcccaagtggacgcctgagtcctgaccagcctgagagctagctctgccgtgcttgcctataatttctcctcaccggacagatgctatggccctcttcttttctccaacaaaaatcagataaaattttggatacttatgacatattttttgaactgctaaacggtgtttcgtgtaaaaaatttctatatgaaagttgctctaaaatatcaaattaatctattttcaagttttgaataattaaaactcaatcaatcatacgttaataccccatcttttttgtaaaatacttaatcttaatctttatcttaatcttcatattagtgtatatgttacctaacctattcattgcttttaccttccgactatggcccgatttagatccatgggtaattttttagccctccctcaaatagcccaaaagtttcaaacatgtgagctatttcagggctatttggaaataacctaccaaaaaaactatcctcctcaaggggtgctaattggggctatttcggatggacccactgaaaaaaagtgccttctctcttcatggaaaagtgcattaaatgctaaatagctctcaaaataacccttggatccaaacaacttaattagggctattttattaaagggttatttccttgtgctaaaaaatagctctcaaaataactcttgactagttctccaaacatgccctgtatatcattgcgccgtcacagagagtggtaaagcctgggcttggccagcatgagcggcttcacatcccctgtctttgggcattacggcaaagtttgctgttcctccatcccaaacgtccattccatacctacagctagattttgctggtccatacatatatcacctcaaaaaccgtcttcttctcaaaggaagacctcttagacgtcatggttgtgtgacccactgtagttcaattttgttgaatgtgaccatcatgaatagctgaatcttcaagctagactttattatccacaatacaagatcattagggattatatgtgtgtgcgtttaacaaatgtatcaatttttttcccagtagacatggaacaaatgagtctgatatcaaaggcaactctagcaagcgtttaatcaacgatgtgtatttcgttacgttttgctggagaaggaaagcaatttcttaattgggagggccagcaaaatccatctgtaggtatggaatggacgcttgtgattgacgaacggtaaactttgttgttatgcccaaaggcaggagatgcgaacccagcacgggcaagtacgtgcctaggctccgcctcatgaagcagcaggatatatgataagttattttactgcttaattaacctgctatagtgatagttctaaattctaatggagtgctttatctattatttttatacttaaattgtttgcactctgttgcttgaaattaaagttaaagcggtaggattatattctctaccaccattgttagacttacctaggctcaagaaaatttttggatattcacatatactatattattggattatgacacatgcacatgagctaaatcgttaggagatccagatcgaggtaggatcgattaaatatttatatattaaaagaaaatttgaaaaagttaaccgcgaaaggattgacttacaagtttacaagcagcgctagtactcctcaagaattctgagacagatcaaatatataaacccgtccaattaatgcaggcattcgtccaaattaaacttccatttttgaacggttcgtgaattcaaatcttttcaaatatggcatataggagtaacatgcatgtcaaattgcactaacacaattacatgatgagtttatagtacgagcactttgtgtacaggagtatatatatatacgatatgatatctagagtacatatatttttgctagttagatatatagcctcttcaattcacagccgcaggtccagccgtgcgtacgtacatgcgcattaacattaatgaaataattactcgcttcgccgagccaaataaaaagggtttaaaagtgaacagtaatttcgatactactccatccgtccttaaatatacggggttttaggacacatcctatataatatgtgggagggagggagtatttgctatatattcgatatggcagcacccagcgcccgcaccatccgcggccctttcagttttccgatcgattatgggtatagtactaaaacaacgaacagaaaattaacgagatatacggtagtgattgctttcgatatagtattaattatctccgttccatattgattatagattagcgtgctttttgaaagaatgaagtgaaattagataagagataattatagttagttgagaataaaaaaacaggtggaaaagtatctatatactcacttcgtcccaaaatatatataagaaattttagatggatgcaacatatcgtacgacaatgaatctgctcctaaatagatatggaggtaacaaagttgatgatatatatatatatatatatatatatatatatatatatatatatatatatatataaaacatctatctattatataataaaagtccattaaacttcctacaaacgcttctaagccgtcacgtggcatcctacaaatactcctaagtcgtcacgtggcactataatttagagaattctccagtggtccagccattaattttcattaaattagtggacccattatttaccaccattagatttatcaaaaaaaaatttcctaaccccaaaccgggcccaccatggacatgtacgtattactatatattccctccattccaaattaatctatatatagttttataaggttactcctaaatgatctacatatttgtattcatttattaagtctattcgttatttgtgcattagagtaaatggacattgatgcatgcatccatgcacacaagtatttataacccacatgtaatatattgatttgctattggctagaaaatagtggggatggtgcatgcatcgagtttgttgctagagtaaatatagtatgagagagttattagcttttcttggctttggtaaacctattaaatatataaatcgatttggaatggagggagtatatgtatacgtacaacttttttaaggatagtacgtacgtacgtactttcaccccttcttccctcaatttcttatatttttgcacatatttattctcctattatcatactttattagctagaaaaaaaaacttttgtgctgaacaattcaacaactataacatctaaatcataccacaaatttttaatccaccgttgacaataaagtttaactggcctacttaccgataaaattatggttcaggctcatcttgaggagcacgactatatcacgggaatttagagaattctctagccattgattttcattaaattaatggaccaattatttaccaccattagatttataaaaaaaattcctaaccccaaaccgggtccaccatggacatgtacgtattactatatgtatacgtacatttctttaaggatagtacgtacgtacgtacttgcaccccttcttccctcgatttcttatatttttgcacacatttattctcctattatcatactttattagctagaaaaaaaacttttgtgctgaacaattcaacaactataacatctaaatcataccacaaatttttaatccaccgttgacaataaagtttaactggcctacttgccgataaaattatggtccacgctcatcttgaggagcacgactatatcacgggacccatgaataaggcattagcgaaaactccttagcggcaatagtcggcttcacccgatcgtcagaggagtattcatatataagtttaattgttttatccaattaattggtagaagtggtatttttaaatatttatatataaatgtggacatctgtgagacatgggtatttgggtatgatgttgtcggtgacatggggccgggagtatcgtgactagaggcttgggtagccgcggtcacccacgtggcctgaccccctcgggggggtcgggcccgagggtgacgtggccacccctccctctgtctccccgaggggtcgggccgctcccgtttcggccccgagggctggggcgccccgaccccctgtggttttggcgccacgtgtgtgggttaggtgagcacagcggggctcacctaaccgcatttatagcgggttggacgagcgcgccacgccgcatttaatgcggcgcagcgcacgcttatccggtccgtgaacagtcgcggcgtgtgaccggtcacagaccggtcagatcgcgggttaggtggcaacaggcggcctgtcacacgcctcgccccgtcccgtcggaatgatgagagcttcctggctctcgtccctagccggagccggcgtgctaactcctggagttggtatgtcagtcccggtcagatccattccaggcttcagcgcaagcatggcaaggaagtcgctggccattgaatgaaggttgaaacgggcgtccaccggagagctgacaagcggagcagaagacgtgcgctgtgcttgtcagaggtcacttccggttgtagactagccctcattgtaaaaagaatgtttcttttcttaggcagctagaggcccatgtggtgacccctaaccagataaaaaggaggcccaggcctaagaggaggagataactctggccactcggttctagagtctgaactctctctcgctgtcgagctctctgtattccttcacacacagatccaccagaacacaggagtagggtgttacgcttctcagcggcccaaacctgtctacgtcgcccgtgtcttgtgcgattcttctcgctgacattccttagatcgagggcgaagaacctcacttagcgcccccggccgaaccggcaaaggggggcctgcgcggtctcccggtgaggagccccaagctccgtcagatgtggatattaacttttttatggtattaataatgtatttggtttattttttatagagctgcaattccatctatgaaaaagaaaatgaaaataagttgtggtgaatgctgaatttatatataaccggaataaagtgatttttgattcgatatgatagccattttgatcatttagtacatatcaatggtctatttcttatagtgaatatgatgagataatgcttcttttagtattgtttttatagacaataaataaattgcccgcgcatcgcacgggcttccgtcctagttgtaataatagccagtgagatctacatatatattgagtactccctccttttcaagttataagacgttttaactttggttaaagtcaaactgctttaaatttgatcaagtttgtagaaaaagtagtaacgtttttaacctaagacaaatttattatgaaaatatattcaattattgatttgatgaaactaatttagtattataaatattattatatttgtctataaacttagttaaattacaaacttagtcaaatttgaaacagtcatcttataacctaaaaggatggagtatataatacatggagtagcttatctttatctttacctattataaaagtttaagatgtttttgccaaaaaattttcgtacgttgtccgattccctcctcgcgatcttttttttttgcgatttttccgtgttattttcctgtccaactccctccccgttcccactcgtgtcgcgccacagcgccagtaccacataaggcggatgttgcacaaattcaaatacgtgtggcgccggtaccacataaagcggatgttgcacaaattcaaataccgatacaaaatccaatcggacattgaatctagagaaaaagaaaacgaaacaagaagattaaaaaaaccgcacaaataaaaaaatcgcacaaaaaaagcccacgaccggctcaaatcgatccaattttcttcattgagtacttcaatacccattcccaaattgaagatgaatatatgaacaacaaacaataatccccataaccttatttcaagatatgaacaacacatacaaatccttaagattaaaaaaacatgaataaacatgaacaaatcacatgagtaatttattatcatcgccatcatcactgcttctgcttctggtgtgggaggaagaacaggagggggcggcgtcaccatcgcacctcccagatcggcccatctccgacctccaacactaatggatcagacaagccaccgccaccagaggaaagtagaggagaagaagggtatttgtcgcacctgcagcccgttgtcgccgtcagctcgctaccatggcggtcgtcgccggttgatgccgtagccggtggcgggaggagtccgcaagaccgagtcgccatcgccgccgcctcgagtcgcctcgcccttgccgggaagggtgagtgcaggaagaggaggagatggagtagaagaggatggatctaggacgccggaccgccgccgcctcccttcccactggatccggcagaggggagggcgccgcccctgcccaccgcctcccctcccaccggaagggagggcgccgccgcttgccaccacccgtcaacatcgagccctcccgcggccccatggcgagggagaggaggcgagggacagagaggcgtcgctgcgcggaaggagagccgccgacgccgaggagtagcttgccggcgctgctccccggctcgttgcgcaccgctgctcctgctctctaggcatcattgccgcgggacggcgggtcgtgtgtagagggagagaggaggcgtggagaatgagagaggagaggagaggatgtgtggctggcgacaggagagagacggggaaagagagagagagagtaaacgagagagggtggatagagataatgttctttgactagaaacagtcacgatattttctaagtaacgtactgtaccagcttctgtttttcttatactccgtttcgaaatgtttgacaccgttgactttttaagcacatgtttgaccgttcgtcttattcaaaaacttttgtaaaatatgtagaattataagcctacataaaaatatatttaacaataaatcaaatgattggaaaagaattaataattacttaaattttttaaataagacgaacggtcaaacatgtgctaaaaaatcaatagtgtcaaacatttcgaaacggagggagtactaaaatggaatctatgacctagatatgctattgattgaattgaattccgctgaaaaattacagtgggctgagatacacatatatacttagtgttgttctctttaattattattttctactagcgaaaagactcgtgagttataacgggtgaaaaaatatttaatcataatatacgtttttcatgcataaccatgtcaataacaatgtttgtatggatcgtttgcagctgagacaataaaaaaattagaacatcttcaatgtaatctcgcatgtttttatttaattttttttacctacgatggaaatattttttttctcgcatatttttttattatttatagaagacagaaaacattattttaacgctttttctgactttttttcttacgtattttttaaccgtttttattttctcatgctttttttaagttgtagaatgaaaacttctcttttgagtagttatattagattagagatagagaaagatatatactgtctacaaaaacgaatagaaatcggacttcttttccacacttttttttccaccttttttcacacgtgattttttagtttatacgagccattttttcgtcactttcttaggaaatcggacaaacttttttttacatgtttttgtggtttttttatttttcgccttttacaaaatcagacttttttccatttttatgggaatcggatctagcttttttttaaaactttttttcacctttataggaatcagatttctttttcggttcggatctacgtttttttttgccacttagtggaaccagaatttttttagttgtttttcgctattttttttctcagattttttcctttttagggggaatcggatctacggttttttttcaccacctttttaggggagtcggactttttttttgttgttttttttgctattttttttattttgacggacgaaggaaacgttttgaaattttttaagtagtagaaattgctgacaccaaaatcaccaaaacttttctactattataaaaattgaagataattttaccagtactctggtacgtcattcgtgtataagttgatttttaaccgtattgaaaaatacagttcgttcgcttttgaaaatatagatctatatttgagtcgggttttaatttcgttcgcttttgaaaatacataagaagtcgtataagaaatctcttgaaaaaaaactcgcgtgctaacttaacatgatttaatctcttgaaaagaaaaacttgcatgacatgattttctagaaaagtatatatccaagcaaattctcacagtaaacaataataagattataatagccttcacccgttgcaacgcactggcatttgttttaatatagctcatattcagactatatgtttgcacagtagatgtttattgattcttacgtacacagtacgtacatacgtatgtgcgtacgtgcatgtacgtacggtacgcatgctcttcaatggcaggcaacgcatgtaatatgtatatatatatccggcgcctgctcgatctctcgtactgaaattaatttaacctcgacgtaagtacgcgtactgtttattacttgggcgcatatatgatggctcgtaattagttagtggtggtaagtgtcaaagtacactcctgtcagtagtgtacgtagtagtaaatccaccgtgtgtatattaactccagtgttaattgtgctatcacttgtggagaaagagtttatagtcccggttggcaaccctctgtacgaatccgggattaaaaatgtccatatttagtcaaaaatacatcttttgtcccggttaatgtaaccaactgggactaaaggcttttttcttttttttcttttctcacgttcaatatctccaaatcattataaaaataacaaataacaaatcacaccacacaacacaaataacagatagcatgaatcacatatagttcacatatcacatatcgccccatatcatttacaaatcacagatcacatcacaaatcgcagatcgaacagatcacagatcgcataaattatagtcattcacatcacattaagaaggaaaaaaaagaaaaaaaagagtaaaatttcccatgctggccaccgccggggcagccctccgcggccctccgtgcctccgccgcttgctgccgccggggcggccctccgcgcattcaccgccgggcttccgtgcggggcagccgccgctgccggccgccgccgccaggaagacatgggagaggggaaggggaggaggagaaggacgaagaggagaaggagtgaggaggagaactaatggaggagaagaaaagctaaggataagactgaggagggacagacagatcgacgcgccaagagataaacatcgcgccggcttggagtgatttttagtcctagttggtataaacaaccggaactaaaaatccaaccgggactaaaaataattggggcttgacacgacctgacaacttcttcaaccgggactaaaaatgatcttaccaaccgggactaaagattaaaaaataccccttagcttttaaaccgggactaaagaaactttttagtctcggtttttattgaaaccgggactattgtgaaatttggccgaccgaccaaaaatagtttttccacccgtgtaccatacatggacaccatccatgtatactccattattattattaagctttggccagcagtttgtagcctacctacctcttcgtaattaatttcatactctaaatttagttaattacttattagagggcgtgcttattccgttcgtttctgattaacatatagattttaccttaattttcattagtatattttttaaattgctaaatggcatatttcgtatgaaaatttaaaatatcatataaatctcgtttttaagtttgtagttaaaacttaattaaatatgtactaatgactttcttattttacatgcatgttagtacttaatcttcatattcagtattaccgaatggggtctcagaggtgcctatattgtcttttattatatatatacatggctcatgttgtattatacttcatgatgttcgttaacatatagcagtattttccaccgtcaactagcttactgaccgcgggggggggggggggggggagattaatgtcagtaagatatacacatataaatcgttcgtgatttttatatgacactctctaattaattttctatataaggattatatacttatctctactactctaaaagataggtttgtccatccacccctatcatctgttctattcaaggcattccctctctcaccatgcatataggtcacatggaaatcaatatgggtgcagctaaaaattgtcacacactatgatcatattcaatctatgatcgtagattcgtagtgtgttatatctataatcctgttacaaatcacgacagacaccttagtcttagtaatttatttaaataatataaaccattacaaaatgactacttttactcggtcattcggtgattgattagttaatcgactatagatacaaagcaatcagtttgattaacttttaaccgcagtcatcaaaacaccgacactataataggagggtttttacttgtaagttttattcaggagaaatgtgagtggccggaggagttcagcttggaagctagcttctgtgttccaagaaccatacagaagacgaaatattcgccgcgtacttaaacttttcttaaaattttcttttaccacccaactttttattaatactccctgtcgattgatatatatttattttatctttgatttgactgcacacggattattactagtactgccattagttcccctcctagagcaagcaacattgtccctcatttcggtcccacattttggagaccttgcatggtgatggaagatacacgtacatttgctcctcccttttttttaatagaaaacgttattgatttttcaataagacgaatgatcaaacgtgtgacaaagagtcatcgacattatctattaaaaaacaaatgtagtatttaattactactagaaaccaggaaattacatgcattttcgaatgaatttgttcatttctcatgaaaatccttcaaaattcctcctttctaattaagcttctatatgaaatatttaacatgatttttttagaaagtgtactgattaattgatctataacaaataaaagccattttgttttactccaaagctctttggtctatgtcttcaaaattcctcctttctaattaagcttctatatgaaatatttaacatgatttttttagaaagtgtactgattaattgatctataacaaataaaagccattttgttttactccaaagttctttggtctatgtctatatatctctactaatataaaaattgaagatgcttttgccggtattttggtacatcatctatattaatttgagtcagtttttaagttatttcacttttggaaatagagatccgtgtatgagttggattttaagttcgtttgcttttaaaaatacaaaagaagtcgtataagaaatttctttaaaaaacttgtatgctaacttgaaaggaaagtcagacttctaattgaagctcatgattttctaaaaaaaaatccaaatgaattctcatggtgaatttcatcctagctaaaccgtataacaataataagattaaaatagcattcacctgttgtaacgcacatacattttttctagttaatatataaatgacaaactaaaatatatatgcacgcatgtacaatactactaattggagtacctttgtagctgtgttgatcggtagcataagccagacacacacatatatgcatccctacatatacgaggcatacagaaattatagaggctatacgaactatagtactatcgacaatataaatatatgaatgtaaattgagaaggtgatagcctctactctctgcctcaaaataaataaataaaatatagaattaatgtgacgtattctaatactataaatttaaacagaaatactaagatatatcacatccccgtattaggttaatttatttattttgagagggaaggagtttcttagctggttaattaattactagtagatattactatatccctaatccatggccattaatttacatcatagtagtattgatcatgacaatcgtccttaaaaaaaaatattgactgttacccttacgtgcagtacattgacaagtacatgcatatcatgtattataattattgggtcatcaatcaattatatcgatcgatctcattactctctctctctctctctctctctctctctctctatagatttgtttttgtgaggtctctatctcagaatctgtttcatcccgtaaaattatatacgctagtaagtagcctgcatatatgatgcattattcccaaatcatatacagagatggtggactgatgcacatgggtacgtgtaaactaattaagccttctagctaggtccttaatcaattaccatgggggaactgatgacaaatgaaagagaaaatcttatcagatcaggtctttttagtcagggaggtgtgtgacctcatgactggacacggagagatcttagtcagaaaaattcaccaatgtgtaaactcagccagtcattctttagctaataaggctcgttatgaagctggcttaaaagtttggttagagaataactgtgacgagttactacatcttgtaagagttgatttaaatcctgaataaagatctccccttttacccgaaaaaaaaatatcaaggtgctagccatcttagatatattaattatatattttatttttttctgtttgcatcaattggtgtaggtatggaaggcgcaaaaattaattactctactgaataaatgtccagattttttttcttggtaatcatcagctgggttgaaagttgaaattaacaaacactctatagctagcaacgagacgatctctgaggctccctatttcaatatttgttggctagctagcttgctttcatatacataaatttgtctgccaatgaaatgaaactacagttcgatcaactacttgctgttgtacgtgcaaaagatcgatatatatgtatcacacatcacgtcggtcgatcgagagcgatgtgcatcttgaaaattgattgatccaccatagctagatggacggagcaataatgggtgacaatcataaaggagaaaattccatcgatctatagcacaaacatcttatcagtaccaatatatagaattgagatctagtgcagtcctaactgtgacagcaagttaggaactacacatcatctcagccatccattttttcaatgaacggtctagatctgatgctatagtattgctgctacagtagttatacagtttttttagacgtgaacagtattttgtagattttggaccctcagatttgcatcaaaaggtcctagtgtgactgcttaggttacagtcacactaggtactgcaccggatccaaatcccaatatataaataccataaaattcccccacctttcaaaaaatacgatatgtatcacacatcatgttgatgatctattgattgagagtgatatacatattgaattgaagtgcgatgtaatgtccatgtatcgctccttgtctttctagctgataataaaaattcaggtgggaaaactctttccttcgatgatatattgtaattgattgatcgacggtagctatggactcatggatggatcaatataatgggtcacgataaaacgtgtgcctcgcaacaacggaagtagcatcgaattgctccaacttccatagcttcctcacagactccatagatatgatagcacgtactccctctgtcccataaaaaacgaatctagaatcagatgtaacatattctagtacaataaatctgagcatatgtatatccagattcgtagtactaggatgtatcacatccgatactagattggtttttaagggacggagagagtacatctgtggagtagcaagctaggatgacgtgacggcactcacttgatattactttttcctccgtctgcgactttaggatcggatttatgtatttcaaaccctgttttaacattgtcaatatatattatatgtactaccttcatattttaatatatgacgtcgttgatttttttatttagaccattcatcttatttaaaatttttgtgcaaatataaaaatatttaaatcatgcttaaagaacatttgatgataaatcaagtcataataaaataaataatacttacataattttttcaataagatgaatggttaaacgtatcttattaaaaaagttaataatgtcatgcattagaaaatagagggagtaattaataaagtttacacaaactattggaaacatataaggttgattgttactggatttatcatgactgaagtaacatattttcagactctgtcgattgatgtcgcaattaaactctacttgtatttctttcggttcgagtctgagagagtatgcacctgataattaaactaatgaataagtgcatgaaattatggaattacttgccccaggtggggttttaagtagtatattatagtgacaacatggttgtttaaaacattatcccaatgacaacaaccatggaatgattgagatgagaaatatgattaattttaattagttagcactactgtactagcatagcaaatttgaagggaaaaagtccacttagactcccttaattgttcaccgaatctaattcgtgaatcttaactagaaaaccgggtaagacgactccccgaattagtgaaactagtccaatttgactcctccggcggtattggaggttggttttgctgacgtggcgctgatgtggcggtgctaacccggatttcatgccacgtgacgcttacgtggcattagagttaaaacaaatatctatgggacctatttgtcattcaaccaaaaattattgtgggacccaccggcccacaaagcatcatttctccatcctttcttcctcctccctctctctcccttctctcttttctctccccattctctctctcccttccaaatcggcggcggcggcggccgggggccatggcggcggcgaggttggggtcatcgacggggagaggcgaggacgcggttgagcatgagcccggcgccctcgatgagggcgaggagcatcccgcccatgagcgcggagcggccggcggtgttgaggccctggcgcatggagaggaagccgctagtggcggcgccggcgatgatggagttccacagatcctccttctggtgcatgaagaccttggtgcagtcgaaggcggagaagaggtcgccccacaccgcgaagctgtcgcccacccgccgcgttcatcagcacggcctgcgcgccgccaacgaggcgctcgccgttgggggagttgtaggtgcccttgaggaagtggaagagggagcccctaactgtgcccatcccgaaaggcctgcccacgtcgtcggctgcacgggtcagaccgggcgccgcattagagggggcggagtgggagcagcggcgggccggcttggagacgggataggcggtggcgcggccgtcaccggcacgccgccgtcaccgctctagccctcgcccgcgcgccgccgtcgccactctggcccccggccgcctccaccgccgatctggaagggagagagagaatggagagagaaaagagagaagggagagagagggaggaggaagaaaggatgaaggatgacatgtgggccccacgtgtcagtgggtcccacaataattttgtgttgaatgacatatgagtcccatatatattttttttaactctaataccacgtaagcgccacgtggcatgaaaaccgggttagcaccgccacatcagcgccacgtcagcaaaaccaccctccaataccgccggaggagtcaaattgcactggtttcactaattcggagagtcgtcttacccggttttctagttaagggtcacgaattagattaggtgaataattaagggagtctaagtggactttttccaatttgaagcgctgatatcaaagttgctcaaagtgtacaagcatgttgccaatgaattatgggccgtgattttatatctaactgggctttaatttggtgttgggcttcaatttagcttcagaggttgggccacttccagatttttaataagtaaactgtactttaaaaaaaaaaacaagcaataccatgccagatggcagcatttttttttccagaaggtacactaatttaatctgctgctgcctaacctttgaattcaaattagaagcaattccactcaattccacccccattcattcaaaagtggcttaaagagttggtttgaattgtggcctaaataggccttaccaaattttgtcaatgctaaattttgacaagttttgacataactaattttggtaaggaaaatcgtgtttggattaaagttaaaatagcctaagtttatactattgaaatgacttattttcttaggcatgtcactaaacactattgaaattacgaaatattagtaaatctaatttaggcttcaaaccaaaccagcccaagccgcaaaagtggacaatttgccatcttcaattcggtatctcttcacttcatccatttgcccttccaacttccaacatccaaggcatattccacttggagctggacccactgacagtgggccccacctcgtcagtgacctactctccattaattacgctaactcctcacgtcgtctcgcccgcaaaatgcttctcttcctcctcttcctcctcgccgccggcgaggccgcggcggcggcggcggccaccacgctcaccgcgacgccggcgaagctcacccagtccgaccgcgagatcacgatccggtggtcgggcctcccggacccggacggcctcgactacgtcggcatctactcgccgccgacctcctccgaccgcgacttcctcggctacctcttcctcaacggctcggccacctggcgcacgggcaccggcgagctcaccctcccgcgcctccccaacctgcgcgcgccctaccagttccgcctcttccgctggcccgcgagggagtactcctaccaccacatcgaccacgacgggaacccgctcccccacggccgccaccgcgtcgccgcctccggtgaggtcgccttcgactccccctcccgccccgaccaggtgcacctctcgttcgccgacggggtcgacgagatgcgggtcatgttcgtctgcggcgacggcgggaggagggtggtgaggtacgggccggcgaaggaggagggggagggctggaaggaggtggccgcggaggtgaggacgtacgagcagaagcacatgtgcgactcgccggcgaactcctccgtcgggtggagggatccagggttcgtcttcgatggactcatgaagggattggagcccgggaggaggtacttctacaaggtcaatcacttgcctctgctttgaattgattgttaattactacactataaagatgaatttctttgtagcgacttcacttctgctaattatatgtgttcagcctgcaattgcaatttgggatttagggtagtattgtaggcacatgaaaatttaggattcgagtcttgagagtgatctaaagctccttttttatttcggatccagggattgaattttgttgatttagcgagtatgacttatagtacgttttgacctacgaattcagtttgaggtgaagatggctgaatcatcaaacttttagagatactaacttgagcatgagcacccgctttggaaattatgtttgattatcccctttttagaactgaagttggttatagtactacactaaagatgaatttttatgtagcgatttaacttctgctttatatgtgttcagcctacaattgcaatttgggatttagggtagtactgtaggcacatgaaaatttagtgctcgagcccaagagtgagctggagctgtgttttttgggctccagggattgaattttgttgatttagtgatcgtgacttgtagtaagttttggcctataaattcagtttgaggtgaagatggctgatgcatcaaacttttagaggtaattactggagcatgagcacccacctcggaaactatctttgattattccctttttagaactgaagttggttgaagtttttgtctcaacatttcatgggttattacatgactcgattggcaatactttctttaaggaggagtttagagatcagttatgtcatctgaaaatcatgattttcttttttctgactagctactaagcttctaccaatcaaacatgcttcagttctttcctgcagttagaatacaactgtatgtgaattgaggtttaggatttcagttacaagggatttcactcaaatttgttgttgctctatcttaagctttggttgttatgtgacttccttcttaactgtttgcttcatttgagtgacatatgcattgcttagttgctcttatggatcatgattggatttttacggatgctccatttaagcactgtagttcatactatttttgaatgttgggtgagttcttaaaagacctgatgagataccttttaggcagaatttcaaacgccagtttttgtttttgttggttggtactcattattttcaaaattctggttttctagtacttctctaaaatcagttttggttgtaagtacctttgttatctatttgcctttttgttctattattattatgtatggaaagcatgtatgctatacttttgatgaatgatgattaataagatagctgtggttatgcgacttacttcttcactgtttgcttcattgagtggcatgtgtattgtttaattgctctatgaattataattggatttttactggtgctccatttgagcactgtaggttataatatttcttaaagtttggtgattccttaaaagacctgatgagtataccttttggacagaaattcaaacgccatttttcttttgttggttggtacgcattattttcaaaattcaggttttctagtactttttaaaatcagtttttttaagtgcctatgttatctatttacctctttgttctattattattgtgtatatggaaagcatacatgctatactattgatgaatgatgattaataatatttgaatttttatttgcttctttttgctgacacaaatgaattgtcattttctttttctttttttttttgggggggggagggaattagataaaaaatttctcttatttcagagtttcagctttgacttcagaattttctccccaaattagcttaatttagacttaccaaattaaacaagaccgagccatgttgtgtttttaactgccatcagtttcatgtttaatcccctctaaaagatgtacaagcttttggacaatggcttctagagcaagtaggcccagtaaaatatgctagggtgctattgatgctaggcccagtaaaataatagtgagtaactgagtagtgacacttgagcatgttttgtatatgccttttgttgttcaatttgattgactgggcttttctgcataggttggtagcaactcttcaggatggagcgatacgtacagcttcatttcacgtgacaacgaagccaatgaaactattgcatttctctttggtgacatgggcacttatataccatataacacctatgtccgcacgcaagatgaaagcttgtcgactgtaaagtggatacttcgtgatattcaagcccttggagataagcctgcatttatttcacacattggggacatcagctatgctagaggttatgcttgggtatgggatcacttcttcaaccagattgagcctattgctgccaataccccataccatgtctgcataggaaatcatgaatatgattggccattgcaaccttggaaaccttggtgggcaactggtatatatggaacagatggtggaggtgaatgtggcataccttacagcgtaaagttcagaatgcctggcaattcttttgtgcctactggcaatggagctcccgacacccgaaatctttactactccttcgattcaggggttgtgcattttgtttacatgtcaactgagactaattttgttcagggcagtgaccaatacaacttcataaaagctgacctagagaaggtcaaccgaagtagaactcctttcattgtgtttcagggccaccggccaatgtatacatcaagcaatgaagctagggattttgctcatagacagcagatgctccagaacctggaaccactcttggtaacatacaaagtgacccttgcactctggggacatgtccacaggtacgagaggttctgccccatgaaaaacttccaatgtgtcaacatgtcatcaagcttcgtataccctggtgcccctgttcatcttgtgatcgggatgggtggtcaagattatcaaccattctggcagccaaggaaggatcaccctgatgtacctgtctatccgcagcctgagaggtctatgtaccgtggtggggagtttggatacacaaaacttgtagctacaaaggagaagttgacactaacgtacatcggcaaccatgatgggcaagtccatgatatggtggagatattctctgggcaagtatctaataacaatggtgttcctgaggtgatcgatgatacaaagctcagcacaggggtcagcaccaaactgaaaatccctctgttctccttggaaattgtaggcagcgtgatgtttgcactggttctgggtttctctcttggatttctgatcagaaggaagaaagaagctgcacagtggaccccagtgaagaacgaggagacctaaaatcacacactgtatctaatgcaaatgcaaatggtttttgatcaacaacctgtttataggatcgtgccccatttcttggggctctacagtgttgtactatagtgcatagagtattgtaacatgtgctgtgtcaatcgtgggcattgtagagtttgatcagcatatctgttgccgtgattctacgatacataaaggtttcaataagtgacattacgttcacatcaattggttggtatgagtggttaacctgttccataacgtaatgcacgattcattgtttcatctgtgtttttctgtttgggactgaatcgagtaacagagaaaatgtatcatgcagcaatttacaaaatcagtttaactgtataagcatttttacaccctgttatttaacgcccccattgtttggtttatttatggaataagcgaaacgacatatttgtaaacgagaaataatttgtgaatataacttttatatacatgttcttagcaacctactctctcggcttcacaatgtaagtcattctaatatttcccatattcatgaatatatatatatatatattcattaatattaatatgaacgtggaaaatgctaaaatgacttacattgtgaaacggaagaagtaaaagcaaaggctggaaaataaatttcgatgaaaaaaaatcttaaaatcagctacaaatttaatgttaaaaattcaaattttggctgataagcataaacggaaatatgtgtacgtcacgatgtaaaggtatcatctttattctgaatgatgatgattcatgatgtaaaggtatcatctttattctgaataaaaaatgatgaatagatttgacaccgattcaggtaggccaagaggtatccccggattggattgtgatcaaatgcagtagctactaggactgcacggtaactactgcacacaatctgagccctctatatcaaaatctaacggacaaaacggatttggcacagtaaaatcagaacagtacctttccacattaaatcactacagtgttttgctacagtgctcggatatatctgggacgtccattttagatcatgcgatgctagtttgactgcttattttgcagtcccactggctactgcacctgaatcggatccccccggattgggatcctctgactttactcagagagctatagtaccgtgactttgggagtatttctagccgtccgatccacagcgaacggacaagatcgatcgctagttcgctacagcgaatcggtgaatagtaattctgaacagtattttgcactgtttgctacagtaaaactacaaatcactattccgcactgtagcgacaggctcattttactgtgcatgtctgccgttcgcttcaaaagtcagaggagccgcttcccccatttgcacactgtgaggaccatgtctgcactatacgagcaggtacaacagaacaacagactataagccaactatgagtatattttaaagaggtaaaagaagagaaagaaaagcatcaggctacagatatatctgtagctagctacagtatggactccaaaacataatgtatgtatagcagatgagactaaatattaatagtatagtaagagctagtagtgggctatactattaaacttgctctactaccatccatttataaaaaaaaatatctatatgttcagatgagcacgccattgaatttggagttggagagactgtccatgttgaatccaatcatgtcgtcggatcggagctccaagaaggtgtgtgtcgtcggcgccgggatggcggggctggcggccgcgcgcgagctgcggcgggaaggcctcgacgtgacggtgctcgagcagctcgccggcgtcggcgggcagtggctgtacgacgcggcgaccgacgccggcgacccgctcggcatggccggcgtgcacagcagcgtgttcgcctcgctccgtatcaacggcccgagggagtccatcggcttctccgacttcccgttccgccccaccaacgacgccggcggcgacgcgcggcggtaccccgtccacggcgagctcctcaggtacatcagggacttctgcgacgcgttcggcctcatggacgccgtcaggctcaacaccacggtcacgcgcgtcgccatggcaccgccgcggcgcgacggctcgctgcggtgggcggtgaggagcaagcgccacggcgaggcggagacggaggaggtgttcgacgccgtcgtggtggccatcgggcactactcgcagccaaggctcccgaccgtcgacgggatggataggtggaggaggaaacagctccattcccactcgtaccgcgtcccggactccttcgccggcgaggtcgtcgtcatcgttgggtgcagcgtgagcggcgcagagctcgcgcttgagctccgccgcgtcgccaaggaggtccacctcagcaccaagtcgacggaggagaccatcacgtcggcgatgtccaaaagtgtcgccaggtacgaaaacctccacctgagaccacaggtcgaacacctgcgcgaggacgggactgtggtgttcgacgacggctcgttcgtcgtcgccgacgccatcatctactgcaccgggtacaactactcgttcccgttcctggacacgaacgggaaggtcaccgtcgacgacaaccgcgtcgggccgctgtacgagcacgtgttcccgccggagctggcgccgtcgctgtcgttcgtgggcatcccagccaaggtgcttctgccggtgttcatcgaggtgcaggcgaggtgggtggcgcaggtgctgtccgggcggaggacgctgccgtcgcaggaggagatgcagcgcgccgtcgaggagcacacccgcggcatggaggccgccgggttgccgaagcggtggacgcatgacatgttcttgaacctggaacgctgcgacgactacggcgagcgcatctgcggcttcccgcggatggaacagtggaagaaggagatctttgtgtcatccctctccgacatggtcgacgacatcgagaacttccgcgacggctaccacgacagcgacctcgtccgcgacgccctgcgccggcacggttggactcccgccgaggaggacgacgacgcccacaaataaaagcacttggattggactccaataaattcaggttaagatgaagcaaaccaaataaatacacgacaattcaacaaaaaaaatgctggcctgtctgtctcaagaggatttttcattgtactaaaaactgaacctttttattttcggaattgctataaatatgccgccatctttcttctcggattacattcgattttctcaccatacaattagtttagagatatgtgcgtgtccgaagactgataatgccatcgttaagtgctgatactgtacgtttatgtgcatcccagtctctagttatcgctggccattactgttgtagcagggggtgaacaccatcccctatactcggccaaaaactcgcatgatgaggaaagtgtttttgagctttgctcaaatcaaattctaatatgtagccgtttctgaccaagaatttgcattcgcccaatagggcctgttccaaggaaaatgtgttcgaacaagattacttgctcgaattggcatcactaaaggcattgtgtttgagcaggttctttggctaagacaagtgaagtgacgaggagctaaaagatgggagagtattcaagtccaggcacaagtgttcgactcgagcaatcgaagttgaggaaaagtaccatccagcaaagcatatattttagaaaagtgttatgggaaccacgtcaactgctctcaccagttagcatcaaatgttacttggggaccactaaaatgttttaatatgcccctaaggtcataaactttataagggtaatatgataacttcatgtaagcctgcaatagcaaactagtgaatcttgggtacatgataacttcctacggtcatattgactttgtaccatctgtaaagttcctttctgttagatgaaatgtgttgttgtataggactttaattacaaacgcgcgtgcgttgcaaacggtgattactatgtacaattaaaatgtgattactatgtacaattaaaattatataactccactggtggagaaaccatctttggtcggtccggcaaaatccataatagtcccggatccaaaaagaaccggaactaaagattgtttttagtcccggttataaaaattttgatctttagtcccagttcatcccctgtcaaatgtgtgtcaggaggccgaggatctttagtcccggttggtgtaaataaccgggactaaagatcaccactttagtcacggctggtactaccaaccgggactaaagatcaagatgatgtttagtctcggttgggagtaccaaccgggactaaaattaaacacgtagtatataattcctatcccttatcctctcctccacagttacaacgtagacagatcgaatctcaccccctctcctcagatctatcctctctaactctcttctccaactcctcccctcatcctctcctcccccttcctcctcccattcc

SEQ ID NO: 9792 - DNA, 18573 bp, Oryza sativa
ctcctggtaacatgcatggatgaaacagtctctatgatctgcacacatatcgatcagaccacgtccaagattacaagttgttcatacaacatgtccagttattcatctgataatctctcaccgtagctgttgctgcaattaagtggtaatttcatatccctgcagatctctcttccatctatctgaatatctcttgtgtagaagagaaattaacaaaccctgcatatgtatatgcaactatgcaagatctgatcccaaaatctaattaacaatttaccaatccatggccgtagctagcctcaactgatcacacatggaaccgtgtgaaaaccacaaaacaaacaaaatgaagatggcaaaaaaacacggatctatgtaatattccatggatctacaactacctaggctacatacatatatatatgccaatccacactgtttaatttaactttggcgtttgatgatgatgagcgatgcgtgcatgcatgcagttgatcatgaacgcagcggcagattcatctctcgaccatgttagtataggagtacacaacactagctggtggcggccactggagtgcgtgccgcgaagttggcgatggtcggccggcggtgcatcatcggagacctcgccggcgccgccgctgctgcctcggcggaagccggcgccgccgacgaacggaggcgatggcggcgcgccaccgcctgcagcgcctcgtccatgtccatctgctcctgcctgcagtcgtcgctgcagaacgctgcatcccctctacacatgcaaattaatcaagatcaattccttgttgaactttgaacacacaaaatttctgtgaaatttattaaggatatatatcaattgatttgcgaactgaattacctgtacatgaagatgtcgcggtcgccggcgatgctgctcttgcagaggaagcacgactcgaggaagtggagacggcggccgccgccgccgccgccggcaccgggcttcacgcggtagaacctcgacgccacctccacatacctctcctcctcctccatcgccggcggcgagccaccaccggcgatctcttccatctctaatcaactgcacgtcgtagctaatcaaccatgcaaccagctctagctagcttattaatttagctagctagacatggtgatctcttcctgtcttgtatcgatcgaacttgcacatatgtgtgtgtgtgtcagtgtattaaatcgttaatggtcctctcctggtagctagcgagtttgttggcagatggaggccaaatgcaatgaaagatgtgtgcatatatatgggtatatatgagcattttgtttggcacatagctgattcgagggccgaaggtttgagagaaaaccgtgggtggagtagcaaatgggcccttggaacctattggctggggctggatgtgtgcgagtgaccttggcctaggggggactaacctactctgcaactgcacccaacttgcagaaatatcatttatatatgtattcatataaatatcacaacatcaattaataatgcaaaagtaatcactctcctgtgcgtggaaaatggaaccagattactgattagcagtgttattaaagtattttctgggtcagtcatgcgagctctgcaggtgcttaacgacaaattaagcttttataaactctgcctttgatccttgcgatagaaaaatgttttgtaccacatcggccagcgaggcggcatgggcacggcatatagccgttctcatgcggcatccgtttgtacgaccagggcccatcaccatctctcgctgcatttacagtttttttgggccaaatgtagtgatccatcttttggcccatataattcaacaaagagaggcccatgtgattccactgccccatgagaagcgctgcgcgatgcattcgcagatttgggccgtaagttgggccacggctatcattttgggccaaatttggatcgcagaccagaccattggtagcgatcgcattttgggccagatttgggttagtatgttttgggctccaatttcaatttcgatttgaattgcaatttcgattttactatagttaaaacttcgtcatatgtaaatatatatagcatcattgtaattacacggtaactttcatataatttaatccgttaaatcgtagattcattttaagattcgtgcaagcgagaaaggaaaaaaaaatcatagtgtccgtacgtacgggtgagggctgctcgcttcatgaaaatagtgggtttgccgtacaatttttaaaagctacatataagtacgttatatgcaatttataatacaattacattataattatagactatattttacatctataaaatttttaaagaaaattttgtccacacatatacaggtagcgtgtgacgtgtgcgtctccgactcctccggccggtccatcgcatcacagccacacatcacgccgtagtaggattagccaagccaagcgataagccactcatttcgtcgccgtgtcccgcgtggctcgccgccatggacgccgccgtctccctccacctccacggggcgctcccgctccccgcctcgcgcgcgctccaccatctcaacccggcctcctccgccgccgccgccgcctcggccaagcagcatcagcagccgcgcgcgcgcctagctgtcacgaccgcgcggcccagcagcaggacacgcgcgcgcgccgcggcggcgtcggcgccgccagttccccctgtcgttcatcagcagcaccgcctgtcgtccagccgcgcggcgacggggtacgcggcggcgctggccgacgcgtcgctccgagccgggacgctggccagtgccgcccgccacgcgcgcgcgctgctcgtctcggacgccgccgccgccgtcgacgttgctgaggattcgcgggtggtcgcgctggtgaggatgctcgtcggcaagggcaaggccgccatggtcgccgacgtcatggccgagttcgtcgccatctgcgaccgcctcctcctcctccccgcgcgcccccacgccgccacctcttactaaagaattacattactctgtcagactctgctacgctgcaattaaacctcgcatgttcagaattgctgcttgttcattgcaacacttgcatattgccaattcatttctcagtaaaatatcagcttaaatctctactcttttttttttgtcgggccatacatgctacgtcccaaaatatagtaatctaggatcggattggatatatctcaatgctacgaattctagattgatgtattttagaacgaatggagtaatttacataatgttattcctgaatcatcatacatcatgtaccatgaccttcaattctaaatactacctccgttccaaaataaatacagccgtggatatttgtgcccaacgtttgaccgtccgtcttatttgaaaaatttgtgaaaaaattgaaaatatttagtcacacgtaaaatattattcacgttttatcatctaatagcaataaaaatactaattataaaaaattttcaaataagacgaacggtcaaatgttgaatgtgaatagtgcataactgcacttattttgggacggagagagtatgttgtactgtggttctgcagttcttctgctgcaaaaccgctgccaacctctaaataattcagggaccttgatctttattgcacagaaaaaatttgaagctagcaagctgtttcatctgtcacagccttggggtttataaatgagttcacataataaaaaggacaatcatatattggtttggatgatgcactagccacattatgcataatgccaaactcataattctcaatagaataattgagtcataaagttgtggttgtgcaaccaactgaaacaggaaagcagaggaacgtgagacgccatgggagattgacactgccgcagcgtgatggaaggtacgtagtagcagttgagaacctgtactgtatattaattgagcagttgaatgatgttaacgcacacgtaatccatctctgcaatgtactacatattgattgagcagttgagctataagaatatatatatacagtagcgtagcatgagctgcatatccctgatttcattggattaacttttgtgcttctgtaagacttgacaaatggagtatcttttagttgtatacatacgctgctcatacactattgatcctatgaaaactgacataaggcatgattcatgaagcacattacaagcactaattgatggatatatgtatgtacgcgagtgcaagttcatgaaaggaacgatcaatcttgaaagagtaacagcagtgctccctttgcttgtgacacactactagcttagctattagcacgtactcaggtactctacaaatgaatgatgaaagggagagtacatatatacaggagcaagagagccacaacctgtctaccattagtaattagtaattaacccccatgactgacagccaacaggaactgatcttttcaatcttgttaagttaattgatttgccgcctccgatcgaatccattaagaaattaatggaaagacaatatacatccacagtaggagcaagatcaaccactctcctctacatctccaatctccatacgccagcatcttaattactctacaataatcaatcaatatcaacgcatgcataccgcatacgtgatctcagaagaaaggtacagctccatataagcacacaatacctcgctcagctgtgcatagtttgcatattttgatcaatcaatcaagctaagcaagctagtgattagtccattgatagatatcgatggaggaggaggattatgtgttcaaggtggtggtgatcggggactcggcggtggggaagacgcagctgctggggcggttcacaaaggacgagttcttcatcgactccaagtcgaccatcggcatcgagttccagacgcggacggtggagatcggcgggaagcgggtgaaggcccagatctgggacaccgcggggcaggagaggtaccgcgccgtcaccagcgcctactaccgcggcgccctcggcgccatgctcgtctacgacgtcaccagccgccggagcttccaccacgccgcccgctggctccacgacctccgcgcccacgccgacaactccatcgtcgtcatgctcatcggcaacaaggccgacctctcccacgcccgcgccgtcgccgccgacgaggccgccgccttcgccgaggaccagggcctcttcttctccgaggcgtcggcgctcagcggggacaacgtcgaggaggccttcctcggcctcctccgggagatccatgccatcgtctcgcggaggtcgctgctggagatggacggcatcaacggcgacgccgccgccaacgccaacgccgcgctcatgctcaggggcaccaagctctcgctctccgacgagctctccatcatggagaccagcgccatcaagagagtgagcaggtgctcatgctcttaattacttactttagacgtcatcggctcatcgccatcgagagagtactcatgctcttgacatcatcatcatcatcgcaagttcataatatacatggatgacagatcttactgcagaagctgagacatcttggtttccaagacacataattgaagggaaaagtatatattaattcagctcttgggtgacaagcaagcgttagtttcatctcatcgtgtatctatttcaagtcacagcagagtgctccgacaaaaaaacaagattgtttgtaaaccatgcaagcgggcctttcttttcttcgttatgtatagagtctaccctaaagtagtttaattaaattaaaatacaaggtgatgataacaaatttcacagaaccatagaatcctgactcgggccatataattctgaatttaacttataacatcagtgcaaagcattgccagctgccattaacttcaaaaaccagcgcagcctcgcgacgctaaatgaatccatacaaaccctgaatcttgcaagctgcattagaaaacctaacgatatcgaggtaatgcctgcgcttactcctttggattttcatgagatctagcaaaaggattagattaaggtgaagatggctcttgcggttccgactgactgttctgaactattcgagacatcagcttagatatctcaaaaattgcgctctgtacctgatcgtcttctgaatcagagggccgaatccacaccggtgactgcaaccccgtagatgttccattcgcggcccttttcccctttctagacgttgataaagctttctccagatccgattgcctcaagggtcttggtttctgaaccagcaatcaggaggcaagatagtcagaaccaacatgtaatgggcaataatcaatctgatgttgtttcagttattactgtatcattaaagtccaactagaaactgtaaatgaaatttgaccatgaaatccaattaaacagaatcagcggctatgctggcacaagtggattcatgcatgaggtttgccgttcgcaaggtcaactggtgtagacaaacattacccaaaggaagtaataatgaactaattaatggtggtagtaatactaaaaaaaatcagcagtgaacacagtaagcaacaagaaggaatgaatactcacatctgcttttcgcccatctttctcattgttcaacagctccctgatagggtagaatgctgcttgcttgcacagttctagaatgtctgatccagtaaatccctcgcatagaccggcgatgtaatcgtaattaatgttaggctcgacattttctcccttcaatacaaccctaagtatcttgcttctttcactctgaacaggaatcccaatttcaaatatctgagtaaagcgcctgaggatagcctcatctagctcagagggtctgttagtagcagcaaggaccataacacgggcattttctgcaaagccatataaataaatcataagatgttgcacaggagtaaccaggaaacttgtttgctagttacaaaataagttgctccctatgtttgaagagactatgtctggcaccctaaataataagacatgatcaaaacaaattacgacagttgatacatcgatttctatttcttgagagagaagccatgtgacggtccgtgtattgtaaaaaaaaaatcgttttctcatgtccagcttagacataattagttatttcaagaaaaaaacaaaagctaaaaagattggaaaaaggtccaactcaattaatttcgttgaagtttatatgtgttgatttcaccaatttgacattatattcagattgcatggtaactctatacactaacggtctgccactttgggtgcatggttatcacaagcaattgatcagattacaacaatgcccataatagcagggatatgtggtaactggaataattattagtactaacttccagttcgaaattctaaattgtaacaattgtttccccttatgaaccactgccacctgtgcctgcaggcagcgattttcaaactttcttataaaaaatcaccccaattaacaatattgtgcacaatacatcattgtatgtttgtaagataacctatctaacaattaacttacataacttacatatgtttgaactaatgtgcaaggtttaagaagaatattctgtgctgaatgccaacaatgaaatatgaatttgttcagacttcaacgtaacaaagcattaagcatgttgatattctaacataagaaaacttgagcataaaattgaaggttatgagagataaatttatatataggttggaaatgggctcaagtttgatacaacacggaagtaaagctttggacagcactgtttagcaagaatccatatgcgatgcaagaaacccgaactaaatagcatatcgatgtcacaatgcacagtggaatgtcatgcggcatcataagcgagctgcatagtgcacttgtgtgttgcaacatactttttctcttaggtaatggagcacactgaacagtattccagactatacatggtctttttgatatatcttatatctactaatataaaaatcgaatgtagatataagtccgcgttgtggggaatcaggggcatattgagagaacgagtaacatggaattctagaaccaaccctcgtggccgccaacccaaatattcaaagtggcaaaggtatatcattacataataaagagaataggatatttgcatagttactagcaatttggacatggaatatgttcatgtataagtttgaagcagagtgtgtacttacgatcagtggtgaagccatcccagagggacatgaactcagtcttcatattagtcatagcttcgtggtccgttgtccgtcgctggcccaagaaactatcgacctcgtcgataaagataatagccggctgcagcttgtgtgcgagactaaatacagcagacactgcaagatgtttcataaatcagcagcgataacaacaaacaaatgaaaaggagcggcagttaaaccgaaggatttgcgcgcggagctgaccgagcttctgggcgtcgccgaaccacttgctcatgaggttggaaatcctgacattgatgaagacggcgcctgactccttggcgatggccttggcgagcatggtcttgccggtgccgggggggccgtagaggaggacgcccttctgcgggctgaggagcttgccgaaggtgaagagctcggggcggcggagggggaggatgacgagctcgtagagcgcctgcttgacgtggtcgaggccgccgatggaatcgaactcgacgtcgatgtggtcggggttgatgacatcgcaagcaatcacatcctagggtagagtgagattgcataggtgagagaggagaaccctagaatcgaatcgatggattggggattgggggtggaaacaatcgaacctcgtagggggtggtggagacgagggggcggccgaggcgcttggcgatctccttcttgtgctggagggccttctgggaggcggcgcggttggggtcgagctggcggaggccggcgaagaggacgaggcagctgagggcggcgctggcggcgtagagcaccagctcctgcacgaaccgcgacgactccgacgacctcatccaatccaatccaacccaatccaatccaatctgcgggcggcggccggcggcgagggagggaggagggagaggttctccccccacacaccggatggatctgcggccgccggagccggagcgggaggaggggaatcgatgggatgggaaaagaggaaaaggaagaggaagagacgaagggggattagtcggtttatcgggaaggcgtcttggggaaggggtttgtgttgcctttgcctctcctccgatgcttctggtctctcgtctgtttgccgcccctcaaccttcacggaaacgagtcgccttgggccattggattggattacgattacacctgtccttttttttctcgaaggaagatcacacttggtctcttattccgtggtagattaatagttaattaattgtatgtatccttttttttatcagaaatacaacaaaatggtagtactccctccatccacaaaagttacacctatttcacatttgatttttttttcaaataagttgttcctatttgtagtctttatgcattcaagacttaaatgaagagataaattaaatgttttattagaacccaaggagtcatctaaatacttattagttgcatgcttgtattcactccttaattttgtaacattcaaggtgatttaatttctccttagtcttggtgttaaaagtaatatgtgtaacttttgtggatggaaggagtattacaattcaacgagacaacttacatcatattgaatctgatatctatatggtatcatatttggtatcgaatgtattagatcggtatctacgatatcgtgctgacatcaactattccgttacaaaccgttctgaagtctttctcttattttatacttctattttatgaataggacagtcaaaagtttagactcgtagtattatatgcatatataatagtctattcaagtatttttgtacatttactatatattttaggagaatagagtattatgtccttactaatactactctcatgtaacataatagaggtgtgcagagtatattttgtttgtggtcttataaaaatttggcaaggataaaacttgaaaattatgctcccaagttcagattttctacaggaataacatcagttcgagcgattttgaagggagaaaaaaaaatacagtgtcagagatgacactgggccggccgacgacaaagatgcagatgtgctccacgtcggcccaatatggccgtacaaccgaataaacagaggcccatgtccgctcacgccatctccaggacatcccgatgggctgattgggccgtttgatctccaactgcaccggcctagccagcaacggcccattaaacgccaagcataatcagccgtacagcatatgctgcatctgtgtggcgtgtaacattggagaactaggaacataaagctcatgctactgccatagcaataagtagcatgatagagcagcatatacattttctggacaggaacgaaaagaacaacaaaaacagaatcctaagttagttaggactcccttcgtcccattttaagtttatccataattattttccgtgtataactttgaccgtccgtcttatttattttttttaaaaaaaatttagaaaaacataagtcacatataaagtactattcatattttattatctcataacaacaaaaatactaactataatttttttaaaataagatggatgattaaagttgggcacggaaagttgcacttaaaatgtgacgaagggagtagtacaaatttcccatatatatatatatctagctactgcctagctagtagcttattcgatatgcgattattggtctacttaattaattggtccagtacaatgctgatcgaattgaattgaacttttaaccacaaaccgttatggaatcatataatcattcaagctagctatagctagagtacatatgacattactgatcgcgtactgcattcgatactcgcgaagacgaagaagaagaaaagagaggaaatcatcatcttgccaattggtcgatcgagaataaaaacggacagacgcccagacaggccatgcaatgcgacatgcactctccaaaaaagcagttcgatgtcatgtatgtaaggacaaacagctagcagaccaggggaagaaccccatcatttgcgtccatctagctagctaaccctttgattgccagccagccaattaactgcctagctcttgatttcttgagaaaataaacaccatcaattaatattaattgttgctttctgaaaacaggttttgctgctttctgaaaacatgttttgttttgcatgcatgtatgtaatgatcattaattgcaatattaattccacgctctctcttctgaaagaaagaaaaacaagaatgtcacattttcagtaaaggaattcgctatacacgatatatagactgaaagtctctgaaacccaactcctgctgagaactgaagaattaaactactgtttaattaatttatcgcggattttaatagggcgtaggattgcaacctctctgatatagtacacgtctgtgatcgatctatttcagggtctttgcattccttttgagacgaagctagcgcatgcagctgaaacattgctaaactgaaaaggaattgtcaagtcagccagcagagcatatataatgcccgtttttttttcctgaggtactagtatcaagcgatgcatgcgttcgtgatgcggcgaaagcaagaatctggtgccgaatggagtacagattctactccattatgatcatacacagcctcctgcatgcaagaaattcacctgtaaccatccatgcactgagtctgatcgatgcatacatttcaggcaaattaaagtgtggcagcagcagcagcagcacgtagcagcatgcatggcatccagtgcaagggaagaaggagatcgatggacgagtgactcgtgagagcagctggcctagctctgaatgaatatactactggatatatctgcagcatgctgccatgagaggagatagctagctctgaaacgaatatatttttttgcacacatatcagtatatatatatgctcgtgtgtgagcagtgcaaggtatggcagtttggcatcagagcgagcttggcatctgcatcaggggggctgcgtcgcatgcgttgaagtggcaatggcgccgcggccagctcgccggccggccagccggcgcagcagcgcaggcatggggcttcgtcctgcgtcgtggtcacatccatcaacttatcgatcgatcagtctctctgacggaaaaacaaatttgctttgcatttgccattgcgtattcccgtttctctgcatctgcatgcctcgtccgagaagaaagcgatagagattgcgctttactactccatgtgtgtgtcttctctccttttggtccacgaaaccacgaatatatttctggagtacaaaagaaaaaacatgagaaaaattggcagtaagatcatgcaatacccggccaggccaggccatggccatggcgtcctgcccctcctcgtcctgtcttttactgcttcgtcttctttccaaccaggcacaggcccagccggcccccccccccccccccccaaacacacccaaatactcttctctttctctctctctctctctctctctctctctctctctctctctctcaatcatgtccttcatcataaactctgcatttaaacttgtgtctcaactctgaagaaacagtagagggatggatgaaaagctagagaaatggatgaaaagaaaaggctgcactaactttctcaagtgtatagtatgtgagtcatgggtgcatgttccctctctcttgctagctgctgccatggatggacctcatggtgatcttttttcctctgaaacctttttcttggcctgtctgacagggtgggggtcaggcatggggttagagcttgaaaatgtgcactgattacatatagcctttttctctaggattaggaaaggtttatatgtgtagactgtagagtagagatgccttttttgaatcttgaccatcgattgcgtggcggtcagcaatcatccatcccccaaacaaatgaccacaagcttctaagctagctaatcctatggttgatgcaaacaggcgatagtgataacatttctttcttggcttttcttaattacaagtggtatacatactcaagattagtctcaagtaagtgctccattcatggagttttataagacatatatattttaatcgtagaaagtcattctttattgattttcaccaataattcgtcgaattgtaaagtacatttactttataaaaactatgctggtagattcatatttcaaaatactttcacaaatttggctctaaagctattaggagaacattttatgaaaaattaaaaccaaatcttgatgttgaagactttttaaaaataaaatgtttcttatagttaaaaatcaagaaaccaccattgatcatgtgggcaaaggtatatatccatgcatcatatatctcgtgtatgtttgaaagtgatgatggatgatgaactatagatgaaattaagtgtttcacaattattcgagggctcaaacgaacgaatggaagattagaaagccaacaagttatttttttaaaaaaaatctaagaaatattgttaaagaaaaaaattgcaaaaaaaaatcacactgtttaattatttggagctaggaagcatgcacatgataatctagtggtataatcagaaaagaatagggtcatatatagtgttgacaaatctctttaattgtgttattgagggagttctagttcctacaaaatccatatgagaaatccaatttcagacatgcctaattaataattccatcagttgtaaatttcaacacattaggtttgtaaataatggaatagtagacaagagaagagaaagtagaatggaaaatgcatggatggtaggccggcttgggggtgggtaggtgaagatagcaattcttgtgggcagaggtccactctaactgccccaattaaaagaccattgatcccctcctccccaagcagccacagacacagccaccacactagctttggacacctctacctagctccatctgcaaccatatgcatctccaccctctccatttggaaccagaaaaccatggcttctcctgcatgctcactactcatccctacacagaaagctctagctgctgctagtttcattctagtaatgatacaaatatcaagagaaaaagtgagagtcaaatagaggtgtgaggtgaggaagatgctgcaggtagaagaagctgagagaaagatatgatcaagcaagcaagcaagcaagcaaaagttatctagctaaagagggagccttttcattttgaggggaatgttgtctggctcggggctacttttaatttctctctcttttgatatcttcttttctcgatctcctagcttgatcttttgatctctcaaatcgatcttaagaaaaagatcagtcaaagagatgagagtagatgtctgtagatctcggaccaggctctgatgaatcccctaatgatttttatcaaaatcataagttaaggtagatacacatcttgtcatatgatcaaatggtttcgccaaaaatcaataatcagacaacaaaatgtgcgaactcgatattttacacgactctctttaccaattctgccccgaattacacttaaaacgactcaacagcttaacgttggcttgccacgccttacttgactgtaaaactctcactcttaccgaacttggccgtaacctgccaaccaaagcgagaacaaaacataacatcaaacgaatcgaccgattgttaggtaatcgtcacctccacaaagagcgactcgctgtataccgttggcatgctagctttatctgttcgggcaatacgatgcccattgtacttgttgactggtctgatatccgtgagcaaaaacggcttatggtattgcgagcttcagtcgcactacacggtcgttctgttactctttatgagaaagcgttcccgctttcagagcaatgttcaaagaaagctcatgaccaatttctagccgaccttgcgagcattctaccgagtaacaccacaccgctcattgtcagtgatgctggctttaaagtgccatggtataaatccgttgagaagctgggttggtactggttaagtcgagtaagaggaaaagtacaatatgcagacctaggagcggaaaactggaaacctatcagcaacttacatgatatgtcatctagtcactcaaagactttaggctataagaggctgactaaaagcaatccaatctcatgccaaattctattgtataaatctcgctctaaaggccgaaaaaatcagcgctcgacacggactcattgtcaccacccgtcacctaaaatctactcagcgtcggcaaaggagccatggattctagcaactaacttacctgttgaaattcgaacacccaaacaacttgttaatatctattcgaagcgaatgcagattgaagaaaccttccgagacttgaaaagtcctgcctacggactaggcctacgccatagccgaacgagcagctcagagcgttttgatatcatgctgctaatcgccctgatgcttcaactaacatgttggcttgcgggcgttcatgctcagaaacaaggttgggacaagcacttccaggctaacacagtcagaaatcgaaacgtactctcaacagttcgcttaggcatggaagttttgcggcattctggctacacaataacaagggaagacttactcgtggctgcaaccctactagctcaaaatttattcacacatggttacgctttggggaaattatgaggggatctctcaggaccaggcttcattccccccaaacagaagggctcccatgcatatcgatcatgagctagcttattaccccctgcttttgcctcttccaaatctgatgaactgggtaagttaactgaatattgcttaactaatcagctttttgtttcatctgatggatagataggaggagtagatcttggtggcatgaactgcatgagatgcagattggtgtaatgatggggggaaagactgcatgactgtacaattgcacacttatcagagctacttgggatctcttctcttctcttctctctctgcaataattagcctttgatgagatgaagggtgatgaggaaaaggctgtcatcattaaaggcctttgttccatgcagatcctatccttcatggttggaactagctagtctgtattcatcaggtacaaataccttgcttaatctttcttctttcatatgtatgttcatctgatctttacctttgcttgggtatcacaactcttagctagcttgactgatctaaaaaatgcttttttttttatagtttttggtgatctatttttcatcttcgtttttcttcatgttctaccttgcctggtaggataatgaaacatgaagtacatatatcatgctctgtagtacactccgggagaaatatatggatatttacttcctgttaatttgttgcttggagtagatctagagagaaaaaccaactctttgcactgtgcgtggattctttacctttttctccttcaatttttgtctctctccaaataatgttgcattgggacatattaatttgattccagtttaagggaattaataggtagctagcagatttccatttatactttggtcactgaggttaattaattaattgcctataaattgttccgataactgattcacactgttcaagagaaaaggcaagctagattcatattcttcagagtaatgctccggtgcaatctacttgcagtattctactccaagtagaataatcttgaccgtttattttaaagagcaggtaagtaatctcctaatatcgtttaggggtaattttggcatgggatgttttcttctgttcgcatcgtatcaggtctgaactccgttgcacgcagtcacctcgctattcctcccccggcctagccgccttgtccgccccctccgtcgccatccgtattccccgccgtcgccgccttgtccgcttcctcagtcgcatcgtccgtctgggagcggacgagtgtggtggcgtccgagcaagtgacgatcttgagcaggagttctggcggtagtaaaaattccagcctaggcttcggcggcagcgtcacgcacgcacgcaatgtcatttgcttggcagcgtcgtctcggctcattcgtcttcttgccgtttccgatcactgtgttgtttcatggattacatggatcgattaagatcttgcacgaccaactccgacgaggatgacatggtgatcgatctatggatcggaaaacaataataccccttcgcgaattatttttcctagacaaaaacacccctccacatttcacttccactaattctggtaggagtaaaactagatcttaaccctacaattaaatatgatcaagggcctagattactttttactccgagtagaaagcaccagagtaggactctattcttcattcatggtcaaatcatgacaagggtttgagatcagcagagcagatatatctttattaatttttggtggtaactatatataatttcagctaaaccggccaagtagttaattactgtgcctttttttttctcttctgtttactttatgatccagtagctaccataaatgctgtagaaagaatatactgcaaagggcacgtagatttttaccttctaataaatgaaatggaactgcgggaaactattctaaactctcgagtggatgtcttctcgttgtgcatatatacgagatcatgatcttaccaaacaataacaagttcatatataagatgtgcatttctatgacaatatatatactacatattgattttttatattaatttgcaagctacattcatgctgatcatgatgatgagatttaattttgttcattcaattcttagaacactaatcaaaagtaaacatcggacttttgattaatctgaaaacttaaatattatcgatatagctacagtatatgtttgtcagggcactagctagctgattctcgatcagctagctgcaggggagtatatttgacaccagtgcattggtgttggtgtaaaccttgttgttatgtatcaactctgagttgtttcctgtttgaagccttgagctctagcttccccatacagtactacacccattattttttgtgtcgagatgctcatacattgagttatgtagtgcgtgctgcatgtacaaaatggtgtttccagtgatcccaaatccctaaagattctcttgttatgttgtacattgtctttgattgctatagtagctcttaagttttaattactccttttttataattctttcaggatctctcatgttcaaatgttttcagaaaaaggaacctcccttttgcctctctgttggcagttttgctctcctttttttcttcagactgttagctgtactagtgaacatgtatata

SEQ ID NO: 9793 - DNA, 11693 bp, Oryza sativa
ccgaccccctcggggggactaagaggagggcgaacgcatcaccctcgggcccgacgtccctcgggggtaccaggccacgtgtgcgattgtgtctgcctcaaacctctagtcatgatactcctgatcccatgtcaccgacagtagcccccggcgttatgccagggcgatcgccctctttaagggaaacggtcgggcgtgacgccactcctaagacctggtgacaggtgggaccggtctccacaattgggcagaaacccaacggtcacaaaccacgcacatcggcaatggtaactcggctgtcaacaatgagcggtctcttcaagactgccacattacttgagtagcacacgaatctggacatggcgattcgtttcgtctggagatatggtaacgtcgcttcggtcggcgagcgtaattaacgcgcgcacgatatgatctatctcgactgccacaaccgcatatccacctcatgcgccgcaagcgggtgaatgggattagtggaagcgtgggcgcgagaaacgagggggcgaaatagtgggcgcgagaagcgaggagccgggcacagcgttggcaagagtataaaggcactgaggaagggatctgtttccttcctttcgccattattccccttgtcttcgctgcttgcgccctaactccttctttcctgtgccctaccttcgccacacgcgctcgctcttaatcttctcttcctccggcgccatggcacggggttccgctctgctcgatggtagcgtgctgccgccttcccggatcgtgagcgagaggcaggctgggctgccgcgccgcttcatgccggaatctgccaccggccgggagatagtcacgctgggcgagggacgcccggcgccagactacccggggcggtccgtcttctttctcccctttgcaatggcagggctggttccaccattttcttctttcttcatggatgttctggagttctacgatctccagatggcgcacctcacccccaacgcggtgatgacattggccatcttcgcgcatttgtgcgagatgttcattggggtgcgcccatctcttcggctgttccggtggttcttcaccgtgcagtcggtgtcgccgccatcggtagtcggtggctgctacttccagccatgggggccggtgctgaaccgctacatcccctgcgccctccgcaagaagtgggacgactggaagagcgactggttctacactcccctcgccgacgaggcgcgcctccgacttccgagccagcctccggcgcaggcctccagctggcgggcgccggtagatctgggggatggctatgacgccgtcctcgaccgcctggcgggcctgcgatcccaggggctcacaggggccatggtgtacggcgactacctccgtcgtcggattgcgccgctccagcgacgcgctcggggcgcctgggagtacaccgggtccgaagacttcacgaggacccaccagggagtgagatgggactgggctcctgaggacttcaagatattggtccaacgggtgctgaatctcaactccgtagaggcggccctcattccccaaggaatcctccccctctgcagcgatccagaccacgcctccatcctgaccattatgatggcggtcggggcctcagaggagcgagctccaaagggccacgacggcgcaggcgggagccgcaggggggaacaatctaccccgagagggggtcgtgcttctgggtcccgcgacaggggcccggggagcagccgccctgccgacgcccgggggaagaggaagcagggaggaacacctcccccatctcctccccgagggggcggggcggcgcgtgccagcagcaggcgcccggagggggccgcgccaacatcgcagcccgagggggagcgcaagaagaagcggccccgcaagatgggggagacagaaccatctcggggaaacctcatttcccctccaaagtggtcgtttaaccgaccccctcgcaggttcgtctctcacccatcgtggctgtattcattctctcaacgcgagttttcactcacccatcttgttcgtcttctggttttttcttttgtttcagcgagatcccatcgcatccctcccgccattccaagtccggccagtctgaggccgaggatccggcggccgcagaggccctcaggcgggaatctgaccggcgagaggccgcggatcgcctacgggaagccgaggaggccgcccgggctcgccaggccgaggaaactgctcaggaggaggccgcccgggcccgccaggccggggaagccgctcgggaggaagtcggatttctccaggacgaggcgatggcgacttccgaggcagctcacgacgaggccgcgggcgcgtcgcttgggcccactccctcgggcgacgctcaggcgacaacttctggggcagctggcgacgaggctgcgggcgcgtcgcttgggcccactccctcgggcgacgctcaggaccaaccgggtccgggggacatccccgagtccggcacttccattggcggcccgagccgcgtggcatcctctccaaggcggctcttccccacgccttctatcgccccactgaacgcagagcctcttctgcaggccttggccgccgcaaacaccacggtgttggatgggttaagtgcccaggtggaggtcctgcaggcagagcgggcagagctcgacgccgcgtgggcgcgtgtcgaagaggggcgacgctcggtggaggccatggtggaggtgggccgtaaggctcaccgccggtacgtctcggagcttgaaacccgtaagaaggtgctggcggagatcgccaaggaagtggaggaggagcggggggctgccctcattgccaccaccgtgatgaacgaggcgcaggacaccctccgccttcaatacgggagctgggaggcggagctaaggaagaagctcgacgccgcccagggggtgcttgacgctgacgctgcccgagaacagcgggcggcggagaccgaagcggcgtcccggcagcgtgaagaggcccttgaggcacgtgccatggcgctggaagagcgcgcctgcgtcgtggagagggatctggcggaccgcgaggccgctgtcaccatccgggaagcaacgctggcggcgcacgaggctgcctgcgccgaagaagagttcacgctccgcctccgcgaggacgtgctcaccgagcgggagcgagctctcgagggggccgaggccgcggcgcaacagctggcagtcagcctgtccctccgcgaggcagcgcaggaggagcaggcgcgccgcaatctggaaggtgcccgcgccgagagggccgtactgaaccaacgggccgctgagctcgaggcgtgggcgaaggagctggacgcgagggcgcgcagcggcggggcggccacgggcgaaagcgacttagccgcccgcctcgcagctgccgaacgcaccatcgccgatctgcagggcgcgctggactcgtccgccggggaggtcgaagccctccgcttggcaggcgaggtagggcccggcatgctttgggacgccgtctcccgcctagattgcgccggtcggcaagtgggcctctggagagggcggaccgtaaagtacgccgccaaccagggaggcctcgcccagcgcctctcgaagatggccggggctctccaacggctccccgaggagctcgagaagacaattaagtcatcctcgagggacctcgcccaaggagcggtggagctcgtcctggcgagttaccaggccagggaccccaatttctccccatggatggcgctggatgagttccctcctgggaccgaggaccgcgcgcgcgcgcaggtctgggatgccgccgaccatatcgtcgacagcttcgagggctcggcccctcggcttgcgttcgcccccaactccgacgaggagggcaatgccggtggtgcagacgacagtgacgtcgaggccggtgatccgggcgcatcggattgagcccccagacccccgccattcttcagttttttcttcttttctttcttctaaggccttcgggcctcttttttgtatagatcaacttaatctgtaatcaaaaatgaagaaatttttgtgttaatttcatcttgctgtgagtatgagatgaggatgatctgtgccgtggtccttttgtgtcttagcttgaataagggctcgtgcccaagttctagtcctcaaaaggcgcgggtcggggctagtgcctggggagatccacatgtcgagactggccaggccgggaacgtggtgaccgagggttatgggtgacccgattgtgggtttttgccgattcccccccggagttcaccacgcctcggggcacggctcggttctgggctccgttcggcgattttagccgacccgagcccccgagggcaggattgagcacgagtgacctatttcaagtcaagattcttcaaaaggaaaaaacagcacagatacagcctttaggaaattgaaactgcttttattgaaatacagatgtaagagaaaaaagaatatgcatatgttgtagcccccggccaaccctgcacgcccgagggaggtgcggggttggcccgagcccgaaacctgacacccgacccccccctcaggggtagaagcgacgaaggtgttcgatgttccacgggttaggcagctcagtgccgtcgcccgtggccagccgtatggagcccggccgggggacgccgaccactcgatacggaccctcccacattggtgaaagcttgctcaatccagcacgcgtttggacgcggcgtaggacgaggtcgtcgacgcagagtgatcgggcccggacgtggcgctgatggtagcgccgcaggctctgctggtagcgcgcggctcggagggccgcgcgccgccttcgctcttccaagtagtcgaggtcatctctgcaaagctgattttgatcagcctcgcaatacatggtagcccgaggagacctcagggtgagctcggatgggagaaccgcttccgcgccgtagacgaggaagaaaggcgtttccccggttgctcggcttggtgtagttcggtttgcccagagcaccgctggcaactcctcgatccatgaatcgccgtgcttcttgagtatgttgaaggtcttggttttaaggcctttgaggatttccgcattggcgcgctccacttggccattgcttctggggtgggcaggtgaggcgaagcagagcttgatgcccatgtcttcgcagtagtcgccgaagagttcactagtgaattgggtgccattatccgtaataatacggttaggcactccaaaccgggccgtgatgcccttaatgaatttaagtgcggagtgcttatcgatcttgacgaccggataagcctcgggccacttagtgaacttgtcgatcgcgacatacagatactcaaacccgcccggggcccgcctaaacggtcccaggatatcgagtccccagacagcaaatggccacgaaactggtatggtctgcagggcctgggccggctgatggatttgcttggcgtggaattgacacgctctacatcgccggaccaggtcgaccgcgtcattaagagctgtcggccaatagaaaccctggcgaaaagctttaccaaccaaggtgcgcgaggcggagtgggctccgcattcgccttcatggatatcggcaagaagcacaacaccttgttcccgaggaatgcacttcaggaggattccattagccgcgcgccgatagaaggtcccttctaccagcacgtagcgtttggagatgcgatggacgcgttcactcccttcgcggtcctcgggtagagtcttatctgtgaggtatgcttggatctcggcgatccaagcaatcaatctaagggagttgggagcactcccctcgggtcccgaggcctggactccgacgggcctcgggggccggtcaggcgcatccgtctcccctaaggggtcgggtcgcgccgacggctgggcaagcctttcttcaaaggcgcccggtggggtctgggctcgcgaggacgcgagccgtgagagttcgtcggcaatcatgttatcccgtctgggcacatgccgaagctcaatcccgtcaaaatggcgctccatacgccgtacttggcgcacgtaggcgtccatctgcgggtcagagcaccggtactccttacagacttggttaacgaccagctgggagtcgcctaacaccaggaggcggcggatccccagtccagctgccactctgagtccggcaaggagtccctcgtattctgccatattattggtcgctcgaaagtcgaggcggaccaagtatctgaggacgtctccgctcggagaggtcaacgtgacccccgcaccggcgccctgaagagacagggagccgtcgaactgcatcacccagtgggcggtgtgaggcagctgcgaggggtccgtgctggcctcggggatcgagacgggctcgggagccggggtccactctgccacaaaatcggcgagggcctggctcttgatagcgtggcgtggttcaaagtgcaaatcgaactcagaaagttcgattgcccacttcaccacccgtcctgtaccctctcgattacgcaagatttgaccgagggggtaagacgtaactacagtgacccgatgcgcctggaaataatggcgcagtttcctcgaggccatcagaatagcgtaaagcatcttctgggcctgagggtatcgggttttggcgtcccggagggcctcactaacaaagtagacgggccgctgcacctttcggtggggccgatcctcttcgctaggggccgcatccctggggcactcttcgtccaagcagcctcgcggggcgcacttatcttctgtgctgatgacctcggggtcggaggataacaggggtggccttcccacagtggcttcggggccgtcctgggggtcgggggctcctggcgtcgttggacaagcgggcaaagggccaactccggtcgtcaggggccttaggcctccgttcggctcgggggcctcttctccctgctctttcccgggtcgggtcagcacagggttagcctcggggtcgaagggcgataggtgcggccttcccacagtggcctcagggccttcttgggggtcgggggctcctagcaccgtctgacaagcgggcagagggccaactccggtcgtcgggggccttgggccaccgttcggctcgggagcctctcctccctgctctctcccgggccaagtcggcacagggtggggaagcgtgaaatgagaattgttctcatcgcgctccacaaccaatgccgcactaactacttgcggggtcgccgctaagtagagtaacaagggctcgtctggctccggggcgaccagaactgggggagagcttagatacgctttcaactgggtgagggcattttcggcttcctccgtccaggtaaacggtccggagcgtttgagaagcttaaataagggtaacgccttctctcccagccgcgatatgaaccgacttagggcggccatgcaaccggtgacgcattgcacatccctaagtttgctgggggggcgcatccgctctatagcccgtatcttctcagggttggcctcaatgcctcgggcagagaccaagaaccctagaagtttgcccgcaggtacaccgaacacacacttatcggggtttagttttatgcgggcggagcggagactctcaaaagtttccgctagatctgagagtaacatttcctggttgcgcgtctttacaaccaagtcatcgacataagcctcaacattacgtcctaattggttacccaaagaaattcgagtagtacgttgaaaagtaggacctgcattctttaacccgaagggcattgtcgtataacaataggttcctatgggggtaatgaacgcagttttttcctcatcctccctagccatgcgaatctgatggtaaccagagtatgcatctagaaaacacaaaaggtcgcaccccgcagtggagtcgacaatctgatctatgcgaggcagggggtaaggatccttaggacatgccttgttaaggtcggtgtagtcgatgcacatccgaagcttgccgttcgccttgggaacgaccaccgggttcgccagccactccggatggatgacctcacggatgaatccggcctccagaagtcgcgccacctcctcgcggatgaaggcttgacgttccggggcctgccgccgcactttctgccggaccggccttgcgcccggccgcacggcgagacggtgctcaatcacctccctggggaccccgggcatatccgccggtctccatgcgaagacgtcagcgtttgcccgcaggaaggagacgagcgcgtcttcctatttgccgtctagaagaccaccgatccgtgtggtcttggacgggccgtcgcccagggcaacctccttgaccgggacctcgtcgcctgtgatcatccgctgcctcggggtggcgggggcggaggcgccaagcctctcgtcgccaccctcaggctcggatgcagcggcgaggtggtccgcgcgctgctccagacaagcgagcgcgactttgaggtcgccatggacagagatggggccaccggggcccggcatcttcatctgtaggtaggcgtagtgaaccgccgccatgaattcaccaacgcgggcctccccaggaccgcgttgtagggcagactgaggtccgccacatcgaagttcacccgctccgtgcggaagttggcggatccaccgaaagtgaccggtaggtcgatgtgacctaacggccacgtgtgccccggcgtcacaccgataattggctgggacggccggagcaccatccccggggccttgattgcgtcaaaggccgcaggggaaaggatgttgagggccgctcccccatcaatgaggacacgccccaacttcacgttgcaaacggtgggagaaaccaccatcgcaatctgccctccccgggcaacgcacggtggttggtcggtctggtcgaaggtgagggcaacctccgaccaccgcgcccggcgcgtcgcctcatgagtaggggccgcggccagaagctctcgcttcatggccttgaagctccggcgagaaacgtgagcacacgctcccccatcgacggtagcaatggtggccccaggctcttggaaacctaggtcatcattgccgtcatcgatgtccttggcgggggccttctgcttggcctcacttcgccgattaccggaaggaaccaccggggatttgccctctcggcgctcctgcctcctctcctcctcccacttcctcgtccgctcagccaaacttttgactgcacggcagtccgcgaggtcgtgaagggaagtattgtggacggtgcaccacttgccggttgggcgttccctgttgggagcgccggcctcgttctttttgcctcccgcaggcctcccctttcgggtggcccgcgaagcgccctcgacggcgaggacatgaccctcgtcgtcggtatgggctgacctcttcttcctcctcctgtcacgccgccctatctgagcggcggatccgggggcggccgaagctgccacaccggaaccggaggggttccaggtccatgcctcctccttacgagccactcggtccgcgagctgaaaaagctccgcggtagtctggggctctttggaggcgatcttttcgagcatgcggttgtgccgcacaccccccctgagcgcgtaaatcaccgcgtgtgcagggatgcatggtatggtgttgcggacttgacagaaccgctgaatgtacgagcgaagtgactcatcatcccttcgctgtactgcgtgcaagtccgcttcctcacctgggcgcggatatgtgccttagaagttcatggtgaactgttggcacaaatcctcccaagagtggacagacgcgggtggcaagttcattagccaaccccgcgcctgtcctttcagggccatgggaaagaaattcgccatgaccctgtcgtcacccccggcggcctcgatcccggtcgtgtagacctggagaaactcggcggggttgacgctcccgtcatatttttcggcgatggtgggccggaaccttgggggccaacggacattccgaaggctcgccacaaaggctctacagccgacaccaccaaccgggggcacggagggctgatccccgcgtccgtggtgatgcgacactccggacgaggaggcgccctccgttgcgtggggagcacgtcggccattacgccggcgctcgatactgatgcgagcatccggttccccacgcagatcttcccgggtcggaggcgttgacgaaggagtggcggccgaatggcgaacagcggctgccgctcgccgcgccctccgtcttgacgacgcggagccggtggtagcagcaccagaggccttggtggcggaggaccgcccaccagcatctaggcgctgccgtgcagtcatgaccaatttggccacatcgtccagccaacgttgggctggagactccgggtcatgggcgacgggcgggtgacgtaggagcgcgcccgcagcttggagcgcgccctggggcgtgctgccgtcgccgtagacgaggaggcgacgctccccatctcgccgcccttctccacctcctgtggatgtcgaagtcgcggatccttcggccctctcgagcgccttctcccgcctaggactttggcgtggaggtggcggtggagtacgagctcgacggcgtgggtttggctccccgtcgtcaccgctcatactcggggagaggtcgtgcgcctttgctggctcggctattgggctgaacaggaaaagcttggcgcacacgaaagagtgcgagagctcagaaaatccctcgcagggccccctacctggcgcgccagatgacggagcgtggggctcctcaccgggagaccgcgcaggcccccctttgccggtttggctggggactcagggagagattctaagctctctgtatgtggaaggctcgcgagaccggaaacacacaagacacgggcgatgtatacaggttcgggccgctgagaagcgtaataccctactcctgtgttttgggagatctgtgtataaaggagctacaaagtatgagccagcctctcccttgttctgggtttctaatctggaaaagtccagtctcgtccctcatctcagtgggcaaggtcctccttttatatcttaaggggataccacatgcaccatttctctcttttttgtggggacttaccccaccttttcataaacagacggagacttgtatggttgccgtccgaatgaccttctgatgggacggcccatacctacctccacttccgccggaagcaggcgcgacgtggaatcgtggctgtctgctgacgacatgaccggtatcagaccagtcacgtcggtcattcttgtccaccacgtgtcagcttagcaacctacatgctcgcccttcttcacacaacatcttgcctgtaatggttaggatgaagcctggcatatatctgaccaggactaacgtgccatctctgggaggtaacacgctagctccagctggggatgagcgcctagaagccctcgtcctgacgggatggggcgaggcgtgcgtcagatcgcttgtcgccacctaacccgcgatctgaccggtctgtgactggtcacagaccggataaacgagtgcactgcactgcgttacatgcggcgtgacacgctcagccaaaccgcaataaatgtggttaggtg

SEQ ID NO: 9794 - DNA, 31432 bp, Oryza sativa
acctaaccacatttattgcggtttggctgagcgtgtcacgccgcatgtaacgcagtgcagtgcactcgtttatccggtctgtgaccagtcacagaccggtcagatcgcgggttaggtggcgacaggcgatctgacgcacgcctcgccccatcccgtcaggacgagggcttctaggcgctcatccccagctggagctagcgtgttacctcccagagatggcacgttagtcctagtcagatatatgccaggcttcatcctaaccattacaggcaagatgttgtgtgaagaagggcgagcatgtaggttgctaagctgacacgtggtggacaagaatgaccgacgtgactggtctgataccggtcatgtcgtcagcagacagccacgattccacgtcgcgcctgcttccggcggaagtggaggtaggtatgggccgtcccatcagaaggtcattcggacggcaaccatacaagtctccgtctgtttatgaaaaggtggggtaagtccccacaaaaaagagagaaatggtgcatgtggtatccccttaagatataaaaggaggaccttgcccactgagatgagggacgagactggacttttccagattagaaacccagaacaagggagaggctggctcatactttgtagctcctttatacacagatctcccaaaacacaggagtagggtattacgcttctcagcggcccgaacctgtatacatcgcccgtgtcttgtgtgtttccggtctcgcgagccttccacatacagagagcttagaatctctccctgagtccccggccgaaccggcaaaggggggcctgcgcggtctcccggtgaggagccccacgctccgtcaactagattatagaaaatatatgggaaaataaggactgcgccggggctcaggggcagcgccgccggccgcgccgccgcctgccgggaggacgagcggaaaccgcggtgatgcggtgatccgtcgggggctcgggagagatgcggtgcctgcgtcgggggctcgggggccgcgccgccgcctgccgggaggaggagcagaaaccgtggtgatgcgtcgggggcgagatgcgttgcgtcgagccaccgattccgccatacttgatgagacagagaaatcataccattccaaaattacctctaatctatattaacatattactaatctatccgtttaagataaacggccaagattaattctatttgtagtagaatactgcaagtatattgcatcggagtgcctctatcttctattatagttcttttttcaggatggtctgaatgagcaaactgagactaggagtagtgaactttaatttaggacaataagcttgatgaggttgatatactgcaatggcagagcagtacctagagtcattatggcagagtagtaccaagagtcattatgcagcatactgttctgtgtgagtttaagacaaactttggggttttctaccgtagtcagaaaatagaacttgaactttgttgaaatgaactgctgtgtgtttggtgcaacgattattaaaatgaacattgttaacatgatcacgacacctccattcccatgtgcacaactacggtacaacacctaataaaatgttgacgactataaaattatttgcatttctcataaaaattcatatcagtaaacgcgtcatcgatcttattttcttatcattatgcatctaatatattttgctagcattcatttaaatataaagaagtaataatcaaagtgcattcacagcatgtcaatttccaaagaactagagaatagagcaagtaataaggtattgaccaaggccaacttgaataaagcagttattaatatttatatagccttaggtttttcttgtcctattgtatacaatgtggactacatgaatgctctttcccttgtcccttgatccaaaaggtcagtaattcttgcttcaaggacattttatcagatggatcatgaactattttatttataatgtaggtacaagagttgatcaagctgaggaggacgcagaagccgccggtagaaagggtgtgacatagatgcctgtccggatgcgaatattgtcggctcagtagtttgttggctgattggagtttaaggagtactgttgctgggcatatacgagtataattttgtgagcagaaacttatcagctagttgcgttaattgttgctcgaggagggttgatgaatccatctataaagtagaaagtaatatatatatgctgatttatttatgtatcttggcttacctttgcgtccactgtgtactctgaaactgtcgagtttttgggcataggtgtggcaatgattgtttgctttgagttaacacaaaagtcgagtgatccaactctttcggacagtttggcttgaggagtgagatgatgagttcaccacttgcttcttgttgagttgtttggttcgaggaattggatggatttttccattaccacctcattcctcaatgcacaaacccaacgctgagccttcaaggcagcagaatgacaagcagtccaactgtccaactccacggcaacaactcctcagaatcgccatgtatgtgctgttctacaggagaatgatctctttggcttaaatttgtctcaaaagtcttaaaatgcatgtcagcttttaatcggtcaacatataaatgaggttaaactgggtgtttttacttaccggcagcgtacgtgtaacttcgcgtctttacgaaatttggcttattaagggttagaaatttggcatgttaagggttagcatgtctagagtatcgactaatcttaaattgcaaatgaatgattagcatttgtagttggggatttacaaatcagacttgtcaacgcgaaactacgacatatgacgtcctagggtttgtcctagagcgcatagccccttaggcttagctcacggcacaattacaatattcaaatacccaaatcagactcggaatacacaattacaattacaatattcaaatacccaaatgaagtacgtggatgaatttgcagattcccagcagctcatgaggaattttgacatgggagcaaaaccatctagaagtaaactccataagctttctaacatgtattaaaataaaaagtaaattacacccacgatataataacttggcaggtgggtgcgatatggtgcaagaacttgagaattgaatgttcgagtgcaacaacttgacacgtgggtgcgttctagtataagaacttgacaatataatattttggtgcatcaacttagctaagcatatgctaggtgggttttttcccgcaacgtcaatatgtcattacatagcaatcctacggatattaccttataatattgaatttaatttttaagaattatattgcacatgcaatttacatccaattacctttaagaatttttgtttttttctcacctttccaaatctcaaccgaaatataataatttctacatcagtttaattgacttattagttattaggataaaaatataaatatgcttatatacaaatccacgctagcatattaattgtcaaaataagtacttaaaaattaaatatgtataaaaaaaatgctccaaataattaagttaccgtataactttttaatttattgtatgaaaagcgtacatatcttgcaagttgttgcatttatacgatcacttataaagttcttatactaaattgcacctatctaccaagttgttgcactagaatactcatttctcaagttcttgcaccaaattgcacccacctgccaagttgatacaccgtgggtgcaatttactctaaaataaattctgtaaatataaagaaaatgtggatggtgcttcaagaccataagaaaatgtggtcccatatttttgttttttttttgttgattaggattccatgtcagccaaaataactttctatactgctatgtgatctaattttgaatttgtttcgaatttatttcgtacgtacactagcaatcaaacttttataacttttaacagattatattttttttgcgggggaacagagagaatattgaatactttgattgttagttgattggttccatttcactatgtcaatacagatatcattaccaaattgggatatattgatcatataattagaatataggaaaaaaccagataagattgtactatgctctaggagatgagatcaaattaccgcctgcagctgcggataagataaacgaaaagagattgtattcattccccttggtctcttaaccagatcaaagatagatactcctatatgtatactccatgtagtgtgagtatgagtgtatgaccggttctctctcattcagtctgtccacatcaacagagttcctctgataaatcttggcactctaagcaactccctcttgtgatcgttgtctcgatgaaattaaacaaaaaatgccagtacgagagtcctagaattagttgtaacatgacaatgacacacaatttggtgtttatcgtacagactttcagtttataagggattaaataagtacttactaacaatctcaattattcaaggattaatttattcagttaggggataagcacatcacccccattggcatttgacagttagatgtcattttcacaattgcttttgcagccacccaaatctatcaaccttgtacttgtagtttcataattgtttttgttttttagttactctcgaggaaaatgcgagtttattctgcattatcttgtgtgcaagcaagtacaattcaggatggtaaatagggtaaaacagtaagatcaagttgtttcataattgtcttttagttactctcgaggataatgcgtgtttattctgcattatcttgtatgcaattgcaagcaagtacatttcaggattataattagggaaaacagtaagatcaagttgtttcatgttattaattgccgaaataccaagtcttccaagatttctttgttacattatagtagaagttttctgctagattttgttctggtatcctggctaattatcagcgattacttacctccgttattcgatttttattcactataggtactacattcgtacggaggactacattaaaattgtcttgctgaaattgtcttgtttcttgagctgaaccatttttggtagagcctattcacttaaaaaatggtactatgatgaagtcaaatataaatgaatttggtacagcctattcgcttaaaaatggtactataacgaaatcaaatagcgttccaaaattgctcaagtgaaggtttatcaaactacagtgatgataatgtcttgtttgtctcagttcaacgaatttttacatttccctttttctgaatccaaaatatatagaaaggtagcagtattaatgtttttatgtttcaaaagttcaacttaaaagacatatgtaaaaactcatgttttcataatcagagggagtatttgtcaaactagccacacagaagtgcatctgaagcaacttgccccccccccccctcccaaaaaaaatgcttgcttgttggcttaaaaaaacgcaagcaacatttgaatttttcatattgattttaaacaatccaaagcattttttttctttttttcagccttagcttttaaaccactaagaatagaaacacaagttgtaaccccgtaaaatctttggcttctcatatttacgcaattatgagattacttattttgataaagatttatagcatcattcaagtaaatacaaagtgagatttaagaaacataagctgcttgtgatatagctgcacctaattaagaccggttaatgctatgactataaatagggaccaagatgtcctatgaaataaaaaaaatagaaatagcataatccaagcaaacccactttctaaattatgattggccatcatattagcaaaaaaaaagtatttttttaggttaatgcacaaaaacaattcgagattaactcatcgaggagtacttaaaaaaaaggtgctaatgtctgcgccctaagattacttttttgttgtctcatttatttttctacgggttatcatccgaaaccaataaattcgacatagctgatacattttcagatgcaaccaattgttttcctctctgtgtgttttgctcatgttttgtcaaacttgagagaaataagtggctagtaccctgaaaacctaaaggcaggggcaacgaatggtacgtttgcattgcaggcatttcttctccaaggcgtccgtgacattggcgccatccttcattgacttgacgaccgccatgaattcatctcatctcatctgatttcggtggtgtttggattagggacttaattttagtccctgtctttaaacattatttagagtattaaatataatctacttacaaaactaattacataaatgaaagctaattcgggaggcaaattttttaaacctaattaatccataattagagaatgtttactgtagcatcacataggctaatcatggattaattaggctcaatagattcgtctcacgaattagtccaagaatatggatgtgttttattaatagcctacgtttaatatttataattagtatccaaacatttaatgtgatagggagttaaaactcaagttttagtcccacctaaacacggttcatcaggatacaagatatcagcacagtgttgattgagtaggttcatcaggaagcagagtaatagcacgtaacagagttgggtatcctgtatacagcagttgtccccaaggaagcaactctccatcacatcacatcgcggaatctaaaaaagaattcatcaatcctccattttctaaaagaaaaggaaagaattcatcaattctgccctgccgcagctgcgtcctataaataccctacacgcgtagccatcttctgcaatcatcaaaacacctgtaatcatcttctgaattcatcaattcagagttcagagcagagtgtccctgcttctgtgcagaggagagagatcgagctatagagctagcctggctgctgccatggcgaccggacgacgcctctccatgatcctcctcctcctccttctcggcttggcttccggcgacaagattctcttccaggtacgcagccagccacggactgaactgaagttgtgaccgatttcagttcagtttctgaacaagctgttgcgttctcttcaggggttcaactgggagtcgtggaggcagagcggagggtggtacaacctgctgatggggaaggtcgacgacatcgtcgccgccggcgtcacgcacgtctggctgccgccgccgtcgcactccgtctccacgcaaggtcggtttctcctgctgctcctccttgtctgaaactaaactctgaacattttggagttggcgaaatttgggatcctgcaagcgtggagtggacagcacgctaactaagctaccctgattgcgaagtgtggataatgattgtcactttggcctttatttcatttgggttggaatgagatgtttcactgatttagttgaggaatttttggctagataatatcacactgacatgcgtaagggtcaatcaatcttgcaaccccattctaatcttatacagatgcaatacaaaggtaagctgtcagcagttagaaaaaaagattaatgatatataattagtgtaataatgagtactagtaattaagctccttccaggaaaaaaatatgtttttttttcactttccgaagtaactaatatgccactttattatcatgtttttattttctaaaaacaataaaaaaaaactactactgtacttcctgtgggtacgaaaacatatcatttctaaacatttaaactggatgtgcaaaaatcatgtgtaaatttagcatactttatccgttccacttcgggtattcaaaatacatactaactcagggtctatttggcataactctagcttcagaagctccagcttcaggtcaaccttttccgaagctggagctcaaccaaacgattttagctccatagaaattgatgttgattttacaaagttgaagttgattaggacgtgacatacacgggagcgtatcctatgcacacagaccctcgcgtgtacacaccgtgtacaccaactaaaaattatcacaaaaaattttaggaaaattcatacatgtactttcaatagtattacatctacgtgcaaagtcgcatcttcaaattcattctacatagagaataacaaaaaagataaaattctgacaaaattgcaaccttaaaactgtcagattttttgttttttttttgttacggctaaaatataatgaatttgacgttaagattttaaccctaggtgtaatacaattgaaagtatatgtatgatttttttctagattttttggtgacattttttagttggtgtgcacgtgtgtacacgtgagggactgtgtgcataggatatgttgccgacatacacacatgtagtgagtatgcataaggcatgccatatttatatcttggtctctactttatcttacatcattaaaatgtcaatggtgaatttcatatctctgtaaccatttaccattattcatattttcatatctttctctacaatcactatgcctcattctatctttttttattgaataaatgtatgtccaaataacaacttttttgttatatattcatgtagtatcataatcagcgcctagatctacaaacttagccatgtagtatccttttggtcttggtttggttatgcaccaaaatgagcgattttataggttcgtgtactagattgcatccacctgataagtttgcatactgccaatgcaatttactcgttattcaatgtggcgatgtgcgtgaagggtacatgcctgggcggctgtacgacttggatgcgtctaggtacggcacgtcgatggagttgaagtcgttgatcagcgcgctccacggcaagggcattcaggcgatcgctgacgtggtgatcaaccaccgctgcgccgactacaaggacagccgcggcatctactgcatctttgagggcggcacacctgacggccgcctcgactggggcccccacatgatctgccgcgatgatacccagttctccgacggcacaggcaacctcgacaccggcgccgacttcgccgctgcccccgacattgaccacctcaatggtgtcgtccagcgggagctcaccgactggctcctctggctcaagtctgacgaggttggcttcgatgcgtggcggctcgacttcgcaagggggtactcgccggaggtggccaaggtgtacattgaggggacaacgccggtggggttggcggtggcggagctgtgggactcgatggcgtacggcggagacgggaagccggagtacaatcaggacgcacaccggcaggcgttggtggactgggtggacagggtgggtgggacggcgtcggcggggatggtgttcgacttcacgacgaaggggatcatgaacacggcggtggagggggagctgtggcggctgatcgaccagcaggggaaggcaccgggggtgatcgggtggtggccggcaaaggctgtcaccttcgtcgacaaccacgacactggctcgacgcaacagatgtggccattcccctccgacaaggtcatgcagggctacgcctacatcctcacccatcccggcaacccatgcatcgtaagtactcctactactgctacctctgtttttaaatagatgacgtcgttgattttttatcacatatttggccattgtcttatttaaaaaataatgtaattataatttattttgttatgaattgttttatcactcaaagtactttaagcatgatttatatgttatacatttacataaattaattgattatttggttaattgactctcgaataacatgcactattaattgattattgtcatttcagttgactataaatatttttttaagaaacacactttggtaatagctatatttgtgaccctacagacttcagtagtaaaacatatttataattatttgtaattttttccaagtaaggaagtagtcaaagtttaatattgaatacttcatcaattttttgctatttattagccgtctaatacttttttgcccttatttatcagttgtctactaaacttgcataatgcacgtgtgtacatatatatacactcatcagtcatctaaaattgcacaataatgtgcctgtatatatgtacatgtagttctacgaccatttcttcgattgggggttaaaggagcagatcgcggcgctggtggcggtgaggcagcggaacggcgtgacggcgacgagctcgctcaagatcatgctgcacgacgccgacgcctacgtcgccgagatcgacggcaaggtggtgatgaagatcggctcccgctacgacgtctccagcctcatcccgcccggcttccacctcgccgcccacggcaacggctacgccgtctgggagaaaatcgccgccgccgccgccgccgccgatcatcgcacctcttccagcgcatcgctctgattgattagcgatatgatgcttgtgtgccacctcttatgttttacttctgctgtatatggaacaggctcttctacctttaaaggtacgtactttcgtcactgatatgtgggatcgataaaccatgggtctaactgttagtgataaagccatgatgactttgaagatataggatttcaatccctgtatatagataagtacatatgtaatatacatacgcatgattagtgacatatatatacactacattgccttggctgtgatcgaccgtcggtattggctggagatgtaaaccatttatattatcttaagagaaaaatatatacacagttaaccgagcactcctaccatttcataattctttgtgttttgaacaaagttgaggtcaaacttttataactttgattatcaataattttaaatatatttagtttaaaggagctagagatttatctttcaaagtattataagaaaattaaacatgcatttatttattgtatatattataataaaaaaacaaaatcaaatatatattttggagaacatgtcattgtccaaaacgttaagaattatggaaccggagagagtatatatagttgtgtctccaagctaattaaatcctgattactgtaatgtgggatattaaataaaggcactaatctgttcattttaagtgatttggtataataattgtttatagctcgttaagtaaagacagatatggtattatattccattataaaaaaaagcattaatctacacaattcgaactttctacttatggctattatgactaactttattttcatatccaattgagattagataaagagatactccctccatactcataaaggaagtcgtttaggataatgtttaagtcaaaccttgggaatataaatcatgaataactctcaaattattaagtttgaaaatgtaaaaattatatgaatagatttatcttgaaaaatattttcataaaaatatacatatatcatttttcaataaacatttttatagaaacaagaagtcaaagttatgttttagagaccgtgtcgctgttctaaacaacttcttttacgactaatgagggagtagctcattaaagtcacttgaacgtggtggctcgcaccgacacaaaccccggccgacatgaacacgcttcaccgtggcggcacgatggtgcatggtcatgcatcgctcgatgcttgccggccatgtctgttccaaattccaatggtgttgacgcacacgagcaaggatacggaggattgagggacgccagctggaacgtacatgtgtacgtcaaatgatcaagggatgaaatagatttgaaaaatagaaggtcctcatcagttggtctactattattataagtcataacggcttgttagcgattaaaaaaataatatatgagtaaaatttttgtatatatgttcttagtgattgaaaagctaaaattgaaaaaaaaactatgttgaaaagaatcaaattcaaattaaaatcaagttttaaattttaaatttggctttggcttataagccatgggcaaacgatgaggcacgaagcttgttgagcaaatagctatacaaatacatgatgaggattgggtcagctaaaatttgctcacaaatatatatctcgattgggtaaaaccttacgcccatgtgactattgttcagcctaacagttcacacttttggtcaggcttgatgaaatataacatagcaatttttcaactcttctccatttcaaccacacaatggtacatattgttggcaacttttttggcaagtagacaaacataatcgcaacacctaaacgctttgcggtgattgtagagtcacaaatcaccctaatcactaccatatttcacatgacaacaaatgatccattatcattacaataaatttacgtcacgaaacatgagcatatctattcacccaacaaataacataccaactctacaaaactattttccgcatcactagcaaaccatatttcagctatttcacaaatcttcgtatctcaacaaacatcaaattttcacagtgtatttgacctaaacccgataatttttttattttttcaatttctaaactatttttggttttgtcctcaaatttgaatttatcttaccctatttttaaaaaaaaatcttcatcatctgccactacaaatcaagaactacatccatgattttttttctttttttattttttttggaatttttaatttgctcaaatttcatccaaaccataccacggtaaaccgttaccgtgtcccagcataagcgttattaggtaaaccctggcactgttagagggtaaaacgccgaaggttggctagggtggtgacacgtggcgtgctgtgggtgtggcagaaaagatgagcacaaggaggcgatgtggcatttcggatattcaaaatacataccttagataatttgtttgataaaaagaattacgcgtttccacatactgtattgttgagcatttttaatttagaaaatatatcctatacacacaagttccccgtgcacaccaactaacaaatgtcacaaaaaattttagaaaaaaatggacacttactcctaatagtattacacatatatgcgaagtcttatattgaaattcattatattatagcggtaacaaagatgtgaaaaatctaacagttttaagggtaaaattctgtcttttttgttacgtctaaaatataatgaatttgaagataaaattttatacataggtataatactattgaaagtatgtgtttaattttttctagaattttttttaatatttgatatttacgaagtgtgcatgaaagctcgtgtgcacaagatatgttccattttaaatttacaggattgataattaactttgttgatgtaaaattagttaattaatgtggccagacacgtcgaggggcacggcggcggagttgaagtcaccgatcggcgcgctccacggcaagggcgtgcagacgatcgccaacgtgtcgctgatcttcgaggcggcacggccggcggccacctctgctgggccccccacataatctttgtaatcacatcaacgtgaagagcacaaaatctcacacaaatgtcaccattaacatgtacttccaccgtttcataatgtaagtcattctaacatttcctatgttcatattaatgttaataaatctagacatatatatcattctagattcattaatatcaatatgaatgtgagaaatgctagaatgacttacattgtaaaacggagggagtactcgcgattcgcgaatgcaccaggtgctgtagggtagtaggcatgctcagcacttgtgacagaggtctgagaaatcatacaacagaaggtccatcatattcctatactgctaattgttcaagctggtggctcgcaatggtgacatgatattattctcagaagtcgcaagtatgacctcaagcaggtgatattgtgtgttacatcatacctcctatacattgctggatggaacccagtaaaatgaactcattgcaatagcgggagaaggctaggggggaaacatgatatgaagtgaaggcaccaaacagctagcggaatagagtgcaacttggcctccatataactgcctacagagcctatctatgtgctagccaggtgtttcaggaagtagtggattagacactcccccgtttgtctactcttcttcaggattaaaaaagaaccagatctaggttttactttggacgtttgcggtaaggatacatgatatcatccatggtgtctttaatgtaggccccaactttatttaagttccttgctacaccattagccacaagtccagcattcctctgaaatctgcaggttcatcgggaaatccgtcattcattaaattttgatgccgatcttaagggatctaaacataatctaaaacagaagaggaactcacttggttaagaaatcatctcctctctgtgcaggcttatatcgccgtggttggggagctgcagtgttatcaagataagttaagtcttcaagaatagaaatgaaatgtagatactttggacagttactcataacaaactcaaagagattcatattaatgcaatttccgaagtgaccagattgtttcaccaataaagtcaggaccagtctgagatccagtaactccgattaatgagaaattggtcatacaagtagtggccaggaaacatttctacacaaccgtgataaaagtacagtgtgctaccatgtgtgcaggttggtcacaaagggtcaacaagtaagggcaaaattggtctatcatgataacatttggcggtttcaattttacacaggctcaccaaaaataatagggataatcaaggaggcaacattcgcactcgaccattgttgtgcactaacaatcctcattcaaagttttttctggagggaacaggcaggagctctgccatttcattgataggagggaaacatcagttacaacgctaaaaaaaaaggcatactgtgtagaattcaggtatatgtataataggtccaatatctaaaccaactagatgtgacaacaggcaaggctcatcaggtagaacacaatagccactacacagacaatcaactttgctagactaaatgtgtcagtgattagcatactgtggtagaattggtgttgctgttctacgtgctagtcaagcaataaaaataaaatatattcctaccttcctttttatggtgagatgaagcctgattagtcgaagtttttctatcagccaatagctgcatgggcatttgcagtgcaaaaagatcaggaaaaaacacaaaagatatatatttcaaatggaataggcgaatagcatgggtagcatctgtttgtactgtcgttcataaaaaagaaagaagaagtctattttgtaagcagaatatgaggaagcaagctaccacgaagtctaaccatttgtacatactacagagctaagttagcacactgatacttttcacagcatgtctgaatcatcacaataattctttatggtaggagaactgtttcataactgcttactctgcacattatgtcatactaacatgctccaacatgtgaactgacaataatgtgtgcataggttcagagcaataacatggttaagtgggaaatacctcgattccaacacaaataggcagttgcgggtgcttgtcacctttcccttcagaactcttcttgtcatccagatacatggaatagccgatacatccatatctgaagtcggaaaggttgcgaccttcctggatagcttccatctcaatttctccaaccatgtgatcagggactgatgcagaaacatagaacagtcagccaatgccaaccattgcgaccgaagaaaacaattcagattgagcatttaaacaatccataaaaattaggccaacagttaagtactccattaaatgacagcaaattcagagtaaatgacaacaaaacatttcaaaccaagcaaggagttacggcgcagtgcgatggcatgtaacactgtccagatctgcagttctgctgctattaggcattagcagtggcagtggcatgctaactagcaacaagtcaggatgaatacaaatatcgatcgtgcgttgtggtgtgtggtaaggatcatggttacttccaaaagttacagttgctactatgaccgcgccaatccagcagttgcgattgaacatctacgttccccattgttcctgcgtgcgtgcgtgcgtgtttgcagggtcactggaataaggtgccagaaaaagctccggcgctcggctcagaggcagccgcggctgaatcagcagcagaagaagaaaccctagaactcgtgagaccctaaagctagcgcgcagtagcatagcatatgctcacaaatgaagggaggggcactaccttgggggatggcgcgggtgatgccggcgcagacgggaccgcggtctcgcgacctgagcgacgacgagtagaagaggtagcccttgcaggacttccccttcaccgccccgcccccgccccctgccgccaccggcggcggcggcggcgcgtctgcaccccgcgcctcgccggctcctcctccgccgccgccggcgacgcgctccatgccgggctggcgggcggcgagctggagggatacgcgtgtgcgggatcgggcaccggcggcggcggcgtgaggcggcggagttgggaggagtggagcggggggcttcacctctttggctactccaacttccgtttatttaccatttcagcctcccaaggaaacataatggatgagatgagcccgtgtttgtgttgtgatttgtgaagcattcccttttcttttctttttttttgacaatcgtgctttatttaatttaagttgcaattgtgattttgtccctttttttagcgtttgtgattttacttttagtttttttaaaatgaagctttagtttgcccctgctttagatggcgttaggtgggtccagattttgtaagataataaaatggataaggtaaagaaaaaaatgtttacaaaatatagaaagaccattgtacccctgtaaaaaacacttaccagttaccaccacctaagccatccaacccattctcctctcccattccaaacaggtggatgcaggcgacggagacagaggtggcagcaccggagcaactcacgagcaggctgcgacggtggcagcgctcgccggcgtgagcagcggctgctcggtagagagcaggtggtggctcagcgacgctgtagcaggggaaggggtggcttagcttggctcagcaacgctgtagcttgctgcgaacatcgttcagagtaggagcagcaacaaggacacacgacaagcaagctcatccacgaggccaatgcaagggatgctgcctcctgattttctttttttttccccatctcatagttgagagtatatatttgggagaattttgtttggtaaatattttttttcctgtgaatgcgatgaatccttggtgaattttttgcgccctgtgcaacttctgtaaaagtgatatccaaactctatcaaaatttgtcaagtttggtcaaatttgagagaaaatgtgaagggtatatatgtcttcttgcagctcatttgacactgttagttggtcttaacagagtaagggcaaattgaaacttcgtttgaaaaaagtaagggcaaaatcacaaaccctaaaaagaaggggtaaaatcacaattacaatccaaaataggggtaagaatgtaattgtccctttctttttccccttcctttttacagtttgaaatttcatattgttttgtatttgaagtaaggatgtgtaatctaaaaacggcaaatatacaaagacagtgtatgaaaaagagcactagattagaaatgtgcatcaaatcgtacagtagctctctccttttcagcttattcactgaatcatttattccacgctctagaaaatattgtttttcaaaaaatctatcgcattgattaaattttagatttttgttttaagctatttagtattttgtattaaaataattaatttatttcgataattataagtagataatccgtgaactatgttcaaccattcatttgctgacaattggcttcggccttgcttatgtttatatttaccaatcaaaatatgaatttttaattttaaatttaaagttgattttaaggttttttatcgaagtttatatttcagcctttgtttttaaatcgttaagaacacgtatataaaagtttattcacattttttttggcaaatattccgttttgcttatgcttaaaatcaaccaaacgatggcttccaacgatacatgggcactgaatgatttaattcagctgacagaaaccatctctttgcatatcatagtaccagacaagacaaacgatgaggttaattggatggaaaggaaagcacgcccattatttcatcactgggatcgaattaaacaggcagtacagctggtatatctgaattcttgtttcaacaaataaatatcatatgtacaaaacgtaagattgcaggatacaattagttcctgtacaatgagttgtatctacagaatgaatacaaggtagtgatgcttatccatgctgagcgctgcggctgcattccatggccagaaccaagcactgtcaatgagttaacaaagaattagtctcagagtcacaaaaaaaaatgcagttttcgatcaggcaaaaacgactaaatacctttctagagtcccatttggagtagcagcactgtctaaccattaatgcagatgcggctggatatgcatcaccatcagctgttagcactgagattgaaatttttgtcccgtttcactgttggtcagtgactcagtgttacagattttgcatactatgtgcagcaaggacaaatacatacctcatgattgaaagagggtaacagttgcaatatatccatttttcatgacctgttaatcagtgaaggcagaacaaacggtttcacttctgagtaatgacaatacagtttgcacagggaaaactctattcttatttgattaattaaaaaccacctcaaaagcaatattctgatatccatagacaaaagttgacccaaatggattattcatggagccttgcgtctggattgctgctcgaccacaatcaccaaggatctcctaatataacaaccaaaatagatggttttgttaacacaaggcaagggaaaaggttaaagagacatccatacttggtcaaaaaaaaaaaagaaccataacaaaaaaacagcattgtaactcaaagcatagatacatttacagcagtcataaacagaaacgacattcctaacataagaactttggccattatgtttatctggaagaataaattggcattcactattcaaaaataaagggatctctcataaaataacctaggaagttaaggagatataaaacagaattgcaacagaagatgaacacaatgttgtgaacttgtgattaaataaatcctagttcaaagcaaagctgagcttgagaacctatctattaaatcaagacaagacaattagtatcttggcagtgcaaaagtcatgtcaaccaccataccttgacttgttcccactttgtgcgaggcgttatgcaactcttagggatactaccaggctgatctgtcccttcagctgatcaagacatatagttaataggatgtagttggtttcttcacaacaaactaattctacagcaagtagttcagaccttcggcatcatagataacaaagttacacttcatataggaattgaaatctgaatgaccagggaagtttgtgtgtaaaacaaacttctttatcctgtgtgtctgcaaggagaaaataaatgtagagcaaggttagcaagcattttgagtctctgaaaaaaacatgccctttgaactgcagacatccttagtgtaagaatataaatacctgcccatcaaataagatatcaataccacgagagaagtagttgtaaaaataatccccacaaagagttgtccgagggcgggggtctgatgctgaatgtattaccatctggtcaacctgacagatgggagagcaaaatatggtttgcagatgagagcgagtagattgaattaaggagcacactcctttatattgaacacaaggtgccacatcatgtttttacaatatcagaaaacagtatgcaatagtttggaaaagagttcttttgacatgcttcagtgaagcagtgagttgttgtctaatttcaacacattgtcgtctcctaacaaagtaacagtcctatgctatcccagcacccaaaagatatgccatgtgaaaatgggatgccctgagatcttgtaagggcatacatactcattgcctgtgtgcccatgattatgcatgcatggcatgtcatagcatattaaaacagagaagatctgtgtgttctatagcatggtcagatgttaacaggagctaagtacacgataaatgtggaagttcaaatacatgaaagattttactacaataccatacttcatgttcaacaaactcaatttagagcatattatttgtgtgaaatagatattgaaatatttacatgctacaaaacatctacgggaatccatattgcaatggtttcactaatagattaaaaaccgacctgcttctggtggatgccacatggacgacccaactcagtccacacgtcctgccagagatgccaaatcaagaaataaataagaccatcgcatcaaagtggtgagaaggggaaagcagagagagatagagagagtagacggcataatttgctacctgcggtgatgcaccgaaaggaatatgttgcccgcctatcgtgaacaaaagctcttcaccaagctggaaacatgataatatcctttttagggatgccaaaagattatatggagatacattttccaaaaaaaaatataattcctttttgttccatatgtgcatttgcttaaagaaaaggttcctgggtaagagatgagggttgtgaagtatatatatctccttggtttctatacaactactaaggctgaaaatattatcgatataatatggtgatatacctttgcatgcacttcctccatgtacaggctgcctgcaggtaatgcaggaacaactgctttatccatcagtgatccaaccccaaccttgctatccgttgaactgtcatatatagaaacccggcaagtaacaggagttgttccgtcaggaaattccagaggcaaatctgccactgccataacaattagggagctgagctgagattctgagaaaatataagtatataggacaactgaatattgatgcttgaataattaaatgtggcaacttggcagcagtgtaccttccccattggtaaacaaatttgtatattgactggggatagggaatgcaaaggataacccctacaagaaaatgtgagtaagatggataccctactgatcatgagaagaaaaggcaggaaaaaaatgtaaaagaataacacaaggcaggctacttgtcatgacgtactggatagaagagggtgtaaatgcccctctctttgtcatatatacccgggaaagtaggtccgaataatccataaacagccacaaaagtggctaatgttgatgggccactgaaagagaaaaggagaaaataaaattatcaataacatagcacagagagttgggttaaatggccaaggtgattcagtgaaacgagtaaacatgccaaatattggctcaacgaataacaagctcctcacccaattaaggactttgcatatcgcagttgcagtcttttcacgtcatagatctcaatgagacgaagcctctgtaaggggagaaattatctttatcacttgcttaagtacgctgaatatgtttcaccaaccacacaagttcaggaatagcaattctttttggcgctaaaactagattattttttttcctagagtaatgactttcatgctctctaggatctgcattacactttacaattaatcagaatacatatatcgctccaagttcaattcgatcacataagaggtgcactacagtactctatattcacaaaaacatttttcgtattaacatgttaggcacaaattagccgaatgatgcctgagatgtaaccggactaccaggaaatcaaagcacatgtttcatgtttgtaccatacaaacttacctgtgaccaaggatcgaagcgcaggtggaacccatggtcaggaaagcttatgacaaaatccaactttagaggctcctgaagccacagaaacgacagcaaacaatcagttgagctttactggcggcgcatttggtagcaaacagagccacacgctatcacgaacctcatcgaagtacttcacgtggacaacgtcgtagagtgttggctggccctctatctgcgcgaacgcatcggaaatcggcatccctgcagcagcagcagcaatcgcgacctcccacgtaagaattcaccagccacagaatggaagcccggcgattgcttccaacacaagcatatacatatccgtggcaaagcgagaggaaacaagcaagcaaccgacgacgacggcgatcccaaccgtggcggaaggtgggtggttagggttgggggggaggaggagctcaccgagggtgaagggcccgacgccgttgccggggcggaggtcgagcgtgatggcccccatggccgtgccctcgcagcgccgcctcaccggcaccgtcgccggcgacggcggcccgacggcccccgcgccgccgccccccaccatcgccggcgatctgtgcgcctgcatcgctgggcccacctcctcctcctcgccgcgaacggattacggattattccttgcgctctctcctcccctctcctctcgattcgattcgattcggttcgcgtgggcttgcgtctactcctccctcttcttctccccctctccgtcgactgctttgcttcgctttggtttaacgagaaactaacggggcttgggtcagactgacaggtggggtccgagtagtggtgggacccggtcctcagtgagagtgggttacactgacaggtggggtcggaaagagtggtgggacccagtcgtcagtgagggagttttgccgtcgcttcggtttcgtgaagaggaagaggagcgtcgccgcccgccacgaaggttaagtaggtagacggtggagatcgcttgtgccgccgcgtgcgctgcatcggggcaaccgttggatccgtgccttccaagactcggaatcgcaacagttggattcaggacgaaccgtttagggatagagaaaaattcacaaggatttcatacgaatacaaacatttgcgccatttttaacggataataaaaaggcaacggcccagagttgtgacgccacgctgacaaccaaatgcaagtaggttggatggatcaatcgaacgtaacacattaagcagtttatgcttgactgaaagataaatgatgcataggcatagcgatgtgtatgtaacaacaatgcactagctgatggaaaaacgaaacaaaagggtgacagaccagtggcttcgttcttattgatcatacaacatgtcgattgcacgttatcaactggaaaaagggaaattaagttgtttgcaccctggaggtgctaagttctgctcctagatgcagcagggctcctgttcatcagtcttcttttccatagttgtagataatctcgatctgcaggagtcatataatcaccttataaactgattgcgacactttgatgcacgaaacacaaaatcaaaggaaaacaatgtgacagcagcaaaaccggaacaagtatggcagcaagtaaatccttattcataaagctaaaatgcatcgcaaactgcacagaatttgcttcttttcacatatgtttatccataaaactaaaatttgcatactattcacatatgcttgtcaagttttgactgaagcatacatgccatataagtaatttggatacaactggaacaaaatactctctggtagtaccaaaagaataaaaattgagctagtaaagtggatggtgactaagagaatgcagcaccaaaaccagaacaggcaacttaactaaccatacagtttgtggcagttacctctttattaatcagtttatagtcacacatctaaaagcataaaataagatttagaacaaagagttatgtgtttcgacaaacagagatgtactccaatgtggactaatgtttgaattaaggtgatctaaatctgctgagtaattttgttaaacatttagatacaaatctccaagaaaaccattataaatgacaagcactacatcaatttctactaaggacaagcaaatattggacgaggaaaaggagtcaggcatgataagataaaaaattatgaatttatgttcttacccctttaggtggaggagggtttcttgtgaatttactgccaccaggagcccatgggactgcagagattcgaacaagcatataagaaccccaccttattgatcacatcatcaagggcatcataatatgcctaaaacatactactaactcctaagggaagtttgaatatctctagtacaaggcagtagtgtttacagcaacggtgaatacaaagtcagtctgatttgtgagattcacatatcagctcattgcaccagtagtccagtacattgacttgaaactagcaatacatctcagaaacagctgcagccttttagtcccaactcccaagcaagttggggtaatcttaaacaatataggtagaaataactatgagctgaatggtgatttggcattgccatttgaaagataataatctgtaaggcagttactttatagaagcaaatctgtatggcaccgcatacttatcagcagggatgttcatatatggttccagtgaaaccgtgtaatcacatcagtggcaacgctaatcactagctacttttgcttaagtttgttttggaaggtttcttacaaatcatagttgaacacccctacttatcttgtacccattttaagagttctgaagccttgaaagtaaaaaattaaacgccaaaccaaacagaaatgctaccatcctacatgacttaacaagagaaattcggcttgaaagagaggtttcggcagtgaaagcaaaattctccagcatttcagagcttaccaatgtagggatcgggatgctggaaattcctgtactgcgcttccgcatcatcgataagcctatcgatcacatccgggttgtcctgcaattcccctcacaaaatcaaacacacaaaaaaccattcgtaaactacaactcgcgagttcatttcgcgacacaacacaacaagcggaggcggagatgcgggaagcggaaacggaggcgttaccacatctctgttcgcctcgaacttctccctgagatccgacgcctgcgagggaggggggaggaacacgaggtcagatccgcgagcacggggggagcagatcggaaaggggggagaggagaggagagctcacgtcctggtagaagaggtggcggtggacggcccagttgagggtgtccttgagggcgcggcggtagagcagccgcaccctctccttctgcgccgcccgccgcgccaggaaccccgccgacgtcgccatcgccgccgccgccgccgccgcttgcttcctcttctctctcctctccgatggtgtggtgggattcggatgcggaggagaggagacccaactgacaggtggcccaagcggaggagggtggatactggctagcaaggccttgatgggctaggccttttgtatagtagtgggctgggctttagcacacagggtattattgtagttgggccaatttttgatggatttgggcttctactaatctggtaaggacctcattgtaaaccacttgtattttcctttatttttttatcttttcttacatttgtgggtatcctagcgaaatccgtaaatatttttctgctccctccatttcatattacaagtcactttgatttttttcctatttaaatatgtttatgtttgaccaagtttatgaaaaaaaatattgtaacagttctaatacaaaacaaacatgttctcaacatatattcaatgaaacattctaaaaaaaacatatattcaatgtaccacaagctgatccttggtattgcctggcctctattcaaaataaacaaattctccaatgacattgagctactaatactaagcaatttcttcagacagaaattctcaagaaaaagaggagaaaagaactcatatgagagtaaagctgtgttcgctatgggttgttcccaacttggaacagtagcatggaaaacggagcgatccattagcgcgtgattaattaagtattagctatttttttcaaaaatggattaatttgatttttttaagcaacttttgtatagaaaccactggtggagaaaccctttgtagtcccggttcgtaacccccctttagtcccggtttccaaaccgggagtaccaatccgggactaaagatcgctatctttagtcccgggtgaaataaccgggagtaaagatcgatctttagtcccggttggtgttaccaaccgggactaaagctagagctgaccttttttttttgcatgcccctgttgctgcatggtttatatatatatatatatatatatatatataaaccatgcatatatatgtttcaatacatatatatgcatacatatatatatatatatatacatatatatgttatgcaaatgcatatgtatatagatatatatatgaacaaaatatatttacattatagaaaatgtgtacacatgcatatagaaacatatgtagtcatgtattaattacaatccattatatgtcctagctagctacggtttcgacgtagtagtactcgctgctagctcagaagctaaggaccagtgaattgtgtttccgtcgtagtagaattcacccttgggatcaaggatttcttcgttgatgaatcccatgagttgttcttgaaccgccgcgataaattccaggttatccctcatgcgaataaactatatgaatgtatgaaattgattagtaattaaacaagaaatcgctacgtaatgaaattttgaatttatttgtacgtacatcgagctctcttgtggtgatgatttggtctgcaaggcagtggcaatactcgcacacgtaatagccgcacaagttagttccctgcttttgctttgcgcactacaaataaatgacaaacaacgagagatctaattaatatacacttgtatgtatttgaatcggagaaatataaatgtagagcatgtgtactcacaggaaatttgaacttccgcctaagtctttctctccctttgccgcggaccaaatgatggaaccgataccaagccctacatggagtttaaagctatgattcgtagtagcaattaacataacaagattttcttaattaacaaaggaacttatgacggtacctgtctataagttcgaaaaccttgtcaaacgtagactcttttttatccattgagtcatatacgttgacggtgcaggcctccaggtcgatgagtaaaagcacccagtggaatctgcaatgtgcgtgggatgcattacatatgaaacacttagcaagttcgtacgggaatgaaatttggtatgtaggaagacagtaaaattaaactaactctgtgttgtatggcaacagtatgaacgtcttgtaatgctgcgccttcaggagatggacgagattgtcctctgtttcttgtggatattggtcgagcattgcgacgtttactttccgagggtcgatgaatccagtatcgaaaaccctccgccgtcgggccctttgaatctccattctacaacgataaaagggagtatattattttctatggtctacttatatacaaggacctaattaattaaaggagacgtatagtaagaaatctaactgaacgatatacttacaaaatccagcaactcataatagagacgtcgagggcgtccagctggtatagttcgtagattcccctgaaattgatccagagaatgtcatctccttgcaagaagtccgtgtccctgatcctcgctccgatcatctctctaccggtggcgctcatctccatgtacagctgatggaacttgtacatttgtgtgggtagggactgcagcagctcaggcttgacaagcggtttaccgagttcgtacatgtatttcacttccgccttttcgattggtgcgactcctagcaattgatccgtagttagaccggtgtcagtaataaattgttctatcgtcatttctttaccggtcaccaacggctcgatctcctggtttggttgctctccaagctgagggactggtttggactttccagaagatgctttcttcagcgttcgctcatagtccgatagcttgatggcctccttgacagatgcagacatacccctgaagaagttcctgacactggggtctataggaatcttcttttctggacttcgaggcttgaattgtctcttgacttctgatgcaacgtaagcgtcaagctcctcttgcgtgcaatcgtaccccgggtccttgtttttggcggcgtcaactttcgccttctttgttgcccttgtgtgggcaagcggtggagctgggggggcccttgactttgaaggtgccggaagaggagcttgcgggggagtaggtgtaggagcacgaggaggagtcggtgcaggatcctgaggagtcgatgctggagcctgaggtggagacggtgctggcggagcatgaggaggagacggtgcaggatcctgaggagatggcggagccggaggagatggtgcacgagacgccgcttgtcgcccagggaggatgatgtaccgcctgcgccatagaataatggcatggcatgtgtctcgtagatgcgtctcaccgtctcctccagggtaatccagctcgaggtcctcgtacgcgtcttcgaccaactcaacttcgaccttagagtatcctgctggaatcggcctgcagtggtaagtacctgaagggtccgttgggatggccatgcccgacgccaccttcatgttgtgagagattatttattagtaatcaacatatataagcagcaactagcggaatggctaaatcttacctttattgataagttcttcaaaggaatatgcagctcacatggtgtccgctgagtgatgtcatcaacgggacaggtcgattcgtcctgtgtttgcatggcgtccatgctctgtgatcctacctgccccgttgaggcgcagctgctacggtttcctgacgggctcaccattgcaggaggaatggtcggctggggatcatgggaccgatgtgcggccatgcgttcatcaaccttccttgccacctcctcttgcatgttgagttcgtagctcgatacccggaactctaggtctgcaatcttcgcctcggtatctctcttgctcctcatccgactcctgtacgtgtggatgtcctccttgaaaccaatcttccaaggaatcacccctttccctcgagttcgtcctggatgctctggagtctgcagggcgagtgtcagctcgtccctatctctgtctggtcggaacgtgccctgagaggaggcttccactgcatctgttagtcgtcgcgcagcctcttgtatctgatagccgaagaccagtgagccatcagctgggttgagcgttccaccgtgagcatagtaccagaacttcgatcgttccggccaattggctgttgccggttcgatacccctctcaatcaagctagcctccatctgctcccacttcggcatcgcgacgctatagcctcctgaccccaagtggtgatggtacttcttcttggcggcattttctttgtttctttccatcatcgccttcccttgttcacctgtcttatatgcaacgaactcgtcccagtgatcccttagctttgggaatgtgtcgaagttcggtgtctgccccttcagtatatacttctggtacagatctcccttgaagctctgaaactgttctgccattttcttcagagtccaccttttcactttgtcctctgtacccgcaggaagggtgaatgtctcaagcattgtggtccacagcatctctttctccgaatctgggacaaagctctcatgatctccgcgtgcccttgttcttcgccagtacaccgtactgacaggcacgttatcccgcacaacccaaccgctgtgacgtacatagttcttggcggcttcggccggggcactaggacgtccatcttcttccacttctgttatgatgtgccgaccctcaagcttcttcgctgcacctcgttgcccgcgtgccctcttctgtccaacggagggttgactaccactagcctcctcctcctggttcccctccacatccctttccacgtgcccctgctggttcccctccgcatccctctccacgttcccttcctcgttcaagtactggtttggatcctcgttcccctcttcttcattccagtactggctgcttccctccacgattgtatcgtacaatatctgttcctcatcgcggtcagccatctgttgatacaagaaacatctgctaagtcacgagacatttatgttttaacaatctaagtcatgtatgctaagtgtaaatgtcgtacattagaaccctacacaaccttacgtgctaagtctaattacaaatcgtgatataagctaagtctaggtgacgtatattatacaaccctagctagtaaataattatatactaagtctaattacaaataaaataatcttatattaaaactcaaataatattacatgctaatactaaaatagtcatgtatatgctaagtgtttcgtgcgtatatgctaagtctaattaagactacaatagtcaattgctacttgtcgcaccaattccgtagtcaataattacataccaagtctaattacaaataaagtaatattatattaaaactcaaataatattacatgctaagactaaaatagtaatgtatgctaagtgtttcgtgcgtatatgctaagtctaattaagactacaatagtcaattcctaggagtcgcaccaattccgtagtcaataatgtcatactaagtctaatttgcaataaaataatcttatattaaaactcaaataatattagaacactacacaatcttatatgataagtctaattacaggtctaataatcttaattaattgcattacaaatataacaatcatttatattattacgtcacttgcctgctccaattccttctagggctagctcttccactcaggcttgacagacgactccgacaacacgtcttttctgcaagataaaaaaaatgtattaggataaatgcgaagtaacatatatatatatatatatatatatatatatatatatatatatatatatattgcatttcacgttaacgttcgtcctcgttcgttcgctcgttcacgttccctagctcgttcacgttcgttcga

SEQ ID NO: 9795 - DNA, 90831 bp, Oryza sativa
  unsure (1)..(90831): unsure at all n locations
caacatttcaaagaagtaaagtaactgtcgctgatgtgtgcttcctttcttggcctgaattgtgaaggtgcatggctgagtatcttcctaacttggaagaaaatcttaaaatccaggtactatagctttaagttttgcatgtaactgttggtcttgactgcctgctcttattgttgatagtattactactttacatcgtagtgtagttgtcatgttaatggaatgactaatcatcctttgaaaaatagtgtgcggaaaataagtgaggattgaggaataaaagaaaaggatagacagtagatctgatgctattgttgaattgtttaggtgattcaagcaagaaaaaatttcctgtatttcaatcttattatttagtggaagtacctttatgcataaaatgtacatcctttcccattattttaagcatactagacttactggaaactagctactactgaatcatttatcagttagatgaggtattgctaaaggtagcatggcatagcattaatcgtgcaactcgtgtctgttatacaaaacttatgtttctaatctataccgaaggttgtggaagcatcagcttcaattggttctagaagacgtttcattgaagcattggctcctacttttggaaggccattagaggctgatccggtacttgtttgccattgttttcgtatgttattgtctgctttgccaaattgtctaccaacctgtccacacttcagattttttgcagaaaagctacgattctttccatctcagggattttcacttttctggtatgtcataaaatttgtgaatctagtgctttctctgtttttccattacatgactgctatctgttttccaatctgaccagcgatctgatacagctttagaactgtaatgaaaaagtactagtggaatatgactttaattttctaccagttagtatattactaacaatatatatcatgtaactgctgcaggtccactttgtcattcccctccaattccctaagcatcaacctgtgctgacattagagagttctcaggtatttatttggtttgtcactgcttattgctagttgtaacttacatgctcaatagaggtcttgttgttgatatcagcatttagagctgggtagtcagtagaagtgaacaaggatgatacctatagcccatctacccaaacaaaacacacagaaacacagacacatcgtttttcttttttggagatcctatggggaggcaaaaatgagaccaacagctgttatactattccatttcatttcaccccttccaattcacctctctaatggatggaccattttcttcctgaaaatgataaaaaagtaaacatgcaagactatgatgtgttaaccttcttttgttattgattgacttgtagtgttgatttagcatctactggctagagagggcaggtgttgcccttgtaagttactctgtatgttaaattgttctttcaaggtgtggggaaataaccttttttgtggtgaatcctccgcagcacttcaatgcccaggggttacctatcatgtcagctccagtaaatgactatccctggagccctagatgggatccaacagaaatggttgaacgcatctagtaagtttctagttctcctatattgcatctacagaagttttcatgagtccaatttgctgatttgtgccaaaatttgcagtgactttttggttgacgagtgccaaactttcaagaagttttgcagcgattctatccctcaacagaagtagctgataaggtgattttatcaagaaagaacttcttgctactgttaacccatgttcctttcactgattgcataactataaccacagaccgttttttctcatatggtgtatcaggaagcatctctgttactgccggcttgctcggtctgctcgcaagttgcaacctgtattccccaacctggcaagtaaatttgtaagctcaagaagaagcctagtcaggcagtagaatccataagatttggataggtgcgcttctgtttgacaagtaaattgtgtacactagagcaaagctgggcatatgttttgttggttaaccccattgctgctggtcctagactcctaccttgtgattgctgggataaatggcaacccaattgctcctgccatgtacatacagataccgcacgtttaccaccggccgtttctttcactgtaaagtttgatgcaagtgacctctggctgctatggtttactgtacttaatgatttactagtactacattcatttcggatggtgaactggcaacttggtcgccccgttagaatgttcgttttggcgtttagccgcttgccttacgagtgaaaacagtcgatcactattaacttcttccttgattcgagtagtatttaatttgctcatcagttctgacttctgagctcgaatttttccctctgcccgagttgctctctcttgttattttaatttgggttaattcgtcgccaagttgcgtttttttttttctattctactaaaatactagtagtagtatgtatgctccacttgtgctatgatttggttgtttatttgctttgtgggggtaagttgctgttgctgctaagaaggaagtgcagatgacgacatgtatatcctgcttgagaagcagaagcttggcttatttttattttgctaagctgtgttgctcgtcttccatgactctgatgctcttcttctcagtagcagtatccctcactgctacctccggtttcctttcctttttttttttgttccgtctattggtctttggctctctaatctgagttgattcttgatacagactaacagacatgagaggcaggttttgtgcactccttcagttaaagttttccgggtgtgggatttcttgatgatggattatggtttatggttctgtttcttcttcctgattttatatctataaaattactccctccatttcataatacaagagtaggtattataacagactattagccagctataaacatattttaatgagataaaagatgaaatagaagagcagtggactacggatctgtagccagctgtagcacgaactatgacatgcatgtatgccattaactatgacatattctaaattaaattactacctttttaaattcttctctcacattctctaactctattgaatgcatgcattatatttattaggatgatccaaattataatatgataataattatttctttgtgtcttatattttgaaatggggagagtaataaagaacagatgtaaaagcaaataaggcctaatgactgaacgtcaggacctgttaaaggcccattcaaaagctaatcagagcatcaggcccgtttacggcccaagaaggcggacgtttagttgcgcattaatgggcctaatgccgcgtggagtgacgtcaggacattaacggccagtgacatcatacatgatggacattctacacggcgattaacaagcagttccgtagtattggggatttgtcagatttgtaacacgaatatgttacatcccttcaaaatcacttacttctatatgagagagagtgagtataggacggacggagggagttctcaacgtcattagaaacggaaaattgaaagaacgcaggaaagagagatattacgggctggtttggtttgaggtctaaattggtcttaccaatatttagcaatttcaatagtgttaattgtttatttggtttggagccaaattttggcttgcctaaaaaaataggccatttcaacagttaatttaggctttggcttcaatataaacacaattttacctttgccaaaattagccatgccaaaagttactaaaatttaacattcacaaaaatttttaggcccctaaccaaaccagccctacaagccaagcctattacacagtgggtatatataactgcaacatactccaccagagggaaaacacacacacactcttcattccatagaagcagaagcagagcgtaccacgatacagacagaaaaccaaaaacaaaaacagcagagcgtgtatatgtatcattccagtattttctgagaaaatcccagagttgacactgcaagtatgcaactaataaaaatttatgtgattcagcatctctcagatcgaacttatgttattcggcatgtcacagatcaaataagatcagagatcacatccatagcatataccttgaacaaaactgtgtttttcaagaaaaaactttcatgtaaaagtacacaacaaggtcgaaatttggtgtcaacaaacatgtgcagcagccacgaaactacggtttaaaacacctccattttctcatctatcgtctgcaaaagttacttgtgaagggctaccctcaactgtctcattctagatcctgaaaatgattaactagagttcaagggcctccaatctatttcttcttcttggatttgcttccctgtgcaaatgcagtgccctgccacatcaatgaactcaaaagttaatcttctgcatggggctcacaataatcgatcaatatgatgttcggtgagcagcgaaacaaacctccagccactcatccatgttggcatcagtagttccagttcccagttccaccttgggggccttctttgttttctacagcacgcagaaatgattgatgagataaacgtacacagctcaaatgtccagctaacctgtatcgcaacaaattagaaacatacctttgagagctgttgtacttgaccatatgcccacaatccgaagagaccaagaagggcaactccaagggtaataaggaacacagactcaacgctgagtaaacctccagcctcaacaacctctacagtgccattgtaaaagacattctggtatgggttctgatcaatctcatacactatgtaaccaactagatcatatgctccaggctgcaaggagacaggcattaggacgtcatgaatgcaaaatgtacacaacttgatcttatagttaagattgtttcaatggttagcgttgtgaattaacaaacctgcaagaacttgctcacggcgaatgtatacggaaaggttgcttgtacagagacaggaactgatgcattgaagaagttctgcaaaaaaagaaaccacaaaataagcatagttatgaattagaacatagcattccaagaatgtgtgcttgactcaataaattgtgtgattcaacttcacttaaagacaaataacatataatactactgagaagcagaaatacagatatctaatgaaaacataacagaacaagatccgaacagttatttctcggtgttcaaagttaaaacaaaatacattatatctctagagcaggcaggattaaataaattatcaataaataggaaagtttgatggtgcacacatcaataggttaatttcagaagttcagctgttcaggtagtaaaaacaagaacgctcccacatttcctcacctgaacagtaaggttttgtccatacatcttatggtcaaaaggaagatggagagttgaatggatagcaacaacattcaaagttgattcacctgtaaacacaacatatgcaaagggtgtttgactctaagcaaactaagaacaaaacatttgaactagcatggtaaaaagaatattaaactattgaactcagaatctacattgccaaaacaagaaaaatttgctcgtttatgaaaatgtcatgtacggtaaactagtgatctctaacataaggttattccttattggacccacatattcttggcaacaaaagaacacactaatatggctatgcatctgctctgacgcatcaatttacatgatataggaaaatacatgaaagacacatttgcatcaaaggcagctgaaaaactagtgctattaagggacgtgaacatatgcatcttacaactcatattgcccatttggtgatctgttattagttaatcctatatagaaaacatggcagtttcaaccaacctagtacatattgaaacaatctcatgacctggatatgatacttaagccaaatggacatgaacttgcaataacttactacacagaaagcaaataactgagacaaatatgcatggcctgtttagatgaagtgcaaatctactggtcgatttaagataaatagagatagcccaagccaaacactaatcatagctaagtaactgaagtggcaaccgggaatatttcatgaaagaaacagcatgagttaccctcgttttgcaggccaaccagtagttcagtttcttcacctgctagcacaactacaataaaacaagaaaagggaaacattattgcttattgaagtcaacaaggatatgatgctgattttaaacaaaacatgtttccaaacatggcatgcaaatattaagaatagacaagatcctacagatatgcatagaatagaatcctatcagatgaacagaactagcaatttagtttagaatatttcatattaaacattaagggaaatgattgcaaatgaattacagtactagcgagtgaatttcaaataaatgattttgctgagattgtgatttgacactcacttttgccagcgtttttgggaaaaacacatactgtctccacaccaggagccggacttagaggcccatcgctggaaacttgtgtatcatcactgacgattcctagatcagccccatcaacaacttcagctgtagcagcttcttccatggactgagctctggcaactgcaggaaaattcagttcaaaggagcatagcagagaaaacagtaccattttcagccctagaacctcatcggtaaatttagaatatacgtcatcacttggttggctattctaaacagagattctgctaataatacatcccaattttccaattatgaaagagcttgtcggaggcttggagcagcatggtattctcaattttaaccaatcttaaatggcatggttccaaaattttacagtgttaaaaattaccatagaaacctatcctaccaatctaccatcgttaaccatacatgaaaaacccgtctcaatttcagaaagctccagcctcagatggctgcgttactttgataacaaatatgcaaacgcagaaacatttttatcatgaaaattgcacaccaacaaactcttcccaagacgtcgcgtctagaatcccgcccccacacaccgatctattcatataatacccacctaaacttgctccaaacatcaacctcctccggtgcaacaccacagagcccgatcggctcaattaccacacccgcggaggggcaaagcgcgcagatctaccgctgccccgccgcgaattatcgagatcggcgctcatctacgcggccccggatctacgcggcggggcgcggggcagagaagagaaagggagggacgaatcggtgcgcaacgagggtgtttaccttggacgacgggggcggcggcgaggaggaaggcgaggaggagggcggagagccaaaccctagtcgccgccatggctggctctggctcagatcggatcgggtcgaggcggaggaggaaggggtcgcgtgggttttgcgcggtggctgcgtgtggctcgcagtacaagtagtagtagtgaagccgtcgcctactacccttcaccaccacgaggtccacgacttgggtggggcgctgcgccgcgtgcccgcgtaggcttcagggtcgagtcgcagctgggtttgttactgtacatggattgtttgtttggcacattcaattacgatggtctcgtgatccgagctgtaaagcgtttataggattaatctcttcatccactgatccactgacagtggggtccacaaccgtataattagttgcaagatcacttcagcaaccagatgaaattgtagctggaaagatgcaaaatatacgcgacaactttcaccctgatggaaatgcagcgcaactagagcagattcgatgaattgcagctcatttttcagaggatttatggattcggacaaatgtgccctggtttttttttttacacaaattccaagttacaagaatacaaagatgtcaggtttacagtcccaacacatcacacctacattaaggtaaacaatttgtttgcagcagcagcaatcagagtgcctggaacggactcgccagcagttggcaccatccgttgtttcgccacatctatctggagctcttcttcttgttgcaacaatgcagtgacggtaattcgtaagtggcatcattgaacaagcgtaacagcttgtcatatgtactccctccgttccaaaaaaaaacaaaccctggtttccgtgtccaacgtttgaccgtccatcttatttgaaaaaattatgaaaaaaataaaaaagacaagtcacgcataaaatattaatcatgttttatcatctaacaataatgaaaatatgaattataaaaaaatttcatataagacggaccgttaaagttggacacgaaaacccagggtttgcctttttttttgggacggaggaagtatccagctagttgggacggctcagcgccatgaacttgcactgctcactcatcgcctgaagctgcgcttccttcttatcaatcatcgcacgcagcctcacattctcctccaccaccttctggacttcggcttctttttgtgctttctcactctcaagttggttggttcttgcaactagcctgttcacaagaacacaaaacttaataccaaattgattgtttggaatgaaaggattggataccacttgcttcaccaattcataaatcacccatgagtacgtacttatctaggcgattaacagaaggaacactataagtcaatgctatgttatgtttacgaatatgtagtttcatatgcgactgttagggaacttatttgaggtatcatgggttttacagcagccttctctgcatgattccaagaccatgaaaaatgattatatctgtatcaagtggaaaaaggagacaaaaagatgagcctacacagcatatgattttcccctcagccaagaatgtaattttctatgtttttaatcagtcatgggcatttccttaacattaggatgcgcatcactcaaatcagaaggtgaaggaactggaactacatgtttagaggacagcaagaaaaagtgttttggactaagtgctgaaatgcaaaccagtagaaaacatactgagacttagtcaattctatatccacaaaagcatgcatcattttgacaactgaacatccatacgaaattttggacatgatcaaaacacacaatttttctgcagttaaatgtgaagttggggaccaactcctagacttgatgattcgatttatactacactaacgtaacaccatatcagctgacaatagtctctatgatatcaaaaggtgacaaagtatttaaatactctagatgactcatttcaatgatatttagcatgattaaaagcaactatcaacaaatctgacaaaacactctttaccattgatcaacacagtggggataggtcatagttgttacaaaaaagaaggcttctggagatgcagtgtaaactctaatttataacagaatagatgtagctttgtgccttgaggataaaccatagagctctcctagtcaatgacagcccaacgttattaccaaaagaaaaacacttgaatgcgtgacatagtttatgtcaatcatatatgccagcaaaaaataggtttccatgctgtgttttaatgatactagtgtatatgcagtgtcacaaggaaagttcaaggcctgcagagcagttggtttcatgagctgatgagcatatcattaagcggctcgtgctttacaaaatgcattagaatatgaaatgttgtcttaacaattttctcagcagcatgtcctagcatgaaggtgttggcagcatcatcaatttacatgacgaatagggattacagtgcatgtgcaggatttattgtccaattaaactacagcagcatgccctaaaatgatgattttgctagcagcagtgtttacataatgacaggattgggaagatgaaagatatttttgcaaagctctgaaaaattaatataaagtttgcactcggaaatgaatcctgtacaacccacttcatacaaataatagttactaaaaatatcatgatacttgtgaagttacctgtcgaagagtttctccattgtttcaaactgcttctctgatgaaagaagagtttctctgacattaacgagagtgccgacataggttctgagagactcgaagtcatgcttcacacgactaagctcctgctcattttcagccgcacgttgcctttgtcgagtggtctccaacaccatgtcttcaaccctctgcctcatctcattcagcataccattcgtacccactgcaaatttctccatttcctcaactttggccgacatggactcaacctgtatggtcttcctcctaatctcttccagacccatcctcaccttctctttctcgttagcggcttccgattcagcaacaatcactctcttcacaagggtctccatgacatcggtcaccacatgtatcgacttcagaatgtcttcgacatctacatccccctcattggcatcgccatgttcggcaacacgactactatccgccgacgtttcatcatctaaaccctcgcaggaagcggactcgccgcccttggaccaatcagccagtggcaccccgttcctgtcgacgtaccccacgccatcctggtgcctaatcccgcaggacgtgtgcgcgaggtgcggtatcgccatgatcctggccttggatttgaggtaggccagcagcgtggcgatggtcttcaccctgcggcagaggtgatccagctccttcctcgagtcctcctcggagcacttcatcccgaccttgacctccacgagcctctcccgcagtgcgtcgacctgcgactgctgctgccgcagctcctccctccattcgctctccccctcctccgcgccactccgatcagcagcggcacgctccatgaaaccctacggaattcaaaccccccttaaaattgcatgtaaaatcggctagaaatggatctattcgtccccccaaattcgaccggataataaacgcgtaatcagacggatttgcgagcgagacggtggggatattggggagccatgtaccttcggtataggaggcaaggagcgcgtcgccggcggcgaactcccgctgcggcggcgctcctcgctttcttcgccgcgggttgggttgggttgggttgcgctctcgcgtcgcgtctcgcgaactagtcgctcgcctttcccctttcttcccccaacccaaactaatgaaatgaaatcattttgtttgcttacttatttcctaatccgatgattagattaggtgagtacgctaatggcaaaaagaaagattaataaatgcggacgcgctaaagcatccgtatgggccttgggcctcttctgggctttttttccaaaaaattgagcacatttgtaacacaaaaatcaaccattgtttttgtgcccgagaagcattgtaaggcagcacaacaatagcaactgtaaaagagaacgtcaatatttgtaggaagagtttttctcgtatccttgaagagatatatactttctcacaatttaagaggtaaaaactgtactaccagttgaactgattagaaaatatttaataaatgtgtagtcgagtggtaatgtaaagggtaggtgaagtaaagcatacccttggattccacttccccacgtacccaagttactggactatcaataatgagggcattatggctaccgacatctaaaaatgacatgcattaatttggcaaacagaaaatttaaacctgttttttttttctcaaaagtgttttggtttggtaatgtacgtctcctgaacaattgagatttgagagtcggtggttaaaactaaaccgtgagataaaccaaccggtgctttaattaattttgcacccccaatataagcaacaacgaactcctacgtggcggatggtcgagacggtcatggcgagcctctaactccccaccaactgccgcctctcgtcgcctcgcctcgccggcgccacctccgcattccgttccgaccagccgatcggtttcttcctcgccgttgcaaccttcgagcgcgatcgatcgaggcggttgaccgccgattcgccgcgcggcgttgcattgcacgcggctttccagttgataaatcaatcatcatccccttgatcgatgcgagtggcgttcttgttcgatcgagaggaggagatcgtgatcgcgagcgatccgggcggggcggcgcgccatcgatggcgaactgcgtgcggtgctgctgctggctcctggtgctgatgctcatggcgctcgcgatcaccgccgccgtggtgttcgtccgctacaagaacggcgagggggtcttccccttccccggcgtgcccggcgccgtcgaccacaagtacgccgacgcgctcgccgtcgccctccagttcttccaggtccagaaatgtaaggaattattctcaactttgcatgcattttttttttttgcgtttgatctcgatcatggaagttcttgatcgatgaagccgggaagctggtgaacaacacgatccactggagaggtgactcggcgctggacgacggcaaggaggccgggattgatctctccaaggggatgtacgacgccggcgaccacatgaagttcggattccccatggcgttcacggccaccatgctctcttggtccgtcctcgagtacggcgacgccatgcgcgccgccgaccagcgcgactccgccattgacgcgctgaattggatcatggattacctcgtcaatgcccacccctccgacgacgtcctctacatccaggtgatcatcatcaaatgatcgaataatctttatccaattcttgggaaatcaattaatttcttctggcattctgatctccaggtgggtgatcctaaagcagaccacaagtgctgggagcggccggagaagatgaaggagaagaggccactgaccaagatcacgcccaagtcccccggcagcgacgtggcggcggagacggcggcggccatggcggcggcgtcgctggtgtacaagacgatcaacaagacgtactcgtcgtcgctcctggaccacggcgagaggctgttcgccttcgccgacaagcaccggggatcctacacccggacgttcccggagctcagcgcgttctacaactccaccacgtaccaggacgagctcctctgggcggcgagctggctctaccacgccaccggcaaccacagctacctcgcctacgccaccggcaagaacaaggacttcgccgacctgggcaacccgagatacttcagctgggacgacaagcgcgccggaaccgaggtgggtgataatgaccgtgacaccgccactgattcaactccactgttcatggcaaattttgaaatcttgggatggttatgaagtgaatttttgtggtgttttgtttgagtttcaggttcttttgtcgagggtgagcttctttgcttcgcaaggatcagacgttgcacaagacgatgttcttgggatgtacaagcagactgctgatgccgtcatgtgcattctcctgccggattcagagaccgccgctttcagaacagaaggtaaatattcacaagattcagaagcaaaaataaaaaaagcaatctcaggttcaccatttgtgtagctggtaataataataatccagtagtatttcagatagcttgcaacgatttatttcaggtggtttgctgtacgttgccgagtggaactcactccagcacccggtggcatcggcgttcctcgccgcggtttacagcgactacatgcagagctccgggaagacggagctgagctgcagcgggcagggcttctcgccggccgacctgcgcaaattcgccaagtcccaggtagtaacaagattcagaatcatccatgaaccagagttcacaattgttcagactaacatatgttcagagagaacagaaatgttcagaaatacagtacgtaacttggatgtgatcacgcactgatcagtgatctttgttcttggcaggcggattacttgctaggcagcaacccgatgaagattagttacctagtcgggtacggcgaccggtacccggagaaggtgcaccaccgcggcgcgtccatcccggaggacgtcgacaccggctgcgacggccacaagtggctggagacgtccaagcccaacccaaacgtcgccaccggcgcgctcgtcggcggtccgtacaagaacgacagcttcgtcgacgagcgcgacaacgtgatgcagaacgaggccaccacctacaacagcgccctcgtcgccggcttgctctccgccctcgtctccacctcctccctcgcgcgatccttgtcatgatctgcattgctcggattctgacggtttaccactcattagatggcatgcaaatgctggctcaaactgatgaagaaatggtagggaggatgttgtatcatggatcgaagaagtcggtgatctgtatgtgaaaagggtaattagtactgtactagtacttatacttactaacaaaaataatcattagaaactacttttgtttgttcaattggtgctcattatactatcattgaactctgaatcattttagcacattcagttctctctgttacacttaagatgttacatatatcccaagttcaattgactgaagaaaaataaaaagaacgaagcatggttggaacctgcacggtgagatgagattaacaaggaattcagcatgcaggagttctcgcacccacacaattcccagcagaagatctgaactttctaactccgaattgtgcactgcaatttatacattctgattcctcgatcaatcttcgccagcacagcaacagtagtttacatcctctgcatcctcgaccaaatgatccacatttccttaatcatacgctacactaggtaactaagaacatgcaaaaagtgaagataaccagggaggaacacaacaatttcctggttaataattgtagcaagatagcaggaatactcacacccacaattcgcagcaaaatatctcaaacattttaactccaaaattgtgcagtgcaatttatacattctgattcctcgaccaatcttcgccaacacagcaacactagtttacatcctctgcttcctcgaccaaatgatccacattttccttaatcatctgctatacactaggtacctagaatctagtagagtactcgatctcgatggtaatcaagaacacgcccccggcgacgcgctcacggcgagccggcgaagacatcggtgggcgcgagcggcggcgcgtcgagctggtagaggccaatggaggggccgacgaagcggaagaggatccaggcgccgaccatgatgaagatggaggcgtaggcgaacttgttgagccagaagaggagccccttctccccgacgtacagctcgccggccttctccgccatgctcatctcctcccactccttcctcctcgtctgcttctccctgcgcgtcgccgccgaagccgaagccgacgccgacgacttcgacgcagccggcctcgacgacgacgacgacttggatttcatggtgatccccaacggcgccggcggagtgaactcctggacgcggcgagcttggttcctcgcgcggaggcggttcttgacgccggtgggcttggcgccggaggagggaggcgtggcggactgagcgtccgtcggagcatcggccgcggtgggggaggggtcgccggatgatgcccgggggatggatgggcggcggcgatggcggaggaggaggaggaggggttgggaggggcggtgggggaggagagggagcaggaggtgctccatggcgacgatggcgaggtgaggctctggaaggaagacgatggggtttgggtggcgcgggattttcaggacgggatgatcaactgcacgagctgtggaccgtccgatggtcaattcaacggttcggattaatccactggtatggaaaatcgtaacctattttatctgatgaataaaatactttttttttcaattccaaatactacaaactagaaagtaataaaggggatttgtcctattttcatttatttttatctttcttttttcttattttacaaacttatggttatattatatctcacgacacaacttgaaaatatattccatttccattattcaaaagttacaaactagacacccgtataatgcagacatgagcgcgtacttatcactgtaaactaatataggcaataatatgcttgtggtgacttcgttaattccaatatatactgggctagtctttcaaatgtactcatacggatagatgtgcgcgtgtgcgtttaaagcggagagtgtgcaggaaggatcaaaagatcgattttcatccttaggttaggttcttcgcgcgtgttaattgtcatatgacatgttctcagttccgcttgagaaagtttctcaaaatttttcctccggttttataattcttgatgttttatataaggttgaggtaaaacttaattctagctttaactggcaataactaatatttagttagaagcgctataataacatatattgttttgtcttaaaatataatactataataaaactataaatatatttattatatatattataaaaaatatagttaatgatatattttcaagacgttatcattatctaaaagataatatgaaagcattgcatgtggatgccacaattgtaaagacatggtttggtagcaagaagaaaaagcgaaatattgtttattcatctcaatgttatgctggtttcctcacctttaacatatactccatagtagtaagttatatcctcttttttatttggagtagtttgaactaggggaattatgtttctagagttctagtacctgattagtactaagtgattagttagtttagacacgatggtcagctaaaacagcagaatttccggggttgcttgatgtgatgttagctcatgctaggttggattggcaccttctaccgaccgtgcacgttcatcatctccaaaaaagaagaacacaaaatgtcaagtcaaccaagaccagatccattaccctcataaaggacacttataaaagagtgcaaacattttatcttggaccatgtgtaaatatatctttttaataactgttttacattctatttttcagaattgtgtaaatattcaccagctctgttgtttacttgcttcaccaacataccgcctgatatatcccgtgaaaacaaaaacggtaaaacggaaattcagaaaatctttcagggcgatttgattgatgctgaccatctcacctcaaccgtcggatgcagatcgtacggccgagagagagagagagagagaggatacgatgcatcagcaacaaaaaatggtcaagaaataattccagcatcaacgagctagatactagtggtagtagtaaagcgaaagcgaacaaaaaggggaaaaaaaaaagaaaaacaagagcgctgtgtcggagaccaccgccggaccaccaccgcgacccctcgatcccggcgatcccacagcattggtcggtccccgtcgatccggccgccgtggggtttggtctggtactctctggtggtggtggtggtggtcgccgtcgtgaacgattcctttttctgcttggattttttttgttgcttttggttgttgtgatccctgtggggctcgggttccggccggtgtaggggaggggagatggatttggagtcggtcaacccggagctcgccgagatcgacggccagatcggcgacatcctccgcgcattgcagtaagctccgaatcttttccgccgtgttctgaaatccgtttctccattttttccatttcaaatttcgatcgcttcgcttgtggtttatgtgtgtttttagtagaggtaatattcattggatctcttgcttgcttgcttgctgtaatgtttgcttatgaaatgcgagcctggaaatcagactgttaacctgcaaaaaataaaaataaaatctttgtagtgtaatgcggcaaaaagacgggtttgacttagatgatagattgataattaatctgcttcatttgtccacagaaatgggttccagaagctggataagatcaaggatgccaatcgacggagcaggcaactcgaagagctcactgataagatgcgggattgcaagaggttatccattcttttcacacatattacgctgcttagtgtagaacagcatcttttgtacagaatgtgggcagttgaaaactatgattacaaatgtgtcacttggaaagagttgagatttggccatagccattgcattactgaattcagtattatacaagttctgatgctgatcagtatctccaaatgcaattgatttttgttcttttgggaaaggatggatctagcagtggcggcatacaatcatacagacatttggttgcttaattttctctgtatacatttttaggcttatcaaggactttgagcgagttgtcaaagatatggcaggaagtaccgatcctgagactgctaggatgcttcatgataggaaacagtcaatggtaccaccgcagaaccttatactatgatataattttatacattcagctttcctgagtcctcaactccctcttaacctgactcttcgtgttttgcagatcaaagaattgaactcctatgttgctttgaagaaacagtgagtttatacctatcccgtgatgtgaaaggctcatattaatggacatgaacctataaggggttgcccttgaactaataatcacttcaccaaattagtctttattataaacttgacagatactgctttggctaacattacatgatacttacatgcaaaagatcgtttggacttcagatatgcaagtgaaaataagcgagttgatctttttgatggcccaagtgttgaagatggctttggtgaagaaaatgtcctgttagcatcaagtaagtagcaactctagggcccttttaagtgcatatggaggtggtctattttttctcaggtgaaatgataagaatattctggcggatatgccatcactagcatgaatatatgcacctctttagatttaatggtcaattatttcttttgtagatatgacaaaccaacagttaatggatcaaggaaaccaactaatggatgagactgatcaagctattgcaagatctaaacaggttatctttactatgttgtgcaagatctagacaagatctaagcaacttgatatatcttcgaaagagaagtgcataatttttttatttcttattggatcaactaggcattttcttgcatttagtatcatgtaatttttctgtgttttgtccctcctataggtacaaaatgtagcttctttcagtttatatatatggcttctaactgagcttgttgcatcattttccaacttagcacgtattgatctttttttgttatttcagttcctttagcttatacaaaaactctttattagggtgtaattttaagtcttacagcaaattgatgtgctctttcccacaaactaagtcacatcattgctttctggcactgatttgttgctgacttctgcagaccgtccaagagaccatcaatgtaggtacagaaactgcagctgctctcaaatcacaggcaggatttctttgttcttctcaaaccagccaatcatgctgtgtaacctggatataccagagctaacttcggttatttcttattgaccagacagagcaaatgagcagaattgttaatgagctggattccattcatttctccattaaaaaggcatcacaaatggtgaaagaaattggtaggcaggtaagtaccctctcaacgatatctattaaaaaggcaccgataatctgtcaaccccattattgtttattcatactgttcttaaatgtaggttgcaactgatcgctgcatcatggccttgctttttctcattgttgctggagtcatagcaataatagtcgttaaggtgagtgcttagattttccatatatctgcttacctgacagttaattttggcattccattcttccactcttggaatcccttcacacaatcttaccatttcactgcttattatatatttttttaaaaaaaaacaaaaacaaaatggcgatagaagtgtgccaattaagcagttcatggccccactgtcagctatggaacagacatttccatttattctcaatataacggtgtaaggtttttagatgagatcagtcaaccatttctcgatcaatttatccttggtgaacttcccttatcatggtgtctatctccgtcctttgtggattgaacttttttgtacagttagtagtaaacaaagaggtcataaggcgagatgaggggatgagagaactacccttgcatcaatattatttttgctttggtgaacagctgttagccctcccctagtgagaagctaaaaaaaaacccagaaaggaaaaataatttttggccctcttctgggtttcttctggtcggaatattcagtttttatggtgaatggttcatgatcatagtgtttcactgcagattgtaaacccacagaacaagactatccgagacattcctggtctcgctccaccagttagcagaaggctattgagtattgtagaagacatctgaacttcatacatgtgaacaaatcaaccaagagcagcttgtgctgtttaactcgaaggtcgcaactactacttgaacatgatgcacagtgttgtaatactatacccatgggatccgtgtgcgaggtactgtaaaattgtacgagtatgttatgactctgacaagcaggtttgcttgtaagaactgtattctgtgaacattcacatatgtacacgagcatatcaatcttttttaagagtgacagcagcgtatggatcatccaataatacagcgttttttgcaaatagattacaggatatcggtgtgatatgtattatgtttttgttacgatgggtttcgattatatcgtcgtttccatacccttctcatcggattaccagatcgggtactttacacaacagatttgttagcaaagtgtagcttagttaggacgttcatttctgttttaggatttctacttgcctctccttactatgaaaactacgcataggcaacctttgtttcaaatttacataacctagattctctttaacacagcttccaatccaagatttcttagagctgagtattactagcttcacaaatacaaattcatagatctagtttgcgattagcatttggataaatcatttcactctattttagataaaatttaaaattttaaaccgctataatttaacatagaaatatcaaatctacagttgatttgatctggagctatgccatacaaggccttatctcctatatttcccgaattgtttcagcacaatattgtaggaaaatagaaaacattccaaaccattgtaaagaactgaaaagaaagtgactaggcacaagaaagctcacaacagcagtaaaattaaatcgtacctccttccaataaatcagcactaataagtagtacatcaagaaaaaacaaagaattactaacaagtgtaacaagaagagtaagttgaacatgcaaactatttctcatttattactcatctatttcctgtacaccaagtgagcacattttacagtgacaaatccatttatccattttacagtgaacatatcagcaaagaaaaaccttaactcatctgtgttctggaaaacaaaggtgcttgctaaaaatagcaccaaccgcttctggatttagccgtaagcaaaactctcacagaacttcaaatatgtttctgggactaaattaattagaaatgtactgctgtgactggacaatagtagtcagctgcttgaggttagctaatacatgcctcgggccaagactttcagcaccaatgtgattcagaagttgttcaatatcctgcaaggaaacagaaggggagggatgaccaaatgaaaaataaccatgcacaactttatcgaagttgcaagaattttgataaccaattacgtataggaattacatagctgactcagaattactcacatgaaaattccaattttaaactgctaactgcattatcgcataatgatttgttattaaaagggtgcactgatatttttgttcttcagaactatgcatgttgtcatacaacaagccaaaattttcacaagctgacacttttattactttcttatgctgtcaaattcatttgagctgatcatttatcctaattagatcaacatagcaaacacaactaatggtttcttaggaataggattctaaatcaccaacgtgaagctaactcaagggccttagaaaatattctcttagaaaatagacttacatgcgacttttcacaaataatcttcgcttgattgtagttagcctccaatttttctagtgataatgtgatatggtgatttgggaaaacaatttacagatcttcaataagagggcatcaagggaaaggcatatctttccttttgccattttactccatcatggttatagctattcatgttaatcaaacactttttcattaaataaacgcgcaacttagcaagaagaccaaccttgtttagcaaaaatattgcatatgctgatcttgttgtctcctggctttcaaaaaacagagggaattccattgttcgcatggttgtactcagaggagcagaacttatagcagaagctaaggacgatgactcaactgaaggcgcgcgatcaagaacatatgaccgtgaacctcccaaccgcagcggatatcgaagaggaacatcaagatatgatgcaataagggacactgcctatgatccaaaaatgaatgaataaaaaaacagcagtaagtaaaaagaattgcatagcgtagtgccacgtctatcactgtaaaattctaaaatgtgtatgaccagcaatattgggttatatatatgtcaaattggtctaaatgtctcttcatcctatcaatctataacagaatataacctacaaaattcagagaacttatagaaagaaactggaatcaaatttgaatgcctaaatcaatctccaatggacatatatttcagtttcaattatacatacatgtgcaacataacccaatgcggtggcagaattctgaatctcagtcttgtcactaaagtagccagtctttttcatcgtaagcttcgatagttggagacccaaaattgccaaaggtgcctgtccattttgagaaccattcggagccattgattccgcatctcctgcaaaattctgatgcattcaaatttttgacaatagtttcaagattaccatctcataccgaagaatctaaacattttgctatgggagaaaaaagtaagtgatcactccaagtcttcagcttgtttggctaaggctcatccattgtagagttgtagactagtatagttgccagaaactggaagctaaaaagtgcaaatgacttcatgtttgatgttatcaacaggtgatatctcaacaaaggtaaaattggttttctatagttatcttcacatcagagatacagccagtagcctagcaacgaaaatctaaggactacttcatgactaaccaccaatgatacttatttctaacatataatggcatgcattacaatagttcatggcagaccttaattctggttcttactactgaaaatgaaaaggggcatctcaattgttttaaaaaaaataatttaaaaatgtgtgacgacgggcctgtgtgtgcaatattgtttggacaaaattagtaatcagacaaatattctcaaagtgcttcaatgctattcaacgatagaagaaatatgaatctaatgttgcagcatcaggtgatgaagaacattgtcatcatacagagcatgtccaaataaatctgatttacatcaactacaagtgaatgttctggatagcaagattctgatgttatcaagcataggcagcattggatataaagcaggtataccaacttgacagagcttggaagttgtaacaggaaaaggtaacatactggttttgagaatactggagttcaagaagctaggcttgttagctggagatcgctcaatcaagggtctcacaggatataaatgtgctacttgtgctgtcatatattgctgtcttgtgcgcaacatcctttccacagttttaagacggacatggagaccattttcccctgacagcaatttatcagcttcctacaaaaataggttcaagaaaaattagttaaatagaaaaaggcacatcatatacagtttaaaagcacatcgtatctttcttgttctataaaccacacatttagatgtgataattcttatatcataaggaacagtcattactactaaagggcactgggacaatatggatgaagaggaggaattaagagaaaaaggagatgatacagcatttgaggagaaggattaattcattgttcttctagcttaatcataatgaatacaagagttatacctatatagaggatgaactaggatgcctaacaggaaaccaaccttaacagttgatattcaaaatgcatgtcaccaatctagccactgatccatctcctatgtggaaagtaattgtaccttaagtttatttcgcgctgtgctaagagtattgcttgttgttgacaaggttcggatcttgatgcggagttcctctcttcgatcatccacatcctcggtcattttcttagtgtgcattttcaaatcccacatgaaatcagcacgtgcttgcactctttccctgatttccgccaactcattatcctgctgaacggaagccttccttgcctgctcaaaaacacatagcaggtcatacatccatgcaaggactagtaaccgcaatacaatccatgcatccatagcatctcatgagacatgtagcatccagaatttaaccctgaactcctgattaacaataatcgtaacacgacaccaacattaagaaaagagcaccacgcagcagcacagctaacaaattatcccccagagactactactcgagaacattaaggtaaatcatcgatcgttccggttccagatcaaagttagaagacacctagggttcctactatccgcatagaatgtgaattcggaagctatagaacgcgcccagtgatccgcccattccatcaggagttataaacccaaattaatcgagcaaatacctcgagcgcggactggaggcgcgcggcgagcagcgccttgcgttccctggcggtggcgagcgcggcggagaggctccagacgcgtgcgagctcctgctgcaggtcctcccagtcgatgaccttgggcgcgtcggctcccgggacctcgctcgccggcacgaccacccaccccctccccccctcctcgtcctcctccggcgccggcgtggggtgatccgcgcacgcggacgacggcgacggcgacgaaggccccggctccatcggcggccgctgcggtcatgccagcgggcggggatccgcgcgtgagctcgccatgggcggctgctgctgctgctgcggctagggtttggtggccgcgtcgtctccgacagcggagagggagatcggcggcgactgcggatgcggggaaggtggagatggttgggaagaatggaggaatggtggatgacgtggcgtgacgtcacgtggatccatgcgtgtgaagaggccggcccagcccgggagcaccgggcccgttgaattcaaattgggccgaattttgtagcgatgcgtgtccggcccattagcaggagaaggcctaattgccatccggagatgtagacttgtccttccccggcaagcgcctcaggggtagagaccaaagtgggtcaacccacataggtcaaataaatagtaaccggtggactttcgtttcaaagtctggtttgccataccgagttgacctgaactcacttatatcaatctattttttttaaaaaaaattagctaataattaattaatcacgtattaattcatagttttgttcttcgtgtggagggtacgggtttcttttggagaacataacctaaatatattagggaaaaatggaagctgaacagataggaggaaaatattatgaagaaaaaaattgaaaggtgagccgatatggaggggaaaaaagaaaggtgaaacgattcgatgcacatatcatataaaaatatttttttctaacattaaatttaaaaagttattagagataatgaaattgcacgtaatgttcaacatgggcatattactagttagtagttaactcacccgtcaattcgtgggttacccattatttttttttaaaccccgggttacccactaaatatgtctgtaagtagattggcgggttagttcccatgcatcccagctcaagccgcaggcgtggtggtggccggcagagccatcgcggaagctgccagagtccggggggacgaccaaggcggcggccggaaatggcgtgtcaacatttcacccgtcgctgcaacgtcttctccggcaagcgtatccatcggtgacggttgagtttcaaggttctatcgttgaatcattgtatctgaagagagaattaggaaaggataatacaagaagaaattggcgatggatcgagctctgaagatgacgagagaattgtcagagttgtcaccaaactcaccacgctttgccgccgggttctacatgaaatgagtagcacaaatggcgaccgacgacagctcagggggatggtcctcgttgcaatctccacggcgaatattcttctttggttaattagtggcttattattcgccgtcttagaattaataatcacatcctgtaattaaatggccaaagacagtacagtacactagttctactgctcatgacacaagtctcaacaagtcggcaaatcttgtttgcatcgtccactccaccgtcgtctggaacgaagaccatatgccatcttctcctttgactactttcttcagcttcaattagcatcttactcactacactaatcccatcagaagaaggttctaatgcacattaaggaaaaaaaatattggatcaccaagttgttgtaggggaagaaatctagagcactgatttttaatctggttcggtggagatgtggctgtaaagtaagttcagcaggtcatggcttgatggtgacttgtctgaaaaaaatctgtttttcaggagggtttacttgtctgcttctgtaactgcaagcacttgaggttcagacgattggatcaggttgaggttccaactgattttcagatcatgtgggacttttggttgcaccatgaccatactacaaggtagactagtgagtgctattactttcgatgatattaagatgatgatgatgcggcaagtgccggctactgcaactgaactctgaacactgaaagatgaagatgtgccctgcgattacacaggagttttataggatttttcacgtgaaatcattctactttccagtgttccaaaggacccctaaggtagtacaactatgattcagacatcttttgaacaatattaggccccaaaatggtcacaatttacttagtcagatacaaataccatgtttcatttgttatccttcagcttcagctataagggttttgttttgagcttcctttacctattgttagccaaatcgaattgcataattgatttcagaaaaaaaatgaaaaagaaggtgcagaattagtgcgacgtgtggcctcgaattcttgagcgcgccaaggactgtgatgatgtgaatgaacgaaacaagcacaagactgtccacataaacaagtcaagctgccaagttgttttcgtccccgatcgacaggagaagatgacgacgatggcgagagtggcaaaaaggtcagacaaaaaaaattcaattctgctggaaggatcatcagctacatctcctaccgtttcacacctcgcgtccttggttgccgcttgttgaatcaaatccaattttccattttgtcccaagcctggtcaaaaatcagttttgcaggtaaaagatcaacatgcaccttccctttcctgtaaagaggcatgagcatattttgcacactcagcatttagattgatggcccctttgtttctcaggtagaagaaaaagcttttggtttgaccatttcaaccaccaacaaacactttgaattttgacccaaacagttattactactactgccgagtttagttccaaaatttttctttaaactttcaacttttttatcacatcaaaacttttctacacacaaacttacaacttttccgtcacatcgtttcaatttcaatcaaactttcaattttgacgtgaacacgttgaagaaagaaagatgctgatatgcagatatggagcaatgaatcaggtgaggtaagtatattcattcctccatgctatgttgattgtaacaataaatttccttattattttatgattttatcctaagaaaaaaacaattaagaacagtacactctctcttcattgatcttgttgactggtgtacagttagtgtgatggtacaagtgggagacgcggcgtgtgcgttgggatcgccgcgaacgaacgacgcggaagcgaggcgaggcgaggcgacggtacgtgtcctcttttctctctcgattgattccacgcgagtcgtcttcttcttcttcttcttcttcttctcgccccccacttgttcatggattccaaccacatgatccatatgacgtcgtcgtcttcctagttcctcctcgtgttaatttttccatgcaattttagctgtctttatcaaagctaatttgagctctctctctctctctctctctctctattctatttgtttccttgctctgctctctgaatttcttctcttcttccttctaccttcttaatttgcctctctgaatcataccatctcgtttctactccatgaacagctttagcatcttgtcactgctcactgggattaaaagtgtctccaattagtagagttcttggtcttttttttcggatgctactctccaaagatttggttcttggtgtttttaatcagcaaggaggcctcctctcaggtttaatttgctagcccatcagatatggggtgcttcgcgttcaagagcaaggccaagaaccagcgggcggcggcgtcgggggccaggtcgccggcgccgacgtcggacgggcagaagagcaaggcatcatcggcgtcgacgccgacgaggagcatccaggagctgtcggacgagaggggcgcgcagcggctgcgggtgttcgacctcgacgagctcagcagcgccaccaacggcttcagccgcgcgctcaagatcggcgagggcggcttcggctccgtctaccgcgccttcttccgctccgccgccggcggcggcggcggccgggtcgtcctcgccgtcaagcgcctcaaccagcgcagcctgcaggtcagtacagtatcagttagctgtactcccatctctcctccctctgatttgcatttgctcctctcgaaaattcgccatggtgcatttgattttggctagatttgtcaaaacgtaccgaatttgttcatcaggacgattgaatggcaaaagaagaacttgaagattttgtcttttcagcttgggcactgaccacatggctgcatgttttttcagagtttcaaaaaagaacttcgcttttactttctctagactacattcaagactcgtagcgtacaatcttcacagaagattcagaaagacggcatgcacttaaatatatatttttcggattcacacattttggtatgctaacactacagatttactactgctgaaaatgttcttcaaccagcaatagttaccaacaagcgatcctgatttggatttggatcgagacctaaaatcaaactcaggatattgttcttttgcaccgaaatcatatgaaattcttagcctcgtgacaattccaacaaatagataaacacatcccgtaggacaaggacacccacacatgtcaacttcaaccacagatcacacaccaaaccacgtgaacaatggtccggacagcatcccaagtcaacctactaaattccagaattcagaatcacgttataaacaacgtaccaagcttaatcacgccaaaacttgatgccagattgccagtgcataggacaaaatccatgcaattttcaattgttaaatcaaagattgcatttttttttaaatatcaacagattgaaagttatgtttttctttttttttctgatttcaggggcacaagcaatggctggctgaggtccaattcctaggtgttcttgagcacccgaatctagtgaggcttgttggctattgtgcagtggattcagaaacaagcaagcacaggctgctggtctacgagttcatgcccaacaagagcctagatgatcatctgttcaaccgagctcatcctcccctctcgtggagattgaggctgcagatcatgatcggcgccgcgcggggcctagactacctccatgaaggcctgcaagaagttcaggtgccctccaaagcattgtcctcctctctgaatccataaaactcaaaatatagatgcctcacaggatacattgtctgaattctgaaactctgaactgaaccattagtttagcacctgcggtagctagtagtaagccttgtcctatctgaattctttaatgttcaagtatgatatgatcaatctggcatcttcccaatatctgaattttgaactctgaaactctgagctggaccattagtttagcacctgtagcagctagtagtaagcattgtcctatctgaattctttattgttcaagaatgatatgatcaatctggtatctgtcccaatatctgaattctgaactctgaaactcttaactgaaccattagtttagcatctgtagtattgctactagtaagcattgtcctatctgaattctgttaggttcaagaacgatatgatcaatctgaaatctgtgccaaatatctgaattctgatccgtagtttcttagtctggcaggtgatatacagggatttcaaggcagccaatgttcttcttgatgccgatttcaagccaaaactttcagactttgggctagcaagagaggggccaactgaaggaaagacacacgtctccaccgcggtaagtgtaaaatccattgcgaacaatcaattcatcccatccgatccatgagcccgagtgatgatgatgatgatggcgatctcgccggcggcgatcaggtggtggggacgcacgggtacgcggcgccggactacatcgagacggggcacctgacgaccaagagcgacgtgtggagcttcggcgtggtgctgtacgagatcctgacggggcggcggtcgctggagcggagccggccggcggaggagcagaagctgctggggtgggtgcgccgccacccgccggagagccagagcttccggtcgatcatggacccgcggctgggcggccggtacccggcggcggcggcgcggcaggtggcgcggctggccgaccgctgcctcgtcaagaaccccaaggagcggccggcgatgagggaggtcgtcgaggagctcgagagggtgctccagatggagccaccgacgacgacggcggccgacaaggacggcgaccgccgcctgccgccggcgaagaggtgacgtcagatcagtcaccggaggaggctgcggtcaacgacggtcaaccagtgcgtgaggaacaaattgtggagagatcgatcattgattcatttgtattgtagagagagatgatgatcaatgcgaataatttggagcatgcaaagtgtttcgattgcacaagatttcccagtttgctgcaagatataatcttacagttctgtagagttcttatgaaaaacctataaatctacgtaaaccgtgtgaaattcgtgcaaaccatgtgaaattcatgcgaacttgaggggaagtgggaacattcgtttctacgcacacttttgaactttagggaaagtaggaacatataatgcatagtaattcgtttctaggacacttttgaacttcagggtgttttttagaaagcttttctcaaaaacttgaataaaaaaatttccccgaaaaaaaaagaaaaaaaaggtaatcccaatcctgtggagaggttgggccggccgacggcccaaatcgcaatggcaaaccgatcggcccaacacatggtctccccgtgggccttaaccccaaaagcaagcaaacccccctcgccggcgaccgcctccctgggaaaccgacgcatccgccgccgccgccgcccggctccctcccgcgcttcgccgcttcagctcctctcgtgccagcgatgccgccggcgaagaagatcacgctcctgcagacggtggcgttcgccggagtcttctccgccgtctcctgctggtaccgtgattgatctgtatactatcccgtcgtcgccaaaatctgcgtcccgtaggttagcagcgtcttagatttcattccacccctctttcgccgctgcaggtatggattcatgtttgggagggagtctgcgcggcgtgagcttggtggaatcattgaagacctccgcagcagcggcggcagtggctgctccaccaactccgcggcttcccccgattctgacgctcattccaaaccctagctcggtatgctgctttttttcttttgagtaaatttcataaaactacatgttttatgattcaagtcgcagaaaaccacgcatattttgacacttggcacttaagtacatatattttggtagtttagtttcacaaaactacactatcgatgaatagattcacccgtgagatgacgtggttgttccatctagaatgaggacgtggcatctcattaatttcgcgcgatggctggtaatagaatgccatgtcctcgtcctaggtgaaacagccacatcatctcgcacgtgaatccatttatcgatagtgtagttttgtgaaactacacaaccaaaatatatgtactcaagtgccaagtgttaaaatgtgtgtggtttttttttgtaacttgaaccacaaaacgtgtagttttacgaaatttactcttttcttttcttttcctcgagattcaagagtatggatatgcctaaatgtgctcagatttttcggagtgatctgctagtaatgtcaggggtgatctgtgcatcactctttgggatagggtatttgagttttagtttttttgtataatgcctacatagctctactaagacacatatatggactgcaataacaaggtgtagatgcagtaggatctaggttttggttcattcatgcttgctgccttttgtgggtgcgtactgagtagtgagcctaaccaattttttgctcttaatttagcaatatgtttaggatgaaactacaactttacatggtaacattttgaactgggacctaagggcttgaaaattaagtttgggataatggcattgtgatggacaagcatgggaatataactacatacaaattaggatctaggagaagaagttcaatcaagttgggttttgatatgtgtgttcttgcggccaataggacctcaaaaactgaaaaaactcagacttgtaagaacaattgcttggtaattagatctaaggtttgcttgtggttatgattattagggtggtaatttgtatgacttctaaaaatcactaaggatatttgatgttcatcatgttaggttagggttactccagcttattcaacataatattttgcttccataagtgatgcagattaataaagagtaaagactgctagagtttacagaaagactaatttggtcacttttttatgtttacgaatcctgtttcacaatatccagaacaagaatgtatgttcatcataaatgactaggtgagatatcagaggagatttttagggaggaactctgttaaagatttaaccaagtgaacttctgttatcctgtttagtaggtttctgttttaccatggctgttcttcaaatgcctgaaaacaagttatgatttaagggattttaggcttctctatttgtccacaaatctaagggattttagagtactactttctcaatccatccaaccactgcatttattgctcaccagtagtttcatccttaggcgtgatctttcccaatcaagtaaactcctagaggcatcgaagtaattccacctcaaccttaaactctgctaaacaacctagaatccatctgtccatggctgcctacacaagcaagaataattttagtatgaacaagccatccataggtcgagagatatcttgtaagtacctgcaatcttttttctgttctatgggctgtacccttttaaatacagatcttgtcttcaggacaataatttgatcttactcagtttcttgtgtagctagtggagcttgggaattttgttctgattcatgctctgtgtaccttttgtcatctttcttgctgaagtgttttcctatgtgcttgcttgagcttgccagttggacttgtatgttgtaattgccacagcccacatgctaaagcctttagagatataagttgccactgttatgatttggaccattgagtgcagatcaaaccggcatggttagcggcttatcaactagtaggttacagccttacaggaatatatactatgttcccatggcccatgttaaaaggaccttttagtctttctagtgagctacagctgccttatagaaattcctgctttggaacttggcctttggttaggaaatggactagaatcagggaccgaagcatctagttgcttgttcatttagatctctgaacttatttgaaaattctagaaaaattgaccatgttgtggcaatcctagccacagaaatccaatttgccttatgttccttggataatttcatgattatacaccattttgaacaaattaaaacagctgaacagtgctgaaattttctgctctggataaacatatcagttcttatctacatcgttttctcttggattagaaaggagcttgactgggccagaattggatgggttggtactgaatagagcaatcttgtgttacctttttatcttttcccttttggttttggcctcataatcctaaaagcgcatgattgtgtcctgctctgctgttattgtttcattgttcatctgttatatatcaacatgtgtaccactaccacattaccatatagtttgaaaaatcttctagctaacacgattctctcatgctttcttcatacctctcttttagcatacactaagaactggagttctgttgtcaacacacacatgattaaagactgagagatatatgtaagttagagaaactacaggcagtaagtaacctagttaaatctgattacagagaacgcgtgatactttctgaaacttctagttcttctgcacagtgctacagaatcctagaatgggactaccaccaatgaagaaccctcaaatgtccctctcttgaggtgataacaaggccaaccagagataaccacttcataagaaaaggtttgaataaagaggacatagctatcagtagaggaatctcttgctctttaatctctctctttctctctctctctctctccctattgatgtgcactttcagtcctctccttttcaagcacttgatacaaccttgataggctctcttgtccttctcatggtggtgagctcatgtcaggatgggcccttgactttgctcttttcttgcagtcacactacatcttttggaataatctccagtgccgtggcactatgcagaattcgcatatgtcactaaatataaattgtcaatggcccatcgatttgtgatctagctctgaagcatccatgagaccatgacgcattccgtaaccttgtttagttgtatctgcttctgggacttccagtaaatatatggtttcttctcctttcttttgtgtgtgtttgttgagagttcattgtcttcactcattggctactaggatgtcttgaattagactattttggattatgcataagattaatcagttgcccccagaaaaaaaagagagtacaaaatgggtgtgccacttacctattattttgctgctaatttgtgcatggaattctctagtcaaaacccaaaagtgcaactgggcaagtaataggatcatgaacgtgtgttagttttgttccattatctcttccggcacaatgatttattgtgttgactgccaaaacactggaaaattactctcctaggatttctttggaaaaaaccaaaatgacgtgctaaatagtctaactgatggataaaacatgatgtcaaagggaagaaaaaaagtgcaattagctagataagacatcaactctacctctgcccatgttattgattgctctaggcgatgggacgtaaagtgtcctctctgttttagttttttttggaacatgcaagtcgtgatcatgaaatggctggttggaacatgcaagattgctctctgcttaatcagtttgctgcaaaatgaaggcaacatgatgcgtatatacgcaactttggtatctcgtaccaatagtaccttgattgcagaaatatcttggtgcgatgatgagtcatgggaaagtaaggacataaaacactggcaaattggatgtgaagtccgggagagaacatgactgtagagtggagactagtcttccaacataagccttagaaaaagtgaccaagttgtacgatagttctatgataaagttagttggcatcgcccggacttgaaggccaagtgtactgtgccatctccatccttagtttgttgcataataatcgtacttaagttgatcaagaaatgaaaagtgagaagagcaagaacttaaggaaaacaagagcaatcttgatctcataatctctcgtagcatacaaaatttaagttgatgatttgtagtagtatgtacaaaacgaatagtacatgcaagttaggagttgctcctggtaacatgcatggatgaaacagtctctatgatctgcacacatatcgatcagaccacgtccaagattacaagttgttcatacaacatgtccagttattcatctgataatctctcaccgtagctgttgctgcaattaagtggtaatttcatatccctgcagatctctcttccatctatctgaatatctcttgtgtagaagagaaattaacaaaccctgcatatgtatatgcaactatgcaagatctgatcccaaaatctaattaacaatttaccaatccatggccgtagctagcctcaactgatcacacatggaaccgtgtgaaaaccacaaaacaaacaaaatgaagatggcaaaaaaacacggatctatgtaatattccatggatctacaactacctaggctacatacatatatatatgccaatccacactgtttaatttaactttggcgtttgatgatgatgagcgatgcgtgcatgcatgcagttgatcatgaacgcagcggcagattcatctctcgaccatgttagtataggagtacacaacactagctggtggcggccactggagtgcgtgccgcgaagttggcgatggtcggccggcggtgcatcatcggagacctcgccggcgccgccgctgctgcctcggcggaagccggcgccgccgacgaacggaggcgatggcggcgcgccaccgcctgcagcgcctcgtccatgtccatctgctcctgcctgcagtcgtcgctgcagaacgctgcatcccctctacacatgcaaattaatcaagatcaattccttgttgaactttgaacacacaaaatttctgtgaaatttattaaggatatatatcaattgatttgcgaactgaattacctgtacatgaagatgtcgcggtcgccggcgatgctgctcttgcagaggaagcacgactcgaggaagtggagacggcggccgccgccgccgccgccggcaccgggcttcacgcggtagaacctcgacgccacctccacatacctctcctcctcctccatcgccggcggcgagccaccaccggcgatctcttccatctctaatcaactgcacgtcgtagctaatcaaccatgcaaccagctctagctagcttattaatttagctagctagacatggtgatctcttcctgtcttgtatcgatcgaacttgcacatatgtgtgtgtgtgtcagtgtattaaatcgttaatggtcctctcctggtagctagcgagtttgttggcagatggaggccaaatgcaatgaaagatgtgtgcatatatatgggtatatatgagcattttgtttggcacatagctgattcgagggccgaaggtttgagagaaaaccgtgggtggagtagcaaatgggcccttggaacctattggctggggctggatgtgtgcgagtgaccttggcctaggggggactaacctactctgcaactgcacccaacttgcagaaatatcatttatatatgtattcatataaatatcacaacatcaattaataatgcaaaagtaatcactctcctgtgcgtggaaaatggaaccagattactgattagcagtgttattaaagtattttctgggtcagtcatgcgagctctgcaggtgcttaacgacaaattaagcttttataaactctgcctttgatccttgcgatagaaaaatgttttgtaccacatcggccagcgaggcggcatgggcacggcatatagccgttctcatgcggcatccgtttgtacgaccagggcccatcaccatctctcgctgcatttacagtttttttgggccaaatgtagtgatccatcttttggcccatataattcaacaaagagaggcccatgtgattccactgccccatgagaagcgctgcgcgatgcattcgcagatttgggccgtaagttgggccacggctatcattttgggccaaatttggatcgcagaccagaccattggtagcgatcgcattttgggccagatttgggttagtatgttttgggctccaatttcaatttcgatttgaattgcaatttcgattttactatagttaaaacttcgtcatatgtaaatatatatagcatcattgtaattacacggtaactttcatataatttaatccgttaaatcgtagattcattttaagattcgtgcaagcgagaaaggaaaaaaaaatcatagtgtccgtacgtacgggtgagggctgctcgcttcatgaaaatagtgggtttgccgtacaatttttaaaagctacatataagtacgttatatgcaatttataatacaattacattataattatagactatattttacatctataaaatttttaaagaaaattttgtccacacatatacaggtagcgtgtgacgtgtgcgtctccgactcctccggccggtccatcgcatcacagccacacatcacgccgtagtaggattagccaagccaagcgataagccactcatttcgtcgccgtgtcccgcgtggctcgccgccatggacgccgccgtctccctccacctccacggggcgctcccgctccccgcctcgcgcgcgctccaccatctcaacccggcctcctccgccgccgccgccgcctcggccaagcagcatcagcagccgcgcgcgcgcctagctgtcacgaccgcgcggcccagcagcaggacacgcgcgcgcgccgcggcggcgtcggcgccgccagttccccctgtcgttcatcagcagcaccgcctgtcgtccagccgcgcggcgacggggtacgcggcggcgctggccgacgcgtcgctccgagccgggacgctggccagtgccgcccgccacgcgcgcgcgctgctcgtctcggacgccgccgccgccgtcgacgttgctgaggattcgcgggtggtcgcgctggtgaggatgctcgtcggcaagggcaaggccgccatggtcgccgacgtcatggccgagttcgtcgccatctgcgaccgcctcctcctcctccccgcgcgcccccacgccgccacctcttactaaagaattacattactctgtcagactctgctacgctgcaattaaacctcgcatgttcagaattgctgcttgttcattgcaacacttgcatattgccaattcatttctcagtaaaatatcagcttaaatctctactcttttttttttgtcgggccatacatgctacgtcccaaaatatagtaatctaggatcggattggatatatctcaatgctacgaattctagattgatgtattttagaacgaatggagtaatttacataatgttattcctgaatcatcatacatcatgtaccatgaccttcaattctaaatactacctccgttccaaaataaatacagccgtggatatttgtgcccaacgtttgaccgtccgtcttatttgaaaaatttgtgaaaaaattgaaaatatttagtcacacgtaaaatattattcacgttttatcatctaatagcaataaaaatactaattataaaaaattttcaaataagacgaacggtcaaatgttgaatgtgaatagtgcataactgcacttattttgggacggagagagtatgttgtactgtggttctgcagttcttctgctgcaaaaccgctgccaacctctaaataattcagggaccttgatctttattgcacagaaaaaatttgaagctagcaagctgtttcatctgtcacagccttggggtttataaatgagttcacataataaaaaggacaatcatatattggtttggatgatgcactagccacattatgcataatgccaaactcataattctcaatagaataattgagtcataaagttgtggttgtgcaaccaactgaaacaggaaagcagaggaacgtgagacgccatgggagattgacactgccgcagcgtgatggaaggtacgtagtagcagttgagaacctgtactgtatattaattgagcagttgaatgatgttaacgcacacgtaatccatctctgcaatgtactacatattgattgagcagttgagctataagaatatatatatacagtagcgtagcatgagctgcatatccctgatttcattggattaacttttgtgcttctgtaagacttgacaaatggagtatcttttagttgtatacatacgctgctcatacactattgatcctatgaaaactgacataaggcatgattcatgaagcacattacaagcactaattgatggatatatgtatgtacgcgagtgcaagttcatgaaaggaacgatcaatcttgaaagagtaacagcagtgctccctttgcttgtgacacactactagcttagctattagcacgtactcaggtactctacaaatgaatgatgaaagggagagtacatatatacaggagcaagagagccacaacctgtctaccattagtaattagtaattaacccccatgactgacagccaacaggaactgatcttttcaatcttgttaagttaattgatttgccgcctccgatcgaatccattaagaaattaatggaaagacaatatacatccacagtaggagcaagatcaaccactctcctctacatctccaatctccatacgccagcatcttaattactctacaataatcaatcaatatcaacgcatgcataccgcatacgtgatctcagaagaaaggtacagctccatataagcacacaatacctcgctcagctgtgcatagtttgcatattttgatcaatcaatcaagctaagcaagctagtgattagtccattgatagatatcgatggaggaggaggattatgtgttcaaggtggtggtgatcggggactcggcggtggggaagacgcagctgctggggcggttcacaaaggacgagttcttcatcgactccaagtcgaccatcggcatcgagttccagacgcggacggtggagatcggcgggaagcgggtgaaggcccagatctgggacaccgcggggcaggagaggtaccgcgccgtcaccagcgcctactaccgcggcgccctcggcgccatgctcgtctacgacgtcaccagccgccggagcttccaccacgccgcccgctggctccacgacctccgcgcccacgccgacaactccatcgtcgtcatgctcatcggcaacaaggccgacctctcccacgcccgcgccgtcgccgccgacgaggccgccgccttcgccgaggaccagggcctcttcttctccgaggcgtcggcgctcagcggggacaacgtcgaggaggccttcctcggcctcctccgggagatccatgccatcgtctcgcggaggtcgctgctggagatggacggcatcaacggcgacgccgccgccaacgccaacgccgcgctcatgctcaggggcaccaagctctcgctctccgacgagctctccatcatggagaccagcgccatcaagagagtgagcaggtgctcatgctcttaattacttactttagacgtcatcggctcatcgccatcgagagagtactcatgctcttgacatcatcatcatcatcgcaagttcataatatacatggatgacagatcttactgcagaagctgagacatcttggtttccaagacacataattgaagggaaaagtatatattaattcagctcttgggtgacaagcaagcgttagtttcatctcatcgtgtatctatttcaagtcacagcagagtgctccgacaaaaaaacaagattgtttgtaaaccatgcaagcgggcctttcttttcttcgttatgtatagagtctaccctaaagtagtttaattaaattaaaatacaaggtgatgataacaaatttcacagaaccatagaatcctgactcgggccatataattctgaatttaacttataacatcagtgcaaagcattgccagctgccattaacttcaaaaaccagcgcagcctcgcgacgctaaatgaatccatacaaaccctgaatcttgcaagctgcattagaaaacctaacgatatcgaggtaatgcctgcgcttactcctttggattttcatgagatctagcaaaaggattagattaaggtgaagatggctcttgcggttccgactgactgttctgaactattcgagacatcagcttagatatctcaaaaattgcgctctgtacctgatcgtcttctgaatcagagggccgaatccacaccggtgactgcaaccccgtagatgttccattcgcggcccttttcccctttctagacgttgataaagctttctccagatccgattgcctcaagggtcttggtttctgaaccagcaatcaggaggcaagatagtcagaaccaacatgtaatgggcaataatcaatctgatgttgtttcagttattactgtatcattaaagtccaactagaaactgtaaatgaaatttgaccatgaaatccaattaaacagaatcagcggctatgctggcacaagtggattcatgcatgaggtttgccgttcgcaaggtcaactggtgtagacaaacattacccaaaggaagtaataatgaactaattaatggtggtagtaatactaaaaaaaatcagcagtgaacacagtaagcaacaagaaggaatgaatactcacatctgcttttcgcccatctttctcattgttcaacagctccctgatagggtagaatgctgcttgcttgcacagttctagaatgtctgatccagtaaatccctcgcatagaccggcgatgtaatcgtaattaatgttaggctcgacattttctcccttcaatacaaccctaagtatcttgcttctttcactctgaacaggaatcccaatttcaaatatctgagtaaagcgcctgaggatagcctcatctagctcagagggtctgttagtagcagcaaggaccataacacgggcattttctgcaaagccatataaataaatcataagatgttgcacaggagtaaccaggaaacttgtttgctagttacaaaataagttgctccctatgtttgaagagactatgtctggcaccctaaataataagacatgatcaaaacaaattacgacagttgatacatcgatttctatttcttgagagagaagccatgtgacggtccgtgtattgtaaaaaaaaaatcgttttctcatgtccagcttagacataattagttatttcaagaaaaaaacaaaagctaaaaagattggaaaaaggtccaactcaattaatttcgttgaagtttatatgtgttgatttcaccaatttgacattatattcagattgcatggtaactctatacactaacggtctgccactttgggtgcatggttatcacaagcaattgatcagattacaacaatgcccataatagcagggatatgtggtaactggaataattattagtactaacttccagttcgaaattctaaattgtaacaattgtttccccttatgaaccactgccacctgtgcctgcaggcagcgattttcaaactttcttataaaaaatcaccccaattaacaatattgtgcacaatacatcattgtatgtttgtaagataacctatctaacaattaacttacataacttacatatgtttgaactaatgtgcaaggtttaagaagaatattctgtgctgaatgccaacaatgaaatatgaatttgttcagacttcaacgtaacaaagcattaagcatgttgatattctaacataagaaaacttgagcataaaattgaaggttatgagagataaatttatatataggttggaaatgggctcaagtttgatacaacacggaagtaaagctttggacagcactgtttagcaagaatccatatgcgatgcaagaaacccgaactaaatagcatatcgatgtcacaatgcacagtggaatgtcatgcggcatcataagcgagctgcatagtgcacttgtgtgttgcaacatactttttctcttaggtaatggagcacactgaacagtattccagactatacatggtctttttgatatatcttatatctactaatataaaaatcgaatgtagatataagtccgcgttgtggggaatcaggggcatattgagagaacgagtaacatggaattctagaaccaaccctcgtggccgccaacccaaatattcaaagtggcaaaggtatatcattacataataaagagaataggatatttgcatagttactagcaatttggacatggaatatgttcatgtataagtttgaagcagagtgtgtacttacgatcagtggtgaagccatcccagagggacatgaactcagtcttcatattagtcatagcttcgtggtccgttgtccgtcgctggcccaagaaactatcgacctcgtcgataaagataatagccggctgcagcttgtgtgcgagactaaatacagcagacactgcaagatgtttcataaatcagcagcgataacaacaaacaaatgaaaaggagcggcagttaaaccgaaggatttgcgcgcggagctgaccgagcttctgggcgtcgccgaaccacttgctcatgaggttggaaatcctgacattgatgaagacggcgcctgactccttggcgatggccttggcgagcatggtcttgccggtgccgggggggccgtagaggaggacgcccttctgcgggctgaggagcttgccgaaggtgaagagctcggggcggcggagggggaggatgacgagctcgtagagcgcctgcttgacgtggtcgaggccgccgatggaatcgaactcgacgtcgatgtggtcggggttgatgacatcgcaagcaatcacatcctagggtagagtgagattgcataggtgagagaggagaaccctagaatcgaatcgatggattggggattgggggtggaaacaatcgaacctcgtagggggtggtggagacgagggggcggccgaggcgcttggcgatctccttcttgtgctggagggccttctgggaggcggcgcggttggggtcgagctggcggaggccggcgaagaggacgaggcagctgagggcggcgctggcggcgtagagcaccagctcctgcacgaaccgcgacgactccgacgacctcatccaatccaatccaacccaatccaatccaatctgcgggcggcggccggcggcgagggagggaggagggagaggttctccccccacacaccggatggatctgcggccgccggagccggagcgggaggaggggaatcgatgggatgggaaaagaggaaaaggaagaggaagagacgaagggggattagtcggtttatcgggaaggcgtcttggggaaggggtttgtgttgcctttgcctctcctccgatgcttctggtctctcgtctgtttgccgcccctcaaccttcacggaaacgagtcgccttgggccattggattggattacgattacacctgtccttttttttctcgaaggaagatcacacttggtctcttattccgtggtagattaatagttaattaattgtatgtatccttttttttatcagaaatacaacaaaatggtagtactccctccatccacaaaagttacacctatttcacatttgatttttttttcaaataagttgttcctatttgtagtctttatgcattcaagacttaaatgaagagataaattaaatgttttattagaacccaaggagtcatctaaatacttattagttgcatgcttgtattcactccttaattttgtaacattcaaggtgatttaatttctccttagtcttggtgttaaaagtaatatgtgtaacttttgtggatggaaggagtattacaattcaacgagacaacttacatcatattgaatctgatatctatatggtatcatatttggtatcgaatgtattagatcggtatctacgatatcgtgctgacatcaactattccgttacaaaccgttctgaagtctttctcttattttatacttctattttatgaataggacagtcaaaagtttagactcgtagtattatatgcatatataatagtctattcaagtatttttgtacatttactatatattttaggagaatagagtattatgtccttactaatactactctcatgtaacataatagaggtgtgcagagtatattttgtttgtggtcttataaaaatttggcaaggataaaacttgaaaattatgctcccaagttcagattttctacaggaataacatcagttcgagcgattttgaagggagaaaaaaaaatacagtgtcagagatgacactgggccggccgacgacaaagatgcagatgtgctccacgtcggcccaatatggccgtacaaccgaataaacagaggcccatgtccgctcacgccatctccaggacatcccgatgggctgattgggccgtttgatctccaactgcaccggcctagccagcaacggcccattaaacgccaagcataatcagccgtacagcatatgctgcatctgtgtggcgtgtaacattggagaactaggaacataaagctcatgctactgccatagcaataagtagcatgatagagcagcatatacattttctggacaggaacgaaaagaacaacaaaaacagaatcctaagttagttaggactcccttcgtcccattttaagtttatccataattattttccgtgtataactttgaccgtccgtcttatttattttttttaaaaaaaatttagaaaaacataagtcacatataaagtactattcatattttattatctcataacaacaaaaatactaactataatttttttaaaataagatggatgattaaagttgggcacggaaagttgcacttaaaatgtgacgaagggagtagtacaaatttcccatatatatatatatctagctactgcctagctagtagcttattcgatatgcgattattggtctacttaattaattggtccagtacaatgctgatcgaattgaattgaacttttaaccacaaaccgttatggaatcatataatcattcaagctagctatagctagagtacatatgacattactgatcgcgtactgcattcgatactcgcgaagacgaagaagaagaaaagagaggaaatcatcatcttgccaattggtcgatcgagaataaaaacggacagacgcccagacaggccatgcaatgcgacatgcactctccaaaaaagcagttcgatgtcatgtatgtaaggacaaacagctagcagaccaggggaagaaccccatcatttgcgtccatctagctagctaaccctttgattgccagccagccaattaactgcctagctcttgatttcttgagaaaataaacaccatcaattaatattaattgttgctttctgaaaacaggttttgctgctttctgaaaacatgttttgttttgcatgcatgtatgtaatgatcattaattgcaatattaattccacgctctctcttctgaaagaaagaaaaacaagaatgtcacattttcagtaaaggaattcgctatacacgatatatagactgaaagtctctgaaacccaactcctgctgagaactgaagaattaaactactgtttaattaatttatcgcggattttaatagggcgtaggattgcaacctctctgatatagtacacgtctgtgatcgatctatttcagggtctttgcattccttttgagacgaagctagcgcatgcagctgaaacattgctaaactgaaaaggaattgtcaagtcagccagcagagcatatataatgcccgtttttttttcctgaggtactagtatcaagcgatgcatgcgttcgtgatgcggcgaaagcaagaatctggtgccgaatggagtacagattctactccattatgatcatacacagcctcctgcatgcaagaaattcacctgtaaccatccatgcactgagtctgatcgatgcatacatttcaggcaaattaaagtgtggcagcagcagcagcagcacgtagcagcatgcatggcatccagtgcaagggaagaaggagatcgatggacgagtgactcgtgagagcagctggcctagctctgaatgaatatactactgtatatatctgcagcatgctgccatgagaggagatagctagctctgaaacgaatatatttatctgcacacatatcagtatatatatatgctcgtgtgtgagcagtgcaaggtatggcagtttggcatcagagcgagcttggcatctgcatcaggggggctgcgtcgcatgcgttgaagtggcaatggcgccgcggccagctcgccggccggccagccggcgcagcagcgcaggcatggggcttcgtcctgcgtcgtggtcacatccatcaacttatcgatcgatcagtctctctgacggaaaaacaaatttgctttgcatttgccattgcgtattcccgtttctctgcatctgcatgcctcgtccgagaagaaagcgatagagattgcgctttactactccatgtgtgtgtcttctctccttttggtccacgaaaccacgaatatatttctggagtacaaaagaaaaaacatgagaaaaattggcagtaagatcatgcaatacccggccaggccaggccatggccatggcgtcctgcccctcctcgtcctgtcttttactgcttcgtcttctttccaaccaggcacaggcccagccggcccccccccccccccccccaaacacacccaaatactcttctctttctctctctctctctctctctctctctctctctctctctctctcaatcatgtccttcatcataaactctgcatttaaacttgtgtctcaactctgaagaaacagtagagggatggatgaaaagctagagaaatggatgaaaagaaaaggctgcactaactttctcaagtgtatagtatgtgagtcatgggtgcatgttccctctctcttgctagctgctgccatggatggacctcatggtgatcttttttcctctgaaacctttttcttggcctgtctgacagggtgggggtcaggcatggggttagagcttgaaaatgtgcactgattacatatagcctttttctctaggattaggaaaggtttatatgtgtagactgtagagtagagatgccttttttgaatcttgaccatcgattgcgtggcggtcagcaatcatccatcccccaaacaaatgaccacaagcttctaagctagctaatcctatggttgatgcaaacaggcgatagtgataacatttctttcttggcttttcttaattacaagtggtatacatactcaagattagtctcaagtaagtgctccattcatggagttttataagacatatatattttaatcgtagaaagtcattctttattgattttcaccaataattcgtcgaattgtaaagtacatttactttataaaaactatgctggtagattcatatttcaaaatactttcacaaatttggctctaaagctattaggagaacattttatgaaaaattaaaaccaaatcttgatgttgaagactttttaaaaataaaatgtttcttatagttaaaaatcaagaaaccaccattgatcatgtgggcaaaggtatatatccatgcatcatatatctcgtgtatgtttgaaagtgatgatggatgatgaactatagatgaaattaagtgtttcacaattattcgagggctcaaacgaacgaatggaagattagaaagccaacaagttatttttttaaaaaaaatctaagaaatattgttaaagaaaaaaattgcaaaaaaaaatcacactgtttaattatttggagctaggaagcatgcacatgataatctagtggtataatcagaaaagaatagggtcatatatagtgttgacaaatctctttaattgtgttattgagggagttctagttcctacaaaatccatatgagaaatccaatttcagacatgcctaattaataattccatcagttgtaaatttcaacacattaggtttgtaaataatggaatagtagacaagagaagagaaagtagaatggaaaatgcatggatggtaggccggcttgggggtgggtaggtgaagatagcaattcttgtgggcagaggtccactctaactgccccaattaaaagaccattgatcccctcctccccaagcagccacagacacagccaccacactagctttggacacctctacctagctccatctgcaaccatatgcatctccaccctctccatttggaaccagaaaaccatggcttctcctgcatgctcactactcatccctacacagaaagctctagctgctgctagtttcattctagtaatgatacaaatatcaagagaaaaagtgagagtcaaatagaggtgtgaggtgaggaagatgctgcaggtagaagaagctgagagaaagatatgatcaagcaagcaagcaagcaagcaaaagttatctagctaaagagggagccttttcattttgaggggaatgttgtctggctcggggctacttttaatttctctctcttttgatatcttcttttctcgatctcctagcttgatcttttgatctctcaaatcgatcttaagaaaaagatcagtcaaagagatgagagtagatgtctgtagatctcggaccaggcttcattccccccaaacagaagggctcccatgcatatcgatcatgagctagcttattaccccctgcttttgcctcttccaaatctgatgaactgggtaagttaactgaatattgcttaactaatcagctttttgtttcatctgatggatagataggaggagtagatcttggtggcatgaactgcatgagatgcagattggtgtaatgatggggggaaagactgcatgactgtacaattgcacacttatcagagctacttgggatctcttctcttctcttctctctctgcaataattagcctttgatgagatgaagggtgatgaggaaaaggctgtcatcattaaaggcctttgttccatgcagatcctatccttcatggttggaactagctagtctgtattcatcaggtacaaataccttgcttaatctttcttctttcatatgtatgttcatctgatctttacctttgcttgggtatcacaactcttagctagcttgactgatctaaaaaatgcttttttttttatagtttttggtgatctatttttcatcttcgtttttcttcatgttctaccttgcctggtaggataatgaaacatgaagtacatatatcatgctctgtagtacactccgggagaaatatatggatatttacttcctgttaatttgttgcttggagtagatctagagagaaaaaccaactctttgcactgtgcgtggattctttacctttttctccttcaatttttgtctctctccaaataatgttgcattgggacatattaatttgattccagtttaagggaattaataggtagctagcagatttccatttatactttggtcactgaggttaattaattaattgcctataaattgttccgataactgattcacactgttcaagagaaaaggcaagctagattcatattcttcagagtaatgctccggtgcaatctacttgcagtattctactccaagtagaataatcttgaccgtttattttaaagagcaggtaagtaatctcctaatatcgtttaggggtaattttggcatgggatgttttcttctgttcgcatcgtatcaggtctgaactccgttgcacgcagtcacctcgctattcctcccccggcctagccgccttgtccgccccctccgtcgccatccgtattccccgccgtcgccgccttgtccgcttcctcagtcgcatcgtccgtctgggagcggacgagtgtggtggcgtccgagcaagtgacgatcttgagcaggagttctggcggtagtaaaaattccagcctaggcttcggcggcagcgtcacgcacgcacgcaatgtcatttgcttggcagcgtcgtctcggctcattcgtcttcttgccgtttccgatcactgtgttgtttcatggattacatggatcgattaagatcttgcacgaccaactccgacgaggatgacatggtgatcgatctatggatcggaaaacaataataccccttcgcgaattatttttcctagacaaaaacacccctccacatttcacttccactaattctggtaggagtaaaactagatcttaaccctacaattaaatatgatcaagggcctagattactttttactccgagtagaaagcaccagagtaggactctattcttcattcatggtcaaatcatgacaagggtttgagatcagcagagcagatatatctttattaatttttggtggtaactatatataatttcagctaaaccggccaagtagttaattactgtgcctttttttttctcttctgtttactttatgatccagtagctaccataaatgctgtagaaagaatatactgcaaagggcacgtagatttttaccttctaataaatgaaatggaactgcgggaaactattctaaactctcgagtggatgtcttctcgttgtgcatatatacgagatcatgatcttaccaaacaataacaagttcatatataagatgtgcatttctatgacaatatatatactacatattgattttttatattaatttgcaagctacattcatgctgatcatgatgatgagatttaattttgttcattcaattcttagaacactaatcaaaagtaaacatcggacttttgattaatctgaaaacttaaatattatcgatatagctacagtatatgtttgtcagggcactagctagctgattctcgatcagctagctgcaggggagtatatttgacaccagtgcattggtgttggtgtaaaccttgttgttatgtatcaactctgagttgtttcctgtttgaagccttgagctctagcttccccatacagtactacacccattattttttgtgtcgagatgctcatacattgagttatgtagtgcgtgctgcatgtacaaaatggtgtttccagtgatcccaaatccctaaagattctcttgttatgttgtacattgtctttgattgctatagtagctcttaagttttaattactccttttttataattctttcaggatctctcatgttcaaatgttttcagaaaaaggaacctcccttttgcctctctgttggcagttttgctctcctttttttcttcagactgttagctgtactagtgaacatgtatatagttcttcataaaaaaaaaggtaatcccttttgtagctattgcaatataatatgaatcaggagtggtgttttaattagccccatatatacatgcatgctagctaggcagctataacagccagctaatacgtgtagttgcaaattatatatgaaatcaattaaagggacgctaaatcattcagtccagggaggatgtatatataatcgatcagaaaaattaaccaactaattaatctaatatatattgattgcgtctatagatatatccacatctatctctcatttcagagaggtgataattagcgatataagtgtacaaaaccggttattacgtctgacaaagagaggttccgttaattgcagagaatgactcgtgtgagcactgaccagtcaaagcatgtacagctcgttgagtagggcacacgtgtgaatagatgcctttgcatgcgtcgccatagctacttaattacaattataatagtgtagtacatgattacatctaaattggtaacctttctcctctctgttttgtaaacaagtacatctacacgttgacagcagtaagtgcgtgtgtgaatagtgattcttaaaaaaaaaaagactactgactactgcatgtatgagcaacaggactggtgttttctcaagttggtttgattgagtatgcatttgtatttgcagataacaagtggattccacacgcatctgttaagttatatttacgtgtaattattttacgcgttcgtgaaaaatacttggttttctttgacagatgattcgctggattattgttatagcggattatctagttggttataagaaatctaaatattaaatatttttaaaaataaacttatgaactacttcctccattttgctttaactttttctaaaatcaaacttaattagttttattaaactttacgtatgtttgtttgatgttgaaaatatatattgttatatttttctatagttataattaacataaaagaaattcaaatttagaaaaacaatgcatcttatataattaatgtggaacggatggagtagtttataataagtgatctaaccaacatagtagttttttttagaaaacatatttttagaagcgtagagcaaataatctacccctccgtgagaaaaaaaaagctcacttatagtgcggttttttttaaggacggagggagcgtacatcaataatccaatgaagtagtccctctcttaaaagaagttcaattcagaggatgaatactcatccctaatattgtgtttctagagggagtagcgtaggagtacatatggatgatgcatgcaacactaatcagaaaatccattccataactatagactaattcgcgagacgaatctattaagcctaattaatccatgattagcctatttgatgccacagtaaacatgtgctaattatggattaattaggcttaaaaaatttgtctcacgaattagctctcatttatgcaattagttttattattagtctatgtttaatacttctaattagtgtccaagcatccgatgtgtccctgatccaaacaccacctgagtacgcagtagtattactccgatacaagctgtgtttagatctaggggtgtaaagttttgacatgtcacatcggatatacagacacacatttgaagtattaaacatagactaataacaaaataaattatataatccacctgtaaaccgcgagacgaatttattaagcctaattaatccatcattagtaaatgtttactatagcaccacattgttaaactatggcgtaattaggcttaaaagattcgcctcataatttacattcaatctgtgtaattagttattttttcgtctatatttaatactccaatactctatacatatcacgtgtccaatcattcgatgtgatatggtgtaaaattttactatgagatctgaacagggccatactatctgcgtacgttgatggcagtcttgacatgaggtatcatgcagatgctgagatgcagaaggaagcagtagcaacactcatgtcagaagccaatttttaagatgtgtgcatgcaacagctagcagcttccatatccatgcatactgatctggctgcctctttcatgtcaccaacacagttcatggctgttgcatgcatgcatccatcagctactccagccttttctgctttagttttgcatatcctatgcttgcatttgcatacgctcttaataactggcccatgaagcaatccaattcatatacactccagcaaatgtgctttaatttgcaaccgcagaagcaaccaatttatactaaatgatcaatccgcacttgtagatcgtttctgtttggagtactgaaaaacttgatgaaatatactgcacgtcttcagagtttcacagcttcagattcgcacagttcaatctgcgccttacggagatgatatacatacatctagaattgtatttatatttcagcactaaattgcagatcaattagtccacacatatatatatacgatcattagatacagtatgtgtgtaagtgtgttgctgaatataccgctccgtatatgacaagtaccaaagatgaaaagatcgaaaggggtcggagttttcttctccgaacccccatgaattgccattttctcttacaatttcttttagaggctctttaattttattttgtcttctccactttagttcggcccataaaaaaattctaaacacaagcgtacgtgtcaaaaaaaaaagaaaaagagaaagatcgctagctacctgtagcttgttaatcatcagaggcaaaagggattgtcttaatttggttgatgcatccagtaacactagatttattaatttgcacatgtacggcttacagaaaatggtgccgacgtcgttaattaatgtaagacgatttgctgatgtaaatacgtaaatttgcagtttatccaaataggttcggagttttcgtctccgtatcccctatggcgttctccatttcctgcagattgtatatattgatccttttcccttgcttgatttctacccccttagatttctcggattcatttgccttcgatttctcgaatatgttttcgccgaattacaaacggaagccgatcaatgtttaaacacgcgaccgattttcttctgcaagggggttcggagttttattttccgaacctcttgatctcggcagttttgaaatgaagccccgaagtaaattcggcccatttaaccgttcgggcccaaaatccttgtggtatggatcgatttgcctggcccagctaaaaagaagagggaaggactgacgcgataatctgtgccgcacatccttgatcggacgtctcactgagatccaaagggtcggagtttttttctcctaatcccctcggatcaccatctagctctccgatttagccattgagttaatccggcccacctaaagacttcggcccaaaaagaatgtgtgtgtatatacacaaaaatgaaaccagatttgcatacatgttaattagtctgtaaaatgtgtctgttatgttcgtctacgtacttatcagaacctaacgagcatgggcatgggcatgccgcccttatctgaacctgattgcattgtgtaactaaaactcttttttcttctaatatattaacgtgcaattcttttacgcgtttgcgataaaaaaaatatccgaagggttcttagttttcttgtctatccccttgaggcctttagtaaatttggcccgtttaaccattcaggcccaaatgcctcgtaaatggatcgagttaccccgattttcaaggcccatatgaaaaaggcggaaattcatgatacgcaaaggaccaatgtgaaaattttgtctcctatctaatctctaccgcacatccttgatcggacgtctcacagagatccaggggaggtcggagttttcctcaccgaacccgcgtgggcatggtaacgctgacacgtgggtcccagccgtcagcgcaacgggtgacttgcaacggcgccactccgagcgccgccgtcgccgctttctctggagctctatgcatcattgcttccgatcttttcctttttttttcgagaaatatcaatcggatctcgtccagtattttctcatgtttgcattcaggctcttacgtttcttgatttcgttcgctcaaatctggattctgcagaccagtctaaaaaaaaaattggattctgttgaatgaacacaggtcaatcagatctctaaatgatcgatcgatgcaccaagcttcaagttcagaatgggcaatccgatctacagaaggtactgattcagatttgagattcagacttgttaccatttcttctactagtaggtagttaggtaccctaccctctctgaacttctgaaatatgatccacaattgatagagagattgaattactacatgcttaattagctatagcatcatcatgatcccacacctcaacgttccatttgcagtgtctgtccaaaagaggatggaataattccaaggtttttacaacggtttattaaccatccaatattagtcagacaagaatgcacacctgatcatgcagagatatcatgtatgatcatattttttttcatgcgaaatccatcacccaaagtgctccaattatgcattgacctttagttcaaaaaagatctcccctactcccccagataaatcgaatcgacgatcatggggaggagaaaaggtgtcgtaatctcaatcggaacagttcctgcactgtatcagaaatgcatccgcgcgtcaggctatactccactggaggagccagcaagggattatgggctaaagataatcaagtaaagaattgtcactgttgagagtttgattgagctagtagcttaggcaggcagccatgatgcagatgcagtactagtactggtgtgctagctagttggtaaatggatggctgggagcttttgctttcctagccattatttccaaagttcagatcaaaggcgaagaccggcaccatccatggtgacaatggtcaggtcccattccatgcttaatacccttgctcattattagattgatctcccttttgctaccatatcgcaattgtcctttctggcaatctttcaaattaagcctgcagatttttgtccccaaagttttagggatgtatattgtagtactgtgcaagcaagatcttcagaattcagatatggattgagttcagaagctgctagcatctttagagatttgtatcttcagccagaattattgggataaaaatatttccggatatgctacagtaaaaataagcatcttatatgctatagataaccagagagcaaatttcattttcacggtttcgccaatccataagtaataaccactcaattacaatttaattagcatccctgcaatttactttcatgaagacaaacgcaacgttgttttgatccctcttctgaattctgtacggtaagccggccatagtagtcctctgtgtactttctgtacttgacaaatttcgcaaacgaaagaggtgtgcattgacaaaaaagactttatgctatacagttccaaagtccacatcctgaagagaataattccattttgttgtcactgaggctttataataatggaggccgcatgaggggagggctggatgtttgactaccacccaccatggaaaaaccttagctttctctatgcagataactttggctaaattattggagccaaagcaaagcaaagcaaagtgattgtgagtgacctccaagccgaccatactaatggttgttggtgtgcacggtggcctgcagtacaattcaggattccatctttccttcaatgtatttctagtttggagttctttttcagtaaatgcaaaaatatgatttgaaatcatcctgcatcatattctcacagtttcattctgttgtggaggaactgatggttacagcaaacatctaactaatttggactacctgtgtgcagagtctgaaaggttttcctgcatgatgcagtgtttatattcagagagttggagaaggtgtccctatcgacaagaacaaatttcatacttatgtcggcaaagacaagttaatatgctctgtattgatgctagattagcactagcattatgcaacagtttattggcagaagagaacgaatacataaagctcattattagtgttgaaagtagcagaagcactgcagctagctagtgctctatatagcctctaccacatcaaagaatcaaaggtagccttcatcagccggttcacgagccgttggaaatgatgcattgagtcccaaaagaagccatttaagaagaaaaagaaatcaacggtgccaaaacattaattgtgtcgggacataacaaacctgcttcttttccaatttgtccttgctgtccttacttgttgatgagatcgaatccgtggcttcagctccgtcctcctctgcctgcatctgcatgtccctactgagtaaacatatggactgccattagagtggaattaatcaagaaaaacatgcaatcatttgtagtcatgcaggttagctagcaaattttgtatgggtcaattattgccaatatatatatggtcataggtcataactagtctgcattgtaatttgctttgtcacctatgtacataatttaactatcagctagctataaatatatactttctctagttttaaaaagatggcgtcgttgatttctagacatatatttgatcgtcagttttattcaaaagatttatgcgaatatataaaatataagtcatgcataaaatacctttagtaataaactaagtcttaacaaaagtaataataattatgacgaatggtcaaatatatatatatatatatatatatatatatatatatatatataaattaacaacacaatctattaaaaacagagagtatgtaacaatctacatgaagaactagaggatatgatattctatatgtatatccaaaatatatatgcatccaggaatattgctagttattgctacgaccgtggtgcactcatacatggttaaagtagactgcaaatataaaattctgcgcttatggctgcatatgtaacacttacatcatggtgttatacagaggatcacacatatattttctgtacattggatccatgtaccatctcatgagacggacttaagcctagtaaccttatcaaccagtattcttagacactcacgattaggagtaacgtgctcataagttgtaataggtcagtctcatgtaagtagagatgggctataagtgtgatagattgggagataaaacattggatctggtgattacgtacatatgttacacgtgtgcacggtggaaggaggggagagaaggaagacgacttcgctattaaggtagtagagatattgtgtatatattctagtagtttttaataaaattttgggcttgccatatcaccgcctatgttgaggatacacacactacacgttgagtgttaggtgtaatatatgacgataacactcatgaaatcttatctttcttccatcatctataacctgtaaatatctttgtaagtttattgatgatttgtctaccaacacatagagataatataatggatatataaaatgaatattcatattacttagaattaaccatgcaaagcaaataaaaatagtatctacctaccacaacaaaataatgttacatatttttctttggataacatatgagtccatataacaaggcaatatagtaaattacacacgggtatgagcttttggttgcatgtaacatgtatatataccatgggttatgcagattgcaagcaatatgtataccacatgtattctatcgccttggatagatttaaggcctgcgaccttggtcatcggcgtctagagacttccattgcgtattttgctaggctttaaatttttttatgcttgccagatcactacttatgtcgtttgtgagagactgcacagatacaatgagcgagcgtttggtgtaatatgtgacagtagcatacacgaaattctatctttcctatgtcgtttataggaaccacagatgtctcctaaagttgaccggcaacatctctagtgagagatagagatatccgttactaccaggccgaggtaggtgtaggtgggtataataaatgtatgaattacttcgaattaacgaagctataagatatagatattacctacagtaaaaaaagatataaatattttgctttgaataatagagttaatatacaacatggtaaattgattctaactaattctaatatgtatggtaccacattctcaaatctcaaacacatggtgttctcactgacacttgtaagcacacaaagcctaggcaacaccagggcatactggccagctacactctacggagggatcagatgccctctccgctgtagctaatacaaagctgtagagttagtgccttgctctatctccaacagctagctacacacaaaaaaaaaacacatttcttttaaacatcccaaagagaaagctaagataaataattatttctggattaattaatatcactcctgaaatggtggagtaatatttatggggagagatatgacatttatttctcaccaggaaaatcagcagctgcaggaaaagaaacagtagaagaaaaaggaaatcaataaatcataaatagtaaaaaagagtaaaaaaaaaattcacagatagaaacaaaagggcgcagtcaccggcctcctcatatacacgcgcaccctacgctctcctcctccaccaactcctcctcgagccaagaaaccatcaagctagcgaggccacctcaccggccgccatggagatcccgccgctctaacggcggcgcgttcttgctcgtcgtcggagctagagatcgatcgaccaagctagcgtttcttcgattagatatagtcatatctatataggtagaaggatgggtgtgcacttgctgaagaggcagcagtcatcggcgtcggcggggggctcgtcggcggggggagggatgccgccgaaggggtgcatggcggtgagggtggtggggcccggcggcgtgggcggcggcggaggaggagcggagggagagaggttcgtggtgccggtgggttatctgaagcacccgctgttcgtggggctcctcaaggaggccgaggaggagttcgggttcgagcagaagggcgccatcaccatcccctgcggcgtcgaccacttccgccgcgtccagggcatcatccaccaccagaagcaccaccacggcggctcccatggcgccggcggcgccggcgccggcggcctcctctccggccacggctcgtcgggacaccacaacaacttccacatcgccgcctgcttcagggcctgattgagatgatcatcagatgatgatgcatggtgtttctttggctagcttctctctctcttagatcgatggattaataatacttagggttttaatttccttttggttaggaatttagtcatggtttgtgatgatgatcaaaaaggatcatgcatgcatgagcagatctgtcatgcagctgcgggttgttctctgttcatccttataggactctctctctctctctctctctctctcctagttaagttagattgtgatgatgatgatgatgaaaatggagatcaaaggatctgttcaatcaaaacaaaagatgttccctttcttctttttctttatttgtgaattccgtttttttttcaattttttgagatgatatatatggttggtagtattctctttctattcagaaagagcatcctttttctattcagaaagaacatccttttcctaatggttgttgatcaagattcatatatggtatagggatgaaaaaaatatatgaaatttcagaaacaaattaaacatgtctatctatatgttggcttccaaaagagtggagaaaaagaacctagctccatagacaagaacaaagagggccagctaactagctagatagcaaatgttgttttttttttctttcatctcttctaggattctagcttactttcttggttttgtccactctcagtactaaacaacaatcatcagaatttacttagtgctaagctagctactccagctgttagtgctactcatcgttattctctaaaagaaaacttactaggacaataaatcgcctactgatcgacaggcgccagcactacccaatgcattccaacacattcagagtttttagttggtgaaagttgttggtgaaacagaaaccgagaatgaacgaatggctaaatagcttatttatgataattattataggaagttggaaaatggatttgtaatattgtttagtttgaaaaacgtccggtttaatccattatccgttcatcacgaaggcagtagtgcaacagttgtcagagcttcttgtggcagatagacctggcactgtcagagatgagatgagagagagtgagagaagaatctcgagatggtagtagggagggcggcgccgcagtaggaaatggagaaggggatggatatgaacaagcaaaggacacgttgtttggccaaaaggacaggcagtacgagaaactgagaagcattgcagatcacacacacatgtaccgtacacattcagaagattcagacagataatctagtttaatttattttcttggtgattttctccccttgctaattactcccaccatcccaaaatataacggattgatacatgttttagttaattgcaaaactacctcttattatgatccactgaacatgccagattagattttttttttcatctcaacgtgcagtgaaaagtaaaagtaaatcaaactgatcagagtgctatgcggtcatcatgtttatgagaggtgtatagtttttagcattcccgaaattcggagaaatccaatccagatcattcccgaaattcggagaaatccaatccagatctagctagtggcaccaaattaagttttcacaaataattaagcaagaattgatactctagtactagcagctagttagtggtaggtcacttttggtgatcaatagggaaagagagatgtgtatgtgtgcgtaggtcagaactccatgtaatgtggagaatgaaatagaatcgtgcttgatttttctttttgaaagttgtgttcgatttggatctctccatagctgctattaaaaccctaggccattgatgtggcagcatacttgtcctcagagatgtcattctacaagctacacttcattattcattagtgttcatcatcgattaagcatgtgaaattaggaactagaatgatgttgaacccaaaatttaaggctatgaccggttgaactatagctgaataagctgtcaaaaaatgaatgacaaacataaataatttatgatttttttatatttatattattagcaattttaaaaataaggctgaaaaatagactatatatggtagaaaaacccaaaataactttcaaaattcaaattttggttgcggctaataagtcaacaagctgacaatgaagacctcgtcatccatccatatgtttcttcctttctttatgtactatattctcttcatgccttctctttccctattcataagaggtaaaataagcaaacatctactcacagtaaaacattcttgggcgatcaaggtaaggaaagaattttcttttaagaaaaggtgagaacagaatatcatcaattcatatagtaagaacatactctaatagtataccatctcgccgtatctaaaatgaaagaataaagagggatgctctatatttgccaatagttttattgacctctagaagtgcacatgagacacagtcgaatcgagtggtttatcgacggcaccaactactttttccttcgaaaaatcaccaattattgggttcaacacatcgggagaaatagaataaaactaaagatgattgaaacagccaatggtgttagtacaaagcatgaacagtggtagagatgatggaggggatacggagagcatccttttgtgtacggcaaaagaagcagcaggtggacaaagcgaaggccatagtttttttcttacaacaagacaaatgcattgtgtttttgcctgaaaaaaaggacaaatgcattgtaccatgcgtgatgagactatcttgtgtagtggagtattccatggattccattctggactcttccattcccttgcaatctttgcctctgccttggaatggcctccactgcctctcctttcaccacctggatgttgactttgaggcaatatctctgaattttccaggcttgtataaaaactgaacaattttcgactcaaattttataagtccatgaccatgacaatagttcagaggaggttccaatatattctttaggacagcttaattgagtcatgtatgggaatttgtcaccgtttgtataaaaaccgaacaatttcatctttttttggtctttgagaggagctagaatatttttagtgtaaaagctggtacctccgatatctaacactagaaaacgtgacacccatcggtaccttatcaacaaccgtaataaataaaaatgtaagtccatgacaatagttcagatgaggtttcaatctcttgtgcagttagtcatggtctcatggacttgcagtccagaagagtttgatggaaagtgctgaattcaagatgtcccttctatctaatttagtgtgtggttggcaatttataagaccagcttgatcaaatatcaatctatcatgaatgattgtgttaaagaactcaacaacgcgtcagctatagatagaagaaaatgaacggactgactcactaacaccctcgtgtcgacattaccacgtcgacctgattaagacggggtttcattgacaggtttgtattcatccacgttagttgcattaattctcatccaatctgatcatcaccaaacattttactttacaagtttcttcatcgtcactgtcagacaagtttgataaggtacagttcaaggacggttccattgcacggacacggactatctgttcctaatggcagaatatcaatcgatcagttaattctcctgtaaagatgctgtcattctctgtatatacatgcacaaaaatatattcagtgatcatgaacagtaacctattctttgcaaaatgctgataaagaatgagtttttctctctcttttttctttttggtttctgaagcagataaagtagggttgaaattggaggcttcagtttcaagttcaacgattgctgcttggttcatccaagctgatgacctagcttctttgtctgcgtctacaaaccaattagtaggttcaggctatctgattcatatggtccatttccatagatgtgaactagacatagtttttagctgaggtagggtcgcaatttggcgattggtatgaattcccaagagtatattcatccaaacgccaagcgagtaatcatcacctaaacaagtggttagattttttgaatcttgcttcagaatttggtacagttgttcgatctttctctctctttcagttttgaccttgtgaagaagtcgcaatatcatgcgtgccaaccttgtcaagcgacggtacttttgcacagtatttagatataatcatttttatttaagaaagagatggcattaagtacaccctttgtcccaaaataagttcatttgtaggtttctttgttcaatgtttgattgtccgtcttatttttaaaaagttatgattagtacttttgttgttattagattataaaatatgcatgaatagtattttatgtgtgacttacatttttaaaaaaaattatattttttcaaataagacggacggtcaaacattgaacacaaaaacccacaaataaacttattttgcgacggagggtgtagatgatataatcacttcaattgatagcaacgcaccaatcatatactgtgacctctagactaggaatttgggatatgtatgctttactgtgcataatctggttcagaaatttcagaagttcagatgaaggagagggagaggagaacaactcgaaagaacaaaatacaacaaaagacttgcatcttgtttcctgtgggctgaagcctgaaaggaccacatcttttttatgacaatgaaatcatcattaaaaacagaccatctttgattaatcggcccgtttcttttctcatcgaaatggtttcattaacgagaggaagtgagctccttcatgaacaactgaagcagcatcaccgatcgatcgagtaattctgattctaactgtaattctctcgcttgagtgatgatcagtttgacgcgatcgataggagagatcatctctgtctgacatttacaagtgaaccgagcacgatctgacgcggcattgcagctcacggtgacagcaacagagtaagtgggaaagcaatttggtgtataattcaattatataatactatataagatgaacagacaagtactcctactccctccgtaccaaaaaaaaaaaacaaaccctaggttttcgtgtcaacgtttgactatctgtcttatatgaaaattttttataattagtattttcattgttgtagatgataaaacatgattaatactttatgcgtgacttatcttttaaattttttcatatttttttcaaataagacggacggtcaaacgttggacacggaaactagggtttgtctttttttttttaggacggagggagtacgtcgtagtctgatgagatgggtgtgtgtagccatctcccagctggaaacacagtaataagttgcagaattaatcccatttccggtcgatttctggaacccatgaaagcgaaaacgagaatatgtactcagtgacagcaccatgagtaggacagcaaacttgttcttgtttcttcatctcgtcagtacacaggcagcagcaagatcgatggcgagagcagcatagagagaaaaaaaaaattctctgctccaatggcattgcaggttggagatcgcagcgatgatgatgatgatgatgatggcgatggcgtgcagtggatggagctgagttcttgcagagataatccgattccaagaccgtgtttggcacgacgagaattttgcgtgtagaactggacaccatgggagaaaactttgagatgtcattagtatctgaatagtgaatactatagtaagcatcagttttagttttgactgacgacagagcgtgtgatgaagatggtgccatgagcagaagggagttcgtagcaaccaggtgcttcgtcagagattcagaggaggatcacacacgaacgtggcgttgctgagatgatgccttaagcagcagcttcaggattcagacaattacccccatcgcaaacgaatgtcgcggtttgtattctcagcgcaaagagccaacccagttaccgaaagaaagtactccccggtttcaaaacataggacgtattttatttcattagaatacaatttgatcgataattagtccattatgatattatttgtgtgataaaaaaacataattacaagtatttatgtgatacaaaagcataatataagtaagtacttttgaatacgaatataataattttaattttatgttaaaaaatatatccagacagagtattgttgattgaagcttgatctaactaaagtggttaaggggctgttcagatttatgtcatttcaaaccataccattttttgtaaagttgctaaaaatatacatacattaaatttcttgctaaaatttagtaaatacataagaaatcctgacaaaattttgataatattgacaacttaccaaaatttggttagatttattttggtttcaatatgaacagccctaagagttggtgcacttcgctttgccatcttcaggcccatttgcaatgctgcaatacggccatagaagaatctccctttgggctctgcagtctgcaccatggctcgtttgcaacagaatatgaagaatgacagcttaagagagaagattcagctaacaaatgtatcgacaatgatgcattcatggacaaatgatttgtattttgtaggaaggtctgaaattactgggcaaaaaagaacaacatgacactatatttcttgaacaaacatatcattcgattcattacaaaagatctttacatgtattctctacaaaaaactatgatgacaacagccgacagcagcacgaacaagaataatgatcatattgaccagagggataggagcaggaggggaaaacatcaatcagggtcacataatgagcggctttaaaattagaagagaaaagaatacattttcttttgcaaatcgcttaatgccgtcttgtatttgagccccttattgtgacaccatgtaaaaatttggtaaacccgagaaagtttagcttgccatcggattttctgatccagtcttgaacgatggagtaatgagttggagcaagatttaattcctgtacagagaaaggttggtcagggtaaccgttatagttacgagaaaaaatgttacttctccatggatcccacaaaccatggtagtgaaattgcaacaatattatccacacaaacattaccctaccaactaaggcagctgtggtgtcagatgggatcatggaaatcatcataaatacctgtgctaattcctcaactgatatgactcggttgccctcttgttcaaattgctggaaagctgttccagcaatctcctcccacctttccagtgcctcaagctggtaaggactgattgctgcggcacagaactcttcaaagtccattcttctgtatgcaagtggttccaactgggatagaatcaatatacacaacactgagatcagcaacttcaaccaccaatgagatgtattttaagaaattaaaaaaaaacacaggatgcaaggagttagaaaagaaacaaacaaagcaataatggccatcagttcatcataatagctttggttgtatggctttgcaacaaaaaaattcagtatatggctttcagcattaaaggtaatgatggaattcgtatagtaatataaatatttaagcaggtaccatagaagggtgatagtacaactcttgttgtgcatcacaaattaatcacattatggtcaatatcaatcaaaatatggttaatttctactacatgtacaagataaacagccatccagcatgccaaatgagcctttgcttgacaactggaaattatgctctctggtaactttgcatgatcttgtactttgaatataggtcaatacaaattgaacattctcctagtacttaaagtcgtcggtgaaatttccttaccgcatgcaaaaattcaagaaccctcgattccttcatagcatcagttaaatatcgcgttagtgcctgaataagatagtgaattaagaggttaaaactatgatttacttacaggtaatgtaatgcacattggatgacaagtgtcatgtgtgcctttatctcaatgaggtagtcagaaataatatggtaaactcaccgtccgaaagttgtcaagtgatacaaacccatctctaggttcgagcagtttaaactgcagtttgagatacaaaagttcatcttcccttaaagccttggatagtgcctgtgacagtactcagatttcagtaataaacaaatatatggttgagttgcaccacaatttgctggcatcagcaaatttataacaaggacttttaacgcacaagtttgagcaaaaccatgtccactaattgataccacccccacagtaacacatggaaaaatgcaaggccataaacgaaagacacaacttgactatcagtaaaagcttagccaaagcacatgtaaggacaggaaagggatccacacgctttataccacacataggaatgatactgcaagcatattcagtttttccacttggcagagttaatagttaacacagccttcatcttttatttttatcattttattatttttctcccaaattagtctagggagactaacttgggaacttgacagctccttaatatatgaacatccctaacaacctgacaatagtatataacatatgcaccgatgatgctgacaattattttgcaagagataagatatgcagtcctaaccaaactaggcccttgcatcttacatacagccagccagccatgatcttgtgcatataacaaaacatttagccagtccatgcaaatttattagccagagtacatatcagtaaaatcagtgaaacatcaaaataataattacagatgcagagaagatcatgataatctataacgaacctttaatgccaaccgtttaagaggtgtagcgcggaggtattgcttaattaatctgaagatgagtatgtccagcgggatctgcctttgttcatctcgcaaccaaggatgagctgccaaagaaaacaagtgtcatcctctcatatacgatttatgatagagaaataaaacaactagtgccatactacacaacagttatagataataatgttgacaacttactcagtgcttgaacagcggtcattcttttgcggtaatctttgttcagaaatctcttcacaaaatccttagcttcagctgatactgtaggccacggtgaatcatcaaagttgggatcagctctcaacacagatcggaatattcctgattctgttcgtgcccagaatggccgactgccacagagcagaatgtacgttatgacacctatactccaaatgtctgcttccatactatatgatctgtgtaaaacctctggggcaacataatatgcacttccaacaatatcattaagcctttcatctgcattatatagcacaaaatacaaagaacaaggtgtctggtcagctaatgaaataccaagcaacagtgaagagaaaaatagttagccaaagttcattaaaagcatcaggacacaagccacaaaaaatgaatgatgcattgtcaacctggaatatagataactcagattaacgtaaaatgaattagcccaggacaggatgccacagcacagaatgtaaacaataggcatgaacaacaagccaaggtagtctatataaatcaagattatccacaagccatacctaatacggaatgcatgttagtacacacaaagatgaagactagtttattacctggtctaatgaaatcagagagaccaaaatcaatcaacttcatgggagcattttcatccctggttgtgaaaaggaaattctggacaaaagaatagaactatgtcataaaaatagcctagcattctacaagtataatttacaaatgtgactgcatacgtatacgaatgtaaactacacataaattagttccaagatttcaaagcacacctctggcttcaaatcacgatgcactaccccctgaagatgacagaaggctactacgctcaaaatctgtacaacaatcgctttggcatcttcctctgtgtatctcccgcctcttcaatagttcaggttagcataattggtaaggattaacaaatatacagagatagtattagtttactactatgcataaagaaaaatgtagaaagtacctggctaatattctgtctagcaattctcctccctcacataatctgttaaggaaaaatgattggaaaatacttccttaacaatattaaataaggtgcgacaaatagtgattttctgcaatggtaggtagtagactagtagataacacaaacatcagtagatagaataggaaaaaagcagataataataaagtaactgtggagctcatagacaagatattttgcatgcgtgtcaagtaatctgagatcaaatattgcctgtagaaaaatcttaagtatattggttaaaattacatataaaagtcataaaaaaacatactccatgacaatgtagacattgaggccatcctcacatgcatcatagaatttgacgagattattgtgccctgataacgctctcaaaatttttacttctctacgaacatcctcaatggatattgccgttgtcatctgccaaacacaagagtaaattgttaaaagtaagttgctaaaatttttgtttcagttcgaagaactaggcactgcaataaatttataggtgccgttgtgaaggtacttgcaccattgcagttcacatcaatgaaaagagaacaaacaaatcaaataatacgataagtaggacccattctactacattgcatgctttcatttataaattattttataaagttggatcaagggaaccggagcaacaataggacacttgacaattagctgccctgcggaaatcccattatttatcatgttaaactgctgctaggttgagttgaagactgattataagaaacttgcgctgcatagagtaaacttaatttctaaactctaaggaaaccatttgtgtgttaaatatcatgtcggtttgatctttgacccaagaaagggtctcctgagatggttactaattgataagtgataacaagattaaccgtatgagcctcccactagggctactggacgtgctaccgaatcttccagttagtttaaaaatggtttgtcattatctcaaggtcccagatttttggcatttaatgcagtctgccagcaaatatttagcttgtgatatatttaactgtttagacaacaaacatccagaatgtattaaaaatatttctaaaaactatgaaacagttttcttcaaataattaaatgatttttctgaaaggctaaaagtaaagcagatgcctattgatgttcagattccataaataaaccagttggaaccaccgatactcagctatgacatatctgatatcctaaaaagcaatgtgaatatctgttgtggtggtagacaatcaggccaattcatattcagatcatgaatcatttcgaattatgtagtgcctgatccatgaagcccctgacaataaataacaaccaaagggcactctacccatttttgttgtatcactcaattaagtaacagtaccatatgccatgtgtctcctaaatcaactctaagctctgtagcctccttggatctttctccacttcaaatgtctttagtacatgtcagcctgcagttgctgtgacactacctcccactgattgtgaattgtgactggcaaatggtgacacccaaaacctctctttcctatgatgtgcttttcgaaactaccgtctcatatggactaaaaataccgataattgatcactagaccagtgtattcatgtcagcttttccccagatgtgtcacatgaaaatccacctcaaaatcgacaatccttaactaaaagccaaaaaggacagataaaaaaggtaggttaggacatgtactgctgattggttagaatatcatttatcactagcaacgattggctaagtcaccaatttaatcaatgtactagctgcatccaaaagcctcttcacaccacaaattaagacttgggtaactgttcgtccctcacaaatgcaactatcttcccctactgtttccagtcaaaaaagaaaaacaaatgtaactctctaaaggaggaaaatgcagaaatatcctggttcaaccttactgtctatttctctgaaagacaaactcctcaaaaaaaatgaaattgaatgagataatcctactccagaaactgagcaagattaaccaatcgccaatgtagaactaatgtggcaaaatccgagattcgcaatcttccatttgtgccagtatccttggggggggggggataatataataagacaaaattcctaaatctcagttacttctatccttcaatctcgatcatacgaatcataacactgacctagatttcagttatttcttcaaaaatggcgcgacggcaacaactaaattttgaattcatgaaacaaaaaggtgaaccagagcttaaaaaagcagcttatcaccaccagcagcagcgagctctgaccttagctttggcgatgatcttgacggcgacggtctgtcccttgtactcgcccttcttgacgacggcggagcaagtgtgtccgaagtggcccctccccacctccttcccgagctcgtacttcgcgccgaagttcttcgagaacccgaacgtcttgtccaatggcctctccgtctccgccccatccgcggcccctccaccgccgccgccagcgcccacgcctccctcctccggtatcgtcccttccttgggcttccccccacccagcctcttggcgagcgtggcctttatgtgcttggccggcgacggcggcgggaacggccgcttgaagaacctcctgggcgtcgacctcgccggcgacggcgacaccccggccggcagcgggctcgcgcccccggacgggtacgggctcggccacgccaccccaggcgtctggtgccccggcgtcgtcgatccggacttactcccacgccgcctcggcgtccccacctgctgcgcctgcgcctgcgcctgctgccgcggcggcgtcgacggcagcccgttcgccggcggcggcgactggtgctccgtcaccaccccgccctcatcgtccgccgtcctccccgacgcgcccttgccgtagcactgccccatggcaacaacaacaacagcctgtcggcgcgcgcgggcgcgggcgcgggcgcagcggaattagggttagggtttggggccccccgcaccgccgcctcgcgaggtggaggtcgaggaggtggaggcgagtcgctcgttggggaagaagaagaagaagaagaggagagagagagagaaatcggaaatggcgttcgttaccaatttctctctcctcccccacctcacctcgggcttacattacatcactccagggaggcgactgtcaattccacgttttcccaggggccaatgtgcaaaagtgccaggaaatatttttttattgtaacgcctttctggtggcgggtcccacgagggggtgggcccacgcgtcagtgacccgttcgtggcgccgcgtacggaagccgtgcgtgggaaacggaaaagggggagaaaggggaggtggcaatgaatgagtacggggtgaatgacaggtggggccgtgtggactcgtggcgggaggtgggtggtggggggagtgggtgtttggtgtttgtgtgtgaggtggggtggtttggggggcgctccagaaacacggcgggtggccggggcagttgatgcttccgttgtccacttgtgtgtctgtaccccgtttttattacacccccaaaacctgcctctctctctctctctctgctatcaaggattagtttgtttcttcataaccttgattagtttataatgaaatggatcactagtttattttccagtacatttgaccaccatttcaccgtggctttaacctctcacagtttgttctacggtttaggtggttttcttttctccagaaaatgaagatgatgaagattaagttttttacgtaaaacgaggtggtatttacgtatgatttattaagtataaattattacaaacttgaaaatagattaatatgatattttagagaaactttcatatagaaagttttcacacaaaacacaccgtttagcagtttgaaaagcgtgctacaaaaatctttaacttcatccgactcttattggagaaatgaacaggaccttaatgaaatggattactagtccttaaaagatgaacgaggcaacgagatataataatatatgggtaaattattatacatgtgttcttacttcttagcgatttactaaggggttgttcggatttatgtcattttaaaccataccaaattttggtaaagttgccaaaactttgcgtctatttagttttttttatcaaactttagtaaacacataaaaaatcatgccaaaacttggcgatattaccaaattgccaaaaatttgacaataatgtttattttgactataatcagaacaacccctaaatttcaatgctgaaaaataaactacgacgaaaaatgcttaaaattaactctaaaattaggttcgaaattcaaatttttgttgcagctgatgagcccacaaacaaactattcctctagagttctaaaggagctcttggattaaaaatgaggtattcagatattgctctgaaaattcaggttcaggcatgtactgaaaattgcatgacctgaaaatctttcagaagagtcagtgttgcagtaatcatttcgagcataatacgacttcgttgagttcttttcgggaggagtaacgaactgcatatattgatttctaaagtgcattcaaagaccggatcaaatgtgttcctggaatttgaccgcacggtgagtcttgttcgtttctgaatcttcctctccatcttttccatctttcgatgtgttcagttcatgaagacacttgcagtgacgtgccttcgatgcaagcgtgttgacatttctatctgctattaatcaaagatcggtttttttgactctttcgattcaaacacatagagctatgttttgctggactcgccaacaattgtttgatccgttgaacaatttatgttttaaatatatgataccaagtcttgagagccttgcctccttggcaggttaggcctgaaaacctttgaattgtcatgtaaataactcttgcaagatgaaaagttcaactgtgcaaatgatacaggttttgaatgtgtccatgcaccacctgacatttaaaaagtaaataaattgtatatgacaatttgtagcttcttcaaagaatcatatactcttttatgtttcataaaagttagggattccatcccctaaacaaaatgatttttgccatatagtagtagagtactagattgcaagctttgtctgataagatggtgtctgacgggattcgattagctttcgctaccataggagtttaggaatatcacagaagaacaggttgatagaacaagtaaaaaaaagaggcctgatagattgacagcggcagcttgacctgttgcaaccagtgatttcatcttttgctatctactgtggaaaggaagaaccatgtgccttttcaaaagagattttgcccttcttcaagacaagatcatctcagatgcttacagcgccattgattttcaacatatgtttaactatttgttttattaaaaaaatatgtactcattatttattttgttgtatattatttttggcatatctgtaattttttgttaaatagatgaatggtcaaacgtatatctaaaagtcaatgatatcgtgcataaaaaactgaggaagtatatttttttttacttcgtgcttagcatcgcgtgtgggatcatacaacaggagatgggagtgaaaaataagcagaagtggcaaaaggttttatattctgtctgcatgcttttctatctttatccaaaaggcttgattattaccatatcattgtcagtgtagcactgtacttatctccttttttttaggctgtcagcaaaagcccctttcattgccaaatgacaagcttctgtgcattaatctgaagaaagaaattacaggagaagatttcttctgctgctaaccagggcttagaggatcattaatatcctttgggtccaatatttcttctcctctggaatatctctgaaatttttaattacagagtatgcaccaagcctttcctgatgactacatttaactgtagatgaacacgacctcatcttgtttcagaatacatattctttttgtacttttatcttggtcagaatacgctgcaggacgaactaatccaataaaaaatatataaaattataaggactattaattaatcaaggcatgtacttagatactttctggtgatgaatactagctaagcacgtgtgtaatccctgtggataggttgatgactgacggtgacacttgagcacttgtataatactacgtagttaagattttgtatctaataatgtgtcatccatgatgcaattggcatgctttttgtatgcctacctgaagcttttgatgctaacacatttcttaatcttgcatatatataattgcagctgcaattggatcatatgatcgatatctgtgtgcatatttaagcatattcatgtcgcctaaccgcgtttaggtatagtatttgaaggctttggaaattttctttcttttggatttgaatgcggactgcgaagctgagctgcgccaacctttgagaagtcataaattttgctgacctaccctctcgttatgaatcagatcaatgtttgtctctgtaatgtagtccaaaccaagcttaaaattcattatttcacaccatgtgactatgtgagccatggccacctcaccatgaatggtgccagcaaatttgtcgattgagctttattgttttcttttagttgacacttgccacactgtacaattgattagtaccatgtattgacagacgatcaatgatattatgggaatcaaaattgtcgagtgtttccatttttggtttttaacgaaattattattattattattattactcgaagattgttatgtaatgtgttaaattattgtgccacaagaaggagcgaaattacatgatcttcaacaacttatgcagagttaggatgcacacagctaaacatattcacgcttgatgtaatagtgcttcctagttcaattagcccttaacttcatttctgctctcataaatgactagaggttttctgactagcttcacaaggtggtgggctaggcaacttgggttcgaagcctcaccccttctaattatttgatattagttctttccctaatattcacgttattttgtaacttcatttcctctctccccaacccctatggccgccgctgagtggatcacatcatgtataattaatagtacaaaattttcaatcctcctaatatatcaacacacaagccttttgtccattcgcgaaaaatgtaattatcatgtctggagagtttaaatccatgataggcacatggctaagttccatcagcaattaggttgagagcgtcttttcgcgacgaaaactcgcacctttggcatctgcttcaggaagaaccacagtgtatagtttgaaaagatccattctgtcctaatattttcttttgaaagatccactctgtcctaatttcgaggaattattagccacagttgtccattctaacagccacaacttttttgatcagttgagttactgaaactgcacgaaactggactagacttttttttttctagcagaagaacaagttaagcgtcttaatcagtggctgctcatttcagtggccaaaagtaaatcttgcgactacatatccagccgtttgtttttacctgctcaacagatttttcacaccagtgtagctgcaataggattactacctctgttctcgaaaggatgaagtcttaaatgcgtagaaccaaatcttgaactcttaaatcattaatagattacaaatattaggatttaatgtgtgaaaatgcactaataaatttgtcaggaaaaactctttcatacggttatattttcaataaattttataaatacataattagggaaaatgataatgataagacatgcgcattggagattgcttcgatgtccaaaagaataagtaaaaaagaatagaggtagtaataggataatttgtgcaataatttacacaactgtagctgcctcagtccgttttctgcatcagggaccacctgcatcgatctgtacctcagttaatctttttcttctatttaaataattttccaggtattctgctgatgattcatggcttgtcattttcagtgaacagctatcaacattttaatccagagaaaaagatgcacgcagcaaaatctggagaaaagctgagatgagctgctgataatggattcagattcaggcagagtcagcagtgttagctggaattctgaatttgtgtctgaactgtgaggcaaaagtacagttgcattgcacccacaaaactccagcaggaagaggcgtactacgagaagacgaactcgaacgagtaaagaaatcacactatcacaggcaggaagagaaggaagcaggtacacagtctacagattacagaagcatctatctcctcgtctccatctgcataattaacaaactgacactgcaaccacaccactccatataatactcctactgctccattggatgcagtaaaaaaattgtcagtgctagctgctcgtaattggcgctcattagcagttgcagacactgacagatgaaggttccaagccattaaacaagacccaacctgcagcaagattcagaagagaggagcctgtggtagttaatttttctcgctgcttattcagagcagatcatgaaaggtccgggagttaaatctcccacacccaacttgccatccacagagtaaatgcagcgatggacaatgcgaaatatgcaatggcatccttgtctgaacttgtttttggttggacaaacagagctagctttgacacttgctcgagaaattccttgcatgccagtctgccagcaatgaaccatctcataggctgtatttagatcgtgtggtgaaaatttttaccgtgtcacatcggatatacggacacacatttgaagtattaaatatagtctaaaaacaaaataaattacagattccgcccgtaaactacgagacgaatttattaagcctaattaattcatcattagcaaatatttactgtagcaccacattatcaaatcatggagcaattaggcttaaaagattcgtctcacaatttacatgcaatccgtgtaattagtttttttatctatatttaatacttcatgcatgtgtccaaacattttgatgtgatagaatgaaaaaaacttgacagggatctaaacaggcccatagtagagtgaagcagtacttgccacaagagtaaatgttgctactagatcagagaagaaaaaaaggcagtgctgctgctcataaattgggctactggtaccatgtccattctgcataccactatgctgcactgtatcatgagctgtagtactgcaagtctactaccactaccttagtaccatgtacacatatgtacgtttgaatcatgtataaatgtacattattctcctgctagtgattgtgaaggtgaggaagatgaacactgaacaaactgcactaactgaaaattgctctcaccagggaaaaaaaaaagagacagcaactgaaatactacaagtcacattttatatttttttttgccggatgtgctacagttgtttttcctattgcctcaccttcctagcttgtactgttcataactattttcatcttgatgggaagtgcagatattctccttccttaacttaaaaaagataagtacacaaactttcagtcaattgaagatgacggtgcagccgatctcgatctacctaccatatagatctgctcattattataatctttttctttaaacatagaaggattgaaaaaataattgtgagaccaaagaatttgtgtttctcatctaaatatctctcttgcagtacaaataagactactggcatatagtcaaaggttagcatgttattaggacttttgtttattcatcgtgctacatacgtagtattatattctggagacaacaacctcaacaagtattcaccaatactgccaagatgactatgaagttgagaaatttgaagtttctgtcttcaaactatcaatatctgatatctcaacatccacgcatttacaataatagggatgtccaatgaacattattgtacgaaaatagcataattgtctaagagcatttgatgtactaaggtcaacttgactaggtcaaaactttgacttcaacagtacattgcatcgatcagctatattggtttcatttttccaattcacagtacgttttttcgtatgtcaaacttttcgacatctgcacaggccacatgcagttcagtacacatgcatctaaaagaaaaaaaatgtgtttaatttgacataaattttgggctgtaagattttgtttcctgtttagacttagaggcaccactgtaaaaggcctcttagccttaatggtatattttctgtaatccggttgaaaattttcatgactgttcaatgtcatacgacatatccatcacaaaagaaaaaactgactttcattccttcgatgggagaaagctaattctaagttttctaacatcaaacttctgcatcctagttaaataggcatccagaaggattagcaaaactattttactcgcagacaatgagtgaaggctataccttaacattgccttaattatttagttcatcgatcgaatacaagtgagatcaatatcattgtacgtaggtgatttggaagagagctagacagctagctcctcttatgttgcattgttgctagctagtcactgtcacagcaatctcaatctcctggctttgtctgtggtgttaatatataggttaggctcttaactgtgctccttaattaaggtttgactaattggaaaagctaataatataatataataaaaattaggcgagactaactaatctccaagtcttcagacttcgaatgggtggcctgtctataattaatcttgtttcatgctttctgcacaacatgtacatcaaacttgcagttgaaggtttgaaaatttgaacttgttatacgcagaatcatagtctagtcaagctattctgacttgacctatcatcctatcatctcgaactatatgaagactcagcgggaaacagcttagttagtgtgtcgccgtcttttttcctgacttgtaaagaaaagaaaatatttaacctcaaatctgaaaattgttgaaacaagctggcactacatagaaatccgagacttaccgaagctttgcttgataatttaggctgtgttcggacatccattttcccaacctatctccctcgttttccgcgcgcacgcttttcaaactgctaaacggtgtgttttttgcaaaaagttcactggtggagaaaccatctttcgttggtcggccgatttccacaatagtcccggatgcaataaaaaccggggcaaaagatgatctttagtcccggttcaaaagggtaacgggcatatttgatctttagtcccggttcgaatgctgtcaggacctgtcaggcccccccgggatctttagtcccggttggtagcaccaaccgggactaaagatcttaacttaccaaccgggactaaagatcccggtgatctttagccccggttggtgctactaaccgagactaaagatcttaactttagtcccggttggtaataccaaccgggactaatgatcccggtgatctttagccccggttggtgctaccaaccgggactaaagtcccacccctatatatatgtcttcttcctcctccagctgcccgagcaagcttcaaaatttcttcaaaaaagaggggaggtcatgccaaaatttctattgaatttattttggtgattacatacaaatcggaggtgcctaaaaggtttgcaacttcatcctccaatgttttttttgtcatactacatttgcacctatgttttgcacactttttttgtctccaaaatttagttgtaagttgatgagagagaaaatgtgtgtggggaagaaagaatatatagaaatttagttcatttgctaaacaaggttttataaaatagttgagaaggaaaactctagtgaaagttaatattaaataatagaaaacaaactaaaataaaaattaaaagaagtaaaacacattaaaattagtttaaaactttacaaatagtttttaagaattatttggtgtaatattttatgatttttgtatgaataaagatatcttataattattgtatgactgtcattattgtaagaataattatttgtgtgcggtttttttgactcatgtagatggatcggcaatggatgtacgctgactggcggtccaaagagtttattgacggcgtgcactattttttgagagtggccgaagctaacaggcaaaggggttttatttgttgtccatgcaataagtgtaagaatcagaaggagtattctgcatccaggactattcatttccacttgtttgagtcggggttcatgccaagctataattgttggacatcccacggagagcaaggtgttgaaatggaagaagatgaagtggaagacgacaatattccggactttgctcagtatgttggatttgaaggaaatcaaacgggcgaggaggaactagctgctgatggtaacgacgttgcggatgatcttggtcagatgttgcaggacgccagggaagactgcgaaagtgaaaaggaggcccataaattggacaagatgttggaggaccacagaacttcgttgtacccaggttgcgagcaggggcacaaaaagttggataccactctggagttgttgcaatggaaggcaaaaaatggggttagtgacaaggcatttggcgatttattgaaactcgtcaagaacattcttccggggggaaacaaattgcccgagacaacgtacgaggctaagaagatagtctgcccgttaggactggaagttcataagattcacgcatgtccgaacgattgtatcctatatcgcggtgaggagtatgagaacctagaagcatgccctgtttgcaaagcactacgatacaagattagacgggacgatccaggagaagttgacgggcagctaacaaagaagagaattcctgctaaggtgatgtggtatttccctataataccacagctaaggcgtttgttcaggaacaaggggaatgctagaatgttgcgatggcacgctgaagagcgtcaacaggacggatgctgagacaccccgccgatggttcgcagtggcgaaacatctacagaaaatttaannatttggaaaggacgcacgaaacatacggtttggtttgagtacggatggcatgaatccttttggagagatgagcagcggccatagcacttggcccgttacgatgtgtatctacaacctcccccctggctatgcatgaagaggaagtacataatgatgccgattattattcaaggccccaagcaacctggtaacgacatcgacgtgtacctaagaccactggtcgaagatcttaaacagttgtggaagaaggaaggtgtccccgtgtgggacgaggacaaacaggaggagtttaacctacgagcgctgctgttcgtaaccatcaacgattggcctgcacttagcaacctatccggacagtccaacaaggggtacaaggcttgcactcactgtatggatgaaatagaaagtacgtatcttaagcactgtaggaaggttgtatacatgggtcatcgtcgattccttgcagcaaaccacccggtacggaagaaaggcaagcacttcgaacataaggccgaccaccgtacgaagcctaaacatcgcagcgggaaaacagtgtttgctatggttaaagatcttaaagtagtgttcggaaaggggcctggaagccagcatatagagagcgaagatggtcacgcggcgatgtggaaaaagaactctatattttgggagttaccatattgggaattcttggacgtacgccacgcaatcgacgtgatgcacctcactaagaacctttgcgtaaaccttcttggcttcctaggtgtatacggaaagtcgaaagatacactggaagcacgtaatgatctgaagcatatggaacaacgcggcgaccttcacccggaaccaaaggagaaaggaagccattacttgagtccagccagctacactcttagcaaggcagagaaggaaagtatgtttgaatgcttggagagcataaaggtaccgtctggatactccacgaatatcaagcgaataataagcacgaaggagaagaagttcacaaacctaaagtctcatgactgtcacgtgtcgatgacacaactgctaccagttgtaataaggggtatccttccagacaatgtccgggcaacaataacaaagctatgtgcattcatgaacgcaatttcgcagaaggtcatcgatccggatagattagaagcccttcagaatgaagtggtgcaatgtctcgtcagttttgagttgatatttccaccttcatttttcaatataatgacgcatctgctttgtcaccttgtgaaagagatccgtattctcgggcctatgtacctacacaacatgtttcctttcgagaggtacatgggcgttctgaagaagtatgttcgtaaccgtgctcgtccagaggcaagcatcgccaagggttatggaacagaggaggtcatcgaattttgcgtagaatttatcgaagaccttcgcccaatcggggtacctgaatcacgccatgaagggagactacggggaaagggaactctcggaaggaaagcaataatgacggtagacaacaatttattccgtaaagcccatttcactgttctgcaacactcttcattggtagctccttacatcgaggagcacttggctctagttcgcgccaggaacatcggtaagtccgatgcatggattacacggcatcacattgatactttccccgcgtggctacgacaacatctcatgggtaacgagtcgatcaaccaacaacttgccttcctggcgaggggaccgtctgggtctatcgcgacattccagggatatgagatcaatgggtacacattctacacgagagcccaagacatgaagagcatgaaccaaaacagcgttgttcgtgtcgatgccatgggacacgatggaacaactgccacgtattacggtgccatcgaggacatatgggaacttgactatggtcctctcaaggttcctctgttccggtgccaacgggttaggttgactggtggaggcgtaatgattgatgacagtgggatgacaactgttgaccttaacaaggttggatactcggacgaaccttttgtccttgccaatgatgtaacgcaagtctttttcgtgaaggacatgtctagcaaaggaaagaagggcagagggcctgatgagcctaagcgtcaagtggttctcccaggcaaaagaaaaatcgtcggagttgaggacaagactgacgaggattacgatcggttggatgggcaaccccctttcacggtgacgattgaccctagcatcctcctatcaaatgaagacaccccttactcacgcagcgatcacaaggagggaacaatagtgaggagaaagtacgtgcggtcaaccgtcaccgccgatgtaatgccgtaattattgtgtacacgatgtaaactattttggatgtattgattatccatataaatcaattgatgtatggcatatgttaattacgcacgattattagaggtttcaacaagtttaaatcatgtatatgttagttatatgtgatacttacaatttttaaaagttttaaatcacacaggtggcaatttcatatgtatgttaattagagtttttaacatttaatttactagcattcatatgctaattataattgactagaggatttttaaaagttttaaatcacgcaagtggcaatttcatatgttaattagagtttttaacatttaatttactatcattcatatgctaattataattgactggagaatttttaaaagtattaaatttaatatatttttaaaactatcattcatatattagagtttttcacaatttaatttactatctttcatatgctacttatatatgactattcgaatttttaaaaggtttaaatcatgcatgtggcatttacatatgttaattagagtttttagcatttaatttaatataattcctacgctaagtacatatgatgattacaatttttattaattttaaatcatgcagtatgtacattaatatcttaattagagtttttaccaatataataatatcattcatatatatgctaagaatatatatatattggaatttttattaattataagtcatatatttgcttattacgatttatccacttaatttattacagacaaaaataatttttcgaagtaattgtcatcaatctttgtactttaaataatgttaatgcattaacttctattttataaacacatatgtaagcgaaaatcatatgcagtgctataatctttagtcccggttcttaaccctaaccgggtttaaaaagaatttcgaaatagcgggaaaagatatttactcccggttgttgagaacaaccgggagtaaagatccaggggtatatatattcccggtgcgccctcgtcttcttcaccaacacttaaaagtttggccgatcgatctctctcggcctctgtccttcgccgccactgcctagggcaaatccccgcgccgacgccgccgtatctcgccgtcgtctagagctagtcgtcctggccgccgcctccgcctcctccgctgccgccgcatatatggggtgagagcccccgcatctcccttcatgcatctcgatctctccgatctcgatctctctccgtcgccttcaacgtcgtcgcgttcgacgccgccgctttggacgccgcgcaacgccgccgccgcatgccaatgccacgccgccgccgctgtcgccacgccgccgccgctttcgcagacgcgcgcgcaataccgccgccgccacgccacgccgccgccgccacgccacgccacgccaccgccgccagggccccacaacgccacgccgccgccgcggtcgccacgccgccgcgccaaccgccgccccgatgccgccacaccgccgttaacgaacgaaaacgagaacgatcgaacgaacgagagccgagaaacgaacacgtcaaacgtacgttgccgcgacaacgtgaacgagaac

SEQ ID NO: 9796 - DNA, 7100 bp, Oryza sativa
ccctgtggccgagctcggcgaagccgtgcgccaccttgttcccgccgcggcgcacgtgggacacagccatgtcgtcgagctgcgggagcagcgcggcgatctccctgcacagcctcaggtcctcctccgactgcacgtcggcgcggtcgcacaccacgtcgaccaccgccttggagtcgccctccgcccagacgcgccgccacccgttccgcaccgccagctcgagccctcgccggagcgcggcgagctccgcgacggagctcgtcgccgtgccgatccgctccgcgtagccgagcaggaacgcgccgtcgtggtcgcggtacacgccgccgatgctcgcgatcccggtcgagtgcttcgacgacccgtcgaagttgagcttcatccacccctcctccggcttcctccagatcctcgccgacgccgacgagtaggcacgaagacgcaagatccgccgccctccgccgccgacgaggatgcaacccagaacggggttgcgccgccgcagcacacccagatcagcgcggtgcacgcgcagcatcaccgatcccctcgcagaaaaaatcgcaatctgttcgtgtatttagccccaagcggacccaccaatagggcaaggttgggaaatggctagacccaccggcgccggcgaatatccgccttccccggacttgttcctcttgagcgccgccgcggcgcaggcaaagctcgagcagcgctcaggcgcgccatggcggcgccggcggcgaaggagaggagaagggtttgcgttgcgtgtgttgctgtacttgataatgggctatagtcctatgggctacatgtggatcggcccatgatgacccatatttgtacccaggcccaggcgtcaattcattcatgggcttcattccaggccgtgtttgtgatcggtacgcagccatctcttccttggggcttttaactatttgccatttttagatttggcaaataactatttgccaccccctatctcaatgatatgtgggtccacatgtgtctatgacatgtgagttcagtggtaaaaaattaattacaacatctaaatgtggcaaatggtcaaatgcactgttctgactgcagaacatcacaaatcgtgatgaaacattgaaacacacacattaatcactggtgttggtagtcagcccactacacggtccatccatccttggacaaaagccgacgctgcggcccactacacggccccgtctcctgcgtactcaggtgactcggctacagcctacagagcagagctggttactctgcttcgtagcaaaagacgctttgcactttgcagcttggtgagcgtttacgacgtacgacaacgcgtcgcacgaagggaaactactaccgtgccgccgcgcgcattcctctgccaatttctaaaggcgacgaggaggctgtgtgttgcagtctcccggttaagtttccaggcctttttctgtgtcgtgtataacagctagatcaaggctgaggcagcctgcaattccaattcgccatagagagagaaaaggaggtttggctttggatagctaatatgctctctaagtaagcgattaactgatttgtttatgaacaagtgtggatcgtttcctgcgtatcagatgatcttggggataagaacaagccagcaacgctattttccaagcatatataacccagatcaatcgactggaatcagattccttcgatctcaatgcgtatgcatgcgtacgcattggaaggaacctttgctaacttcgaagagaagaagcacatcgtagcatctcgatctgcaactgtgtttgcaagcagacagagcagctagcacaggttgcgcaagcagcagtttgctgctaatcaggagacaccagactgaaaatgttgtgcccctttcaccggctcttaacccctggagattctgcatctccaatcccatattcatattcttcaacaacttgacactccataacactagttagtccagtatcgccactgattgatctagagcatggagagaccaacctagctgtgagatgagacatgcatgcattgcatgctccgttgctgacctaggcagctcgtgatccggtaccacacttaattaacaagctaattgattatttgattacagtactagcacttaattaaatcagccatggcgatgtaaccacgttgcagagaagaatcctagaagctagcagcagctagtagaaatgagcacagctgtgcctcctcgcagtggacagctcacctcaatctgtagcacacaaacactacgatccccaacaatccaatctacccaatttgcagcaaacaaaaccgttaaatcttttttctcagggagcaaggctcacgtgtgcatcgacagatcacagcgtgaagccgtggagaaaacaccaagcccagcgtgcagctgctttgaccgggcgtacgtgcatccgatcgatcgatcgatcgatccgagcagatgccgctgcggctgcgccctgtcgcgggggctccgcggcgcaacccgcgggcgctgccgccaccggcaaggggacatcgtgccgagaatctcaggcgcaggggagaggcagcacggcagcagccagtaggcaggttgcagttgggtttttttttctgaatttctgaactggccgtggatggaggttggggattcagaggggagaaaaaaccgagaaattgccaggcgtgaggtaggtgcacaggcagcacagctcagtgccactgccaatcatccgatgaattgataaaatatttatcatttgaaggcgtggcagatcagggcagtaatgaacgaaacattactacagctcatgacctggctacagttcacgatggacacctcatcagctaagaagcatctaccaagaatcttacttccatccacatcaatcagttcgatcaattctcaccggcaaaattcctggagatataactgatgaaccagttcaagtgcaacgcacacagatacatcatattaattcaccgcaccgtgcactaaacttcacgacggatctccgcccggttcgttgcaccttgcagacgtctgattttagtgattcgatctccaaagtctccgtcggcgctggaccaaaaatatcaccggagcagccacgatattgcaccaaatcaacacgctactagtgcccaaaaaaaaaacggagtacgagttggcagtagctgtgtcaaccgggggaaattccgtgaggtcacgaacgccgccgatgttggacaggcgagcgagacggcgacggcacggtgaattcaagaggacagtacgggtacagtggcatatggtgtactagtctgtcttgaaaaagggtaaaccctcgtaactaggattgattttttttatttttttctaagacgaaggggtacgtggtgatacttgagagaggcgaaggcagcaaacctggagatcgaaaaccgtcgctttcgagcccttttctcgtgcggatctccttgccgcttttgaagcttccggccacattttcggaagctcccggcccagcttactgctgaaaaaaaaaatcatcgcgtccccgtctcatcagttcgttggtcacggatgaggcaaacgcggatgaggggaaaaaaatcgggatgattttgatgggactcaaatcaacctgagaccgggtaaaacacacacgctatacgagtgtggctgtgtgggtgacgagactcgccagtaaaatttgacaatttgacatcgccttcgccgtgttgaattgggcaatctccagacggacggagggaggcaggccggcacgcacgtcggggtggctccgtgtgttttgacctcgccaccactcggagcaggcaaggaggctgctaattcttgactaatcatagtcatcaatcaagaagacaaaaatgaatagaacaagtattagctgatacagtaagtctttggagggcgatgacgtctgcgcccgtttgcaaaattgttcaagcgaacttcaattccttaatcgatcgactgattatgtatgaaaattgcaagaatttgggaggctgttcgtttccttttcagagaggaagaggcaatgtatggatgcacggacagtttgtgaaacgaagaagcttgctgatcaattaattcagattccagtttccacttggaacgaagaaacaagcagagtgtagtacatgagagtacaaatgcgattggaatccgcgaaccaatgagcagtgcccttgatgaatcctgatgctatgaacaacgagaagaaagaagaaagaaagaaaaaaagaagaagaatcctatccatgtcgaactttctaatgaaagaggaactgtgaggcctgggcgacggcgtcgtcgagccaccggcgaggctcgtccatgaggtcggggctgagcctgaccatgaggacgcagaactccatctcgctgagggcgccgtcgccgtcgaagtcgccctcggcgagcatcccccggaggtcgtcgtcggacatcccgccgaggccgagcagcggcgcgttgcggcggaggctgtcgaaggtgatgagcccggaggccgggtccatgagcaggcggaacccgcttgcgagctcctgcatcagcccttcctcccccagcctctccgccatcaccggcaggtagtcctcgaacccctcctgcatcatctgctgctgctgtctctgctccgccgccatgagaatgagtgaggttgactgatcgatcgatttgttgtgttcttgtttgcttcttgcgatctttgagaggaggagaagaggagagggatgatttgatgtggtggggaggaggcgggaataaataggggaggaggaggtggtgggcttcagagaagttgcgagagaggacggtggatgtgggggggtctcacgtgtgggtgcgtggtggattgtttggattggattcctggacgcgcggggacaggttggacgcgcgcgcgtaggggggaggatgggatgagttgggcgtgggctggagggaggaaaaccgcggcttcctgcgcgcttcggcttggacgtcgcgtcgggtcgggtcgggttgggtcgggtcggcgcgagcgcgtggctgcggccgcgtgggtgtgctgtgggtgcgtgtggctgggcaggtttcgggtcgtagcagcgccgacgcggtgacgtggtcggggcggcgggtggatggtgcgtgtcacgtcacgcttcggggtggtggacagacggacggacggtgtcggaggaatcgtgggaccatgccgatacgagatcagggatcatatttcttcgcccacgtataaatcaccagacaaaatttttcatcatatcacattgagatatcacattgaatgtttgacacgtgtataacgtattaaaaataaaaaaataactaattatacagattgcgtgtaaattatgtgacgagtcttttaagcctaattgctccttgatctgataatgttgtgctacagtaaatatttgctaataataaattaattaagcttaataaattcgtctcgcagtttacaagcggaatctataatttgtgttattattagtctacgtttaatacttcaattgtgtgtccgtatatccgatataacacaccaaaactttacgcccctatatctaaacacagtcgagaaaaatgctataggacggaatcttgttcgaacagaatgatacctctgagctattgttatctgatacctgatagatatcgactaataccccgttcggatggaataatatctttgaggtatcgcctgatacctggtagtggtaggtatcggctgatacccaggtatcaggtgatacctctaagatattatccggatcaaacgggataccgtctagtagcattcccctatttctaaacataacactaacatttcatgcttacgacacacgcatactcacatctatgaacatatatgcacaccttatctttatgaatatttttgaaagattaagtcggcatatattgagattgacgaagtcactacagatatctcgctgttgatgagtacataacctatcactgaaagaagctatgaatgtgagcattgtgtcgtagtatttttgattgaatggctccgatcaaacatgatttctacgaaattcatcacgaactcaaaaactttgatttggtcaagactcaggagagtgatttgagtttatctcgttgtgaaattcaggggttcctgacgttggacctcctctgctgcgtcgactcgacttgcttaggtctgatttagggtcacgattgagaagtttcgtgtcccgttttttggtcgcccatgttgggcacgtttagccgtaacaggacgaagtgtcacccatcctttacccaaagtttccatggaagcttcggtcagaaaccccaaaaaaattttgacaccaaggaaggatccatactccacatcgctttctcgagtccaagtcgcgagtagagcagggccagaggctgttcctacttggggatctcgtacggttctcttcctttccacagattgcttttgcttaggacgccttttcttgggtttcttcctctttgtttgctaaggccctgttttcgggcggtgaaaagttttattgtgtcacatcgcatatttgaagtattaaacatagactaataacaaaaaaaattatagattccgtcagtaaactacgagacaaatttattaagcctaattaatttgccattagcaaatatttatagcaccacgttatcaaatcatggagtaattaggtttaaaagattcgtctcataatttacacgcaatctgtgtaattaatttttttatctatgtttaatactttatgtatgtatcaaacattcgataaacattggataagatacggtgaaactttttgcgtgggcagagtaggactagtattttactcgtaccagcagccgggcctatctcacttcgttgtctgcctttcacatctcgaattctcgactccaatctccatattttccatgtgcttttcctctctgactactaatatcactttatttctgctgatgatgctgtcactttcacactgaagctctcagctcaagggccaatgggccatgttggtgactacttagtgagcaactttctaaaggaaacatgaagatacaacaaactaca

SEQ ID NO: 9797 - DNA, 3377 bp, Oryza sativa
tggtctggggggatgccctccttgtcctggatcttggccttgacattgtcaatggtgtcagacgactcgacctcaagggtgatggtcttgccagtcaaggtcttgacgaagatctgcatgcctcccctgagcctgagcacaaggtggagggtagactccttctggatgttgtagtcggccagggtgcggccatcctcaagctgcttgccagcgaagatgagacgctgctggtccggggggatgccctccttgtcctggatcttggccttgacattgtcaatggtgtcagacgactcgacctcaagggtgatggtcttgccagtcaaggtcttgacgaagatctgcatgcctcccctgagcctgagcacaaggtggagggtggactccttctggatgttgtagtcggccagggtgcggccatcctcaagctgcttgccagcaaagatgagacgctgctggtccggggggatgccctccttgtcctggatcttggccttgacattgtcaatggtgtccgaggactcaacctcgagggtgatggtcttgccggtgagggtcttcacaaagatctgcatctgcacacacaattaccgaagcatggtcagcaactatgaacatgaaattataacaataccaagcaagtacagcagaaatcagtcaatcaaattattccaatatgttagatacacgacctaaaccacaataacatcagtgtacctatcaacaccaacagtgacctaacaaaatagagagacgcaccgtgctcgagttcacaaaaataatctgcaggtctatgaactactagaattccatcggcaaactgattcaataactactagcactatcccgagagcacataaggcaggttaattaacataggctagaatttacaggtgcaacagttgataagataggcataagcaagtaaaatatcctgaaagctatgctatgtaatcactaatcaacaagacgcagcccttagattaaacatgaacagagtagaatctatgcaactagagggactgaatcaaaaacaacctaagcaaaatatacctgaagctgctacttggatcaacgagaaaaacagagactaaatcctactaattgaacagatcggaacaaatcacaaccctagcacagttctacttctagatccgaaccaatcaatacttggaccacgaacagcatcgctcataatcacagatccagcataccacgcgaaccccatctaaacctgttcaaatctaccacagatcgcaaaacggagactaaccacaacatctcacaatcacgaacaggccgggaaatcaaatcaaacgcgaggaacggagaggatcagaaaatcgcataccttgagaaggcgattcgacgcttcgcttcgaggggagatttttttttctctgcgattttggggttcgattgacggaggaagaggcgaggagggggtggggtatttataggtggggagggggggactcgtgagtgggcccaggggtgcggtgggtggggcccagtgagaatatagacaaataaagaaaggagagagggagaggcggtttggggagtccgtccccaccacgcaaacgcgagaaggaaagaaaggaacggaaagggggcgggtccagacggcgccgcggagatatcgaggaggtggaaagctgatgccgtttgctcacggcggggttggtggccgttaacacgcagcgaagcggcgttactgccgtgtacgttttgtgacctttcgaaagagagccccagcccaagaaaggctggccaggtttttttgtactgtgtacgattacgatggaagaaaacatactcgttgttttgtattggtacatactgggccgtagtaaaattagaatcagttgttaattggttattatatataccatcttaagctaccaaaattaataaagttgtgatggctatggtatattttggtagtgaattatattgatttggtatatattagaatcaatccaaccacaacacaaccaaaaatacctgaagctcaatattgatggtgcttttcgactatctagcaaatgtggtgaatggggctttataattgaagcagcccaggatgcactttgtgcagagactgatgtgatatatatatatatatatatatatatatatatatatatatatatatattaaatttgtttggtgctatataagaaacataatatcttcgtcccataggtgtcttcccagggaaaaaaatatctttcaaaaaatcaaatagccaaaagaaaatcatgatcaacaaaataatcatcaggtcgacattcctgatggcacgtagcatctgccctggcctcccacgcgcaggcgcagcgacgtcggcgtgccgacgtgataacggagacggagggagacgcgcatctgccaacggctacggcgccgtgccttgcggtccaaccacaccccacgtctctttctctctctcctgaattttctttccttttttccatcatcaaagctgcatgatttggccacacgctggtagtaccagcaagagccaaggaccattcttgctttaataaaaaaatcaaagaaaaatcgagaggctgaggctgagcctgagggagagaggctgtggttttcgcaaaggcggttttccttcttatccgctggtttttggttttccctcgtcgtcgtcttcctcgtttgagaatcacagtgactttgcaatagacaggcattgcagagaagagagagattgagagagattcctatctctcatcttcagatgactgtttgtttgtagagattctttgcagtatttgcagctgaactgcatcaaaatttttaatcagatggtttcttgtagtgttagtttttctcgttgtaagtaaaggatttctagttctgtactcatgtactggtactgaaagtctgaaacttggcgtgccgcgttcagttcagttcagtagtgtctaggcaaggtatcttcagataatcagatgaatagcatgaacaaaaaactagtaactgaacactacatgattttaatcaatggcatgaacgaaaatagagaaacaatacatgattttaatcagaatgtcaacctgacaacctggatttgctcaagggctccatcggttgatttaataaaccaaagtcaaagctaaaatttgaattttcaaacttaattttaaaatattttcaatgtagtttttttaaacattgtcttttacctcctccgtcccaaaaaaacctaatcccagctacaaacctggacataggttcatagctagggtttgtctttttcttgggacggagtaatagctcattaaaaacacatatacaaaagttttacctgtaaatcaatttgtattatactccctccgtcccataatataagggat

SEQ ID NO: 9798 - DNA, 31187 bp, Oryza sativa
ggcccggaggaaatcggcccatcgacccccgggggaggcaaaatagacttttgcggaggaatttgatttggaaggatttggattcggatttgaactcgacgatagatcggggattgagatcttgagatgacacggacactagacaacaagcaaagaaacaaatttcacaattagggtttttaagagataattttcccgctaggcgccacgacggaacgggcgctacatagtcccgctgtccgcatcttgtttcttcaaatgtcatgtttattcgtcgccgtgcgagggtggtttctatggcagttcagggacatccacctttacaagattactgcaacagaccatcttagccaattcgtcaggatatggtatacatggagcagcaaacccaacccaaccaatcaatcagctcacgttacatagttcaattttatggggtcttttgccatcccctgtaaatatttaggctctataaacctctttttttttcttttcttttttttggccgggttgattgaagaatagccaaccaattttattaagatttggaagagagacatagttcaaatacaaatttgtgatgtcgacagaaaacagttgaggcctggtgctaaaaccaaatcgtacgtgcacacactggaaacaaacactcttgctattttgcaccttgaatagccctgcatgcttcatgccataccttgatcttgtccgctcctcaaaaaccctcgcgttccttttctgtaaacctcttctccgtccatacataagcggcaatgcttttgccgattcttaaaggaaaaaatgtgaagggtggtttcttgtacaaaggtctgttcctttgataatttttgtggcttccgtgctctttcactgtagtttcacatctgctgaatttggtttctctctcacggttttactttctactgtttcttctttagggtgtgtttagttcgcgaaaaaaaaattttgggtgtcacattggatgtttgaccggatattagaatgggtttttggacacgaatgaaaaaactaatttcataactcgcctgaaaactgcgagacgaatttatgaagcctaattaatccgtcattagcacatgtgggttactatagcacttatagctaatcatggactaattaggctcaaaagattcgtctcgcgatttccatgcctgtgcaattagttttttaatctatattcaatgctctatgcatgtgtccaaagattcgatgtgatgtttttgggaaaaaaaaattgtgggaactaaacaaggccttatttcccagcttctgaccttcatgtcatgtcacgatatttcatttttcactgttaatgaacagattgcagagaagcaccctgtgcttacatgttaactgggtccttttggatgaaacagtggctactaaagaacttgaggagatgcaaggggtggcgctgcacgctaaattttgacacaaaagttgaaatggatctaaaaacccatatgtggattgttcatgaagtaatcagttagcttgagagcttgggttgttagaagcttactagattgtcagtggaggaagttcatgttgtgtggttaaagtgtacccatctggagaggttaactcactgttcgaacagtcgtgcctctagtcatgggctttacctcatagatttgtttgcatgtgctttgtgaaaagttgttgtggatgggggaatcattaccagaattagccaatgttgtaaatggataacctggtgttgacggtcgttaagtacaaactttaaccgtcaaatcttgcataaaagatatcaaatataatatcaaaacttagtggtaggtgtttactactaacattttccattaaatttggtaaatatatgtttataggtcatttatggatgaaaatacacccgccatgcgacaaaatgaaccttcaaccaatcgcaagcgagtacaaagattggagggttcacatgacaatcaaaaccgacctaaagttggaccaaaccaaccgacctaagttggtggtcagaggcggtgggaatggtttggccgaaccagacttcgcccccggcttaattccccccttgcacgtggtagcgtcctattggatggtgatgacggttataggtgaaccgacattggaacccaattctctaatctcaactcagtggtacggataggtggaatggagaaaaatagggaaacacagagggccaaggcccccactatttatatgtcttcaaattatattagtgcaaatatcattagggtcactcttcacataccatggtgcacatgtctatttctaagagtgatttattagttccaatcatatttagtcgtgtcatatgactccagtaaatatatagtggatccgtccctggaacgaagtgtccatttctttgtcaggctgatggacccacccagcttgcattggtccaccgtgaaacgagcccaagagtgcaaggcccattttgaagatggtctacatatcagggggtagtgctgggcagcagtagcacacaatcgcggcaaaaaccccaagctagcttcatagtgaaacaaaaaccaactaaaaccaactaagctcagaaagagagtaatggcgatgcagtactccagtgcgcctccccctcttcctcctcctccaacctctccgatcgtctatccctttctcctccgtagaccttcattccctcaccgctagcaataaccgagctgtgcgctccaccatctttgatcagctccccaccaccatcatgtgtcttcttgtcggttttgcactactggggttgggtgttgcggtggttttcctcgtatttactatctcgatctggatggggtacaagctcgctaagtactgttggaattcatagttaatcctgctattttgttttccctgactgtcaatactatagcgtgtctagcgtttttcgctttctgttttttcagttagtttgttcctattttcccgttttgtggagccgacgctccctgcgtggtgttcgattgtgcgcgtcgtggagttgtgcgtgtcgcgagtgggatgtgtgggatagcacacattgctaacgttcctcttttcccgctttgtggagccgacacctccctgcgtggtgtgcgatcgtgcgcgtcgtggagttgtgtgtgtcgcgagtgggatgtgtgggatagcacacattgctaaccaatcatggcgtacattgtgttttttcagttagtttgttcctcttttcccgttttgtggagccgacgcctccctgcgtgctttgcgattgtgcgtgtcctggagttgtgtgtcacgagtgggatgtgtgggatagcacacttgctaacattcctcttttcctgttttgtggagccgatgcctccctgcgtggtgtgcgatcgtgcgtgtcgtggagttgtgtgtgtcgcgagtgggatgtgtggggatgtgtgggatagcacacattgctaaccaatcatggcgtacattgtggaggaccatggcataaaacccggttgtgtctttctttatattttagagaagaaatacagaaaagttgccgcaacaattcgcagcacaaactcatgtgttcgtgttcttcagctccacctctcacgttgagtttgattctcaatcttttatagcgattttatgaagcctggtaacatttcgtatcagagccatgtccatgccgacgccgccaccgtgtccgcgtcagcaatcacgctcgcctcctcccccgccgtggttgccatcgtgaccaagagcttgtgtcattttggcgggtggtgaaggaggtgggcggcccggccaactacctcatgttgacgaagacgaactatgatgattgagcgctgatgatgaaggtcatgcttcaagcgcgcggactgtgggatgcagttgagcatggcgatgctaactttcaggaggatcgcacagtgctggaggcaatcctccgtgtcgttcctgccaagctgctcggcacactcgccatcaaagctactgcctaggaggcttgggacacagtgaagacgctgcatgtcggtgtcgaacgtgtgcgcaaggtgaaggcgcagactctcttgaaggagtacgaggcgattgagttcaaggatggcgagaccgtcgaagattttaaagttcaagcaaatggtcatgaaaagtttcaatatgtatttttgaactttgataatgatgtcatctatgcctaaaaaagagaaaagaaaaagaaatgttgttagggagtacgaaccattttttaatgtgtaaaggggtaaaatgagaaaaaaatagtttagtgggtcaaatgatcaatgaaacaatttgacggagtaaaatggattttctctgtatatttataaagtaaatctgcatattataaataaatatattgtatgtacattacaaatcaattactacctccatcccaaaatgtttgacgccgttgacttttttaaaaatgtttgaccgttcgtcttattcaaaaaatttaagtaattgttaattctttttctatcatttgatttattgttaaatatacttttatgtatatatatagttttacacatatcacaaaagtttttgaataaaacgaacggtcaaacatgtttaaaaaagtcaatggtgtcaaacatttagggaaggagggagaaatatacatgacatgaaaaaaatatatatactagatagcagtgatcaaaatcaatgttactccaattccataacttacaaaagcaacgaaataaacaacgctagtaaggagtagatggcagtagtgctcgatgtggcatccgagcttgttgtccttccgggaccaccatagaaaaactggtcgtcaacaatcgccgtgtaagagtagagcttcgggttggatgagaaacctataaaatgtctcgccgttgacaacgcttgcccctgctcgtcgatgagttgaatgttgctcatggatgctgccatgttgctgccatgacctgccatgtatccgctgcccaccggaggcagagcgggtgtcggctgaaacgttgcattattaatcgccatgccactgaaccataaggctatagccttgtaagccaggcctgagaagattgatttggggagacgaccaattagttcagggtcactattgaacccgtagtacaccaaccaatcccctgaagcactatcctgttaaccaaaagagatattaaaaaaaattaatacttcgagagattactttgacaattgtatttgccttcaattaattaagcagaccttgaatactttgagtgccatgtattgcctagccccatttggcctggagacactggggataaagtcgcctggttgtatagatgcaccgctctcaagttgaaaaccagggcattccatgtccacataggttgaacctgatattagagagctagcactcgatgcctttttttaagataaattgttagcaagagtgaggacaatacaaagttacaaacacctggacaataagaattaggaaaaagtatgaattacccccctgaactatcgcggtcgtctgaattatccccctaaatccgaaaatcagacatcgttcacccttaactttcaataccggacaaattacccccctcgacccaatccagagcggttttgcctacgtggcgtacgtgtggcaatccagtcagcattttcttattaaaaaaatgatggggtccacctgtcatcttccctcttcctcttctcctctctctctctctcatccacaagctgacaagcggggacgacggggatgggcggtggctggaggaggcgcagcacacggagcaggcgcgctggcgatggccgagatggagaagacaagtgccgcccggccatggaggcggccgaggaggcgcagcatggcatggcgcacggcggtgcggggaaggcagtggacggcgcggtcggcgtgcacggcggtgcggcccagctagagggtcacccctcaacagctggcgtgccaggtagggggcgcgttcgtgatttttgaggttctttcgagcgccggtgtggtgagtgtcgcgtcgccgctacgggggaaggcgcagcatcctcaggagtgtcgcgccaccccaggcaaggggcaagaccccccacatccccaccaggtaagcttggctaccaggtctttgtggcgagtcttcggaatgtccgagggcccccaaagctccagccctgcctcaccaagaagtacgacgatggcgccgacccctccgagtccctccagatctgcacggcgatcatagaggcggcggagggtggcgaccgggtcatgacgaacatcttccccatggccctcaggggccaagcgcagggttggcccatgaacctgttaccgcctcggttcactcctgggaggactcttgcagttttgagctccaggtgccgtcgaaacccgggaccccctgtgctggctcttctgtagcggctggctttggtcccgccggctggctacggtgcccggcccagctcaactgatcgtcctttcaagcttcaagtattttcaatttttcaattcattagcttaaaatcttatatttaattttcctccattctattctcatggccctgcgacactcgcgtgttgcgcatttgtttggcccctcggtggtaagagcccaacctctctcccatctacatgaatgattcttcgctaagtgtgggggctaagtcttctagccttatcctagccttaagttgagctccgggtgccgtcgaagcccgggaccccctgtgctggctcttccgtagcggctggctttggacccgccggctggctacggtgcccggcccggctcaactgtggacggggattgctggctctagaatttttcggctctcacactcgtgcgaaagtaatcgtccatgaagaaggaagagagattggaaggaggccaccgaaaggaaagagcgaacaaaatgtgtagcgttgaggcgcaggctcatgggagcttgaccttgtttgctaagtggtcgcaggcttccctaaagggttcggaacccatggtggggagccctcttcgagccaaaggtttgaaaggtcgcgacgtgtaaacaaggataaacaaaggtaacaaaggaggtgttacaatacccggaccaaagcagacctctataggaaagctcagcgttggccggggactctttttgagcttagcatttgtaatactttctttaagtatatatcttctttattcgcgcttatcagcaaaattatcatggcttatatttatctctcacccatctcttcctcgcggtcccatgattaccacgtgtcgcatgctcgtttgccccccttggtaacaaaaagtttgtattcacttcacccattcaaatgattctttgctaaaattgtgggggctacgattcctagctctatcctaaccctgcgtcgagctctagacgccgtcgacgcccggggccccctgtgctggctctcccgtagcagctggctttggccccgccggctggctatggcacctagcttggcttgatcgcgggtgaggattgctggctatggaaagttcagtcctcacactcacgcgaaaataatcgtttgaatagatgaagtagaacatgaacagaggttaacaaaaggcaggggcaagcgaggtgcgcagcatgaagtcgcgggcccgagagaatctaacaacgtttgctgaatatatacagaaaataagttcacaacctaaggtacgggacggtgagtcgccctcaagttggggcgaaaaagacgcatgggccctagtgccagcaaagaatggagaagagaccaggcccacatcgttagactaggagagtggcgtcaaccctggccaccgggggaaggttttggtcagggctaacgccgggggctactgtcagtgatatgggcccgggggtatcacatctagagggatgaggccaccctcaaacccacgtggctccctgcgaggggggatcaagcccggggtggagcggtggctacccccacccagctagagggaggaggccgccctcaaacccacgtggctctccccgaggggggtcgagcccagggtgttggggcggctgccccttcccagcttggggtcgggccgcccccaaacccacgtggctccccgcgaggggggatcaagcccggggtggagcggtggctaccccctcccagctagagggaggaggccgccctcaaacccacgtggctctccccgaggagggtcgagcccgggggttgcagcggctgcccttcccagcttggggtcgggctgcccccaaacccacgtggctccccccgaggagggttgagcccggggtggcgcggcggctaccccctcctagctagagggaggtggccgccctcaaactcacgtggctctccccgaggagggtcgagcccggggtgttgcggcggctgccccctcccagcttggggttgggccgcccccaaatccacgtggctccccccgaggggggtcgagcccggggtggcgcggcggctgccccctccaagctagagggaggaggccgccctcgcttggggtcgagctgccccgacccccttcacgtatcagctcacgtgtacagggttaggtgggcgcgcctaacgcctacctaactgcatttaaagcggtctatgcaaccgcgccatgccgcatttaatgcagcgtgctgcgcatctgaccggtctgtgaccggttgaatgaccgatgagacggcgactgtgtacccccgccctgtcagtgtgtcaggcggcgagcggcgtgctccgtcccgtcccatcccatcataatgatgaggggcttcacagcttcttatcccggtcagagctggtccaaccactctgaactgacccgggttcccgttttctggtgtgaacgagaacccaaaagtcctcatccattaaatggcgaatgacaagggcgccatgcatgatttgatgggccccgcgcagcaaccgacgtgcagatagcttctgggctaaggcaaaagacatgtaattaatatagagaatattttcccttctccctaggtagcactcgcagcacatgtggtatccccttagagtataaaaggaggaccatgcctagcggagaagggggatcggactgaggatccctgagccaaagcttgtctaaccctagcttgcataccagggattcagggactttctaagcacagaagaatcatacacacaggagtagggtattacgctttatagtggctcgaacctgtataaacctcttttgtctcatcgtcttggaggagcctccgagatcaagatcacacacagtttcgctcaccaaatccttgaatctcacccgctgcccccgaccgaactctcaaagggaggcctcacagcctcccgctagagagggtcacctctcgacaaacgtaaaatgagatattttgtatatataataatatgaatgaaatcattgcggtgaacataaccattcaaaagttggataagcaacttcaaattatttgtgcccatatgtaatagtccgtatgtgaaataatggtacgcataacattagcaatactccaaactgatcacttttttatttttcttaagctgcgtgcaattggtcatgaattagttcctaccatcttttctcctttttattttcacagaattaggcatttttactatcttttcgtacaatgctttttagcaccgtacatggttttatataattaggcgacctaactctcttcattatcatctcatgcgtgcgtgataagaccaaattttcttgttctgtttgtgtaggtcattgcgcttgttccttgatattttagatcttaattaactttgtgtataataaacatatataaaagttgattttgatatggactccagcattgcattacgatcgggctagaagtttttataagatggaagacgccttgcttttctttttctttcagtgagccaagtcagtcgacgtgattttttttcattagtgtcagaatcgctctctttttttttcattagattaagatttgatcttgtgattataaattttggtcccatcaatttaaagaaaaatcaatggtcaaatgttttttttcttttttttctttttagtttattagagtgatgcatggcggtttagaaacgtttataagagtatcaagttgcagcttaaaaaagtttgtacaatgttttaatagatttttaagtatataatagatatcattatctcatattccatcattcgctccataaaaaaaatattccatcattccatttcaatgtttgccaattgactttatttttcttttggttgaaacggtatgagtcctgtaaactgtaccctgatggcgccatctgaacgtgtcatggcttagtctgctacgttttgttccttgcaactgttctatacccttgagatggtgactgcctttagctaacaaaatgcccacttgtgcatacattctttcttttttccactctagtaattcatacgcacagttcatgctttgttctgtatcagcagttgattttcccgggagaacagcgtatcagcgtgtgagataagcattactccctctgtttcttagataataccgttaacttttaaacatatttttattatttattttattcatcatttttatataaatatataagatgtaaatcatacttaaaatattttgaatgatagaacacctcacaataaaataaattataattatatattttttaataataagatgaatagttaaatgtgtgataaaaaatcaatgatgttattattagaaacggatgtagtattattagtagatccgattgattacgtgtgaggccaagttaatcaatcaaaatcatccaccaactggtgcagcagggtccagtcatacaaagaaacacggccatatgtgggtcattatgttttgactgcatcagatcccgaattcgtgccacgtgatctgccgtcgtgtattcgtgtccactagaatatcagttcttcccggaaagatggctggtttatcgaatcatcgttgattactcgattggttaagaaagcgaagagctttgccccaatgctcagggaagcagggacaaactgagctgtgagaagtaggtaggctgcctttcagatttcagattcttttccacatcttcccctttctccccatcgctttcctgcatttgtacctgtcgctgctgattctagaaatccagaatttatttggatgaactgagaggtgtgaaagacagagacagaggagaggaggatggggttcttcttcttcgcgtcccgtgctgctgctcggttcttgggcgaggctaggatcatccaccccggcgtctccaccgctgcgcttcttgttgcagcagccaggtgcggccatggccatctcttttcactctgaaatcttctaaaattttgccctttttgtgggttatctttttgtccattttagcccccctttccccatcttttcggttttgtagttactttcctgtttgatctacaactctgacgctatagaacagtagactttgaggttttgttctttgacacttggataatcaatcatccatccactgtactgtataaaaaatagttcccctttaacgactttatccataagatcggtcccaagatttcagatttcagaacctatccgtctactactttttgtatatgcatttgctaattctgtgatttgtttattggcttggctctgcagtggtggaggccttgtggcgtatgctgattctgctggagagaatgcatcatcagagacatctcaggaggctcccaggaagaagaaggttgtggttcttgggactggctgggctgggacgtccttcctcaaagatcttgactgctccaagtatgaagtgaaagtcatatcgccccggaattactttgcatttacacctttgcttccgagtgtgacttgtgggactgtagaggcacgcagcatcgttgaaccgatacgaaagatgcttgagaaggtatgccttgtgttcatcaatagaaattccgatacgaaagatgcttgagaaggtatgccgtgtgttcatcaatagaaattcttgagccatgttaatttagccatctatgttactttggctgtagttgctggagtgcagaattgtggactgacacattgattgagtggttgtgccctattgttcttttgtagaaaaggaaagatgttgcattctatgaagctgagtgtttcaagattgatgcatcaaagaaagctgtccattgccggtctgccgttggaacaaattttgatggcaatggtgattttatggttgattatgattatttagttgttgctcttggggctacagtaaatacattcaacactcctggtgtgatggagaactgctactttctgaaggtaaaaatcctgaacgacattcagtagccttccatgttctgttatgtttcatattccaaccctagactctcttccaagaactgagcctatctcagttggtagaatgtgtaggtgtgcactcgcggttcccaggtctggatgttcttaggcttgaatttgttgcttatcatccttcacacacacacaaacaaacttgttcagtatatatatgtcatgtttgttgcgatgtcccaatgcaatagaatgattaatattttccctggagtagccactcggccacccaatatcattacatcctctgaaccatttgcttctgttacataatttagcccctactccttagtacaggataagtattcagtatgttgtaatgacattcatggaactacttactgtattctcgacttacagtttgcattgtaaaagtcaggaagtagaggatgctcaaaagatcaggaggaatgtgatagactgctttgaaaaagcttcacttcctaacattagtgaagaggagaaaggaagattcttcactttgtaattattggtggtgggcctactggggttgaatttgctgcagagatgcatgattttcttgttgaggatctggtgaagctatatcctgcaattcaagattttgtgaagataacaattattcagtccggtgaacatatattgaacatgtaaggcccttgctactttcaagaaaacgttttagccttctgaagaagaaaatttgttgtagttgtatctgttttctgctaaatattatgactagttttggggcattggaggttccttttttaggcaagcatttcaaacattatgaaaacaacagttccatatttttttaacattgataccatcaggtgtagcatcagcagatgaccttttcatccttcctgtgtgatcactatgtgttgtttcaggtttgaccaacggatagctacatttgctgaaatgaagttccagagagacggcattgaggtgaacacagggttcagagtggtaaaggtctctgatgatttaattacaatgaagagcaaatcccttggtgaggtatcagtaccatatggaatggctgtttggtctgctggcattggtactcgtcccgtcattatggacttcatgcaacagatcggtcaggttgttaaatttaaataaggtcgtttagtctgctggtattgaaagttgaaacttgtccagtttgcctgatcatgttttatttcaagcatttaattgaagtatccaaatgttctctcctttaacagactaatcggcgtgtcttggcaactaatgaatggttaagagttcatgagtgtgataatatatatgcaattggtgactgtgcttcaataactcaaaggaaaataatggtatgtccaaagcattccttatatattgtttgacagccaatagtgattgacttacaattccataccttgtattgatcatgttagccacatgtttgcattaggaagttagcaagtatacaatgccttgtgaatatatagattggttgcaagataatgtcaaaagtattgatttttttttctgtaggccatacatgcatttaggcactcaaaagtttatatttggcctaataacaagcaccatgaacatctgagttaccagcatttgggtttatattttatcaattcgctgacttacttttcctattctttcaggatgacatttcaacagtatttaaaatggctgataaagacaactccggcactctaacactcaaagagataaatgatgttcttgaagacatttgtataagatacccacaagtagaactgtatatgaaaagtatgcacatgcttgacattagggatttgataaaagatgccataggtgattctcacaaggagtcgatggtggttaacatagaggagttcaaaaaagctctgtctcatgtggattcccaagttaaaagtattccagcaacagctcaggttgccttcatttccatatgcaagtcatgtcccaatgatattttatcacagatttgttgtaatatgtgaagaagaaaccttgcacgtgtgaacattctgcatttcttgaaactttgccaggttgcagcacaacaaggacactatcttgctgaatgttttaacaagatggaccaatgcaaagaacatccagaaggtccgttgcgcatgacaggaacaggatcaggacgacacaatttccgcccattccggtacttagctttatcgttatacctgcatagtattgatttgggcctgtagtcagcttgttttcattagatatgctcttgacagaatttttttgcatgtatggtgtgcaaaactgcaaatgtatgctaattgagccaaatcttttttgtaacattagctcatttccctctacttatgcttgtttatctttccatgtccttgttttcaaggtacaagcatcttgggcaatttgcacccttgggtggagagcaagctgctgcagagctcccaggcgactgggtttccatgggccatagcactcagtggctctggtactctgtatatgcaaggtaagaacctgctgtcagcagcaaggccatcctctaccatctgtctgaactctactatctgtctgaactctgaagaaatcaaccatggcatctcattctactactgctctctacttcattcacagccttatctcttgcatcatgcctctgagcttactacaattcgtttagctgcaattctaccctgagagtttgtttctttcctccatgttttgtgtagcaaacaagtgagttggcgcacacggatgctggtggtatccgactggactcggaggttcatatttgggagggattcaagccgaatttagcactgccaaatgctgcatcatttcttgtagagataacattgctgaataattttgttgtctttggctgtgtttagttcgtgtgccaaaaaaaaatttttgaagtatacggacacatttgaagtattaaatgtagactaataacaaaacagattacagatttcgcttataaactgcgagacgaatctattaagcctaattaattcgtcattagcaaatgtttacttgagcaccacattgtcaaatcaagacgtaattagactcaaaagattcgtctcgcaatttacatgcaaactgtgcaattggtttttttcgtccatatttaatgctccatatatgtattcaaacatttgatgtgacggaaaagttgaaagttgaagaaaaaagtttgaatataaaccatgcctttgtaacatactactgttgaataataatgtggtgaactttctttgggcaaggaaagctgtttcctgtccctttcttgtcctgccaaccgaagctgacacttgataacactacagtatccttacatgcctgcactccagtgttatttgctcctactgccacatggctctctctaactgtgactgagagggtgagagtttctgcaatgatcggtcctctttagatcctccgagctattaaatagtcctctaaagttttgttatttagagtattaaacatagattactgataaaactcattccataatctctaaactattttgcgagacgaatctaataaggtatagtaatccatgatttgctacagtgatgctatagtaatcagccgctaatcatggattaatatatatcattagattcgtctcgtaaaatagcctagaggttatataattaattttatcagtaatctacatttaatacttctaaataggtaagattccggagaccaaacaaagccaagtcgcttcgatagtcactgactgggtcactgcagactgcatccgataggtgggtccctggcagctacggtgggcccacttgtcagccacaaccttaatactattgccttggataggtgagaagtgtgaaaatagtagcagttcagtagctgagtagcaccaactttgactgtcagtaatcagtaataacaaagctgaaagcaagtagcagtaataacagcgtgtctgcctcaaaggtagccatgaaaaccgtagtactacatcacatgtttggccgtaggccttgcctagccgtatgcatggtcctagtatacgtagtagtattgtggtacgcatgctgttgcagttgcagatggaatacgagtagagatgtggtactaatgcagaggatcaacagtaccacgcattagaatcactgtgcaccgtcggatcaagagtgaaaggaccagattgtgtgctacagtaaattcggaacagtaccaaatagtgcgctacagtgctttgaattctgtagctacagtaaatcgacactgttcatggcattagctaactgttcccctcacatgaacagtgctcttctgcattacggcagacgatccggatccgagatgtggtaccctctcctaatgctgcactgagcaaatggtccatccttgcctccctcatctgtcggctccatcacatgaacaccaccacccagtcaccactcaccaaccaggcaactctcttctcttcatatagctgaattcctattaattgcaataccataatatcatgttgaattgtttatgctatccattatgcaattctggtgtttataagcttagtgttgattatatagttcattttaaaaaaatatcacagtgcatcttatatgacttatattaaaaatagtaaattttacattggaccacattttgttattattgatgtttagctttcgaccatcttttaattaaggttttcacttaagactgaataattttatcttggtggtaccttagaccaccctcaatttttttttccatctacatccaacttgtcatatgtcaggaaaaaaaatctatatctttttttagataatagaatagaatatcccggcctttgctcaacgagctacagccaaaaaaaaatctatatctaactgtcaaagtttattggcgagtaggagccgacgtattcgaaatcgttcgtatgtttgagaagagagtagagtggtctaaagtgaaacaaagcaagattactcaatccaagatgaaaacattaataaaaggatggtctaaacaaaataatggtaataaaaggtgaaacaaattaagtaaaatttactaagaaccattacataaaaatctatgccaaaagaaaatttcggtcaaaattgacagtcttcttctcaaccatatccattgccatattggccgccctatgttgtcctgcatatttgttggtcctgctgccgatggaagatatcaggacagttaaagaactaagcaaaatctggataaaccccaatcacataattgctttttaagatcatagtaatagtcatccatcccaaagagcagatcgataaaactgatgaatatagttctatttcttgtgcaagatatgaaggtaataaaatatactccacagtgggtgcaggccagaattctcaagattctatctgaaccgatctgctatgctctctactctggagtctgaacagatcttaaccgttgttttcccattccaacgacaatggtcgtaataaccatataaaagtgttagtagtaccgaccatgtactatccttttacaacgttttcttccatgtttcattgcagttgccgtacagtaaaagtgcaattacacgttggaatgaatgcctgtctcctgactaatccatcccataataatatcccatcacatctcacaagcttaaactccaaggtttcttaagacaccttactagatacgcacacacgcaatcgagaacacattttgcatagatcgagtgcctttctctcgcagcatgtcctggcccagatcctgcactcacaatcaaagaaaaaaaaactaaaaaaaagtagagagaaacagagagaaaatgcaatagatgaactcattagcagcatagactgagcttagctgtttctgtactgtggctttaccttgaagtttcatacggagatacggctcatgttaggtgcccaacagcaagaggagcttctcttccaaatgccaggacatgtatgcatggatactaacaagaaaagagaagcgtaaagcttttgctgttattttagtcagggaaaaaggaaaggtacacttgatgatgtctcaacagttcatgatgagcactgcataatcatcaggctcaactgtagctcatggtctcatcccagggagatgattagtgtaatacaggcaacattctcattctcattctcattctcattctccaatccaaaaatattcttttgcactcacccaacccacccactgatataatccatcattccattcaactacacacctaatcgcagtaaattgttactccctccgtcccattttaagtacaaccatgagttttcgtattcaactttgatcgtccgtcttatttatttattttttatgattagtattattattattattattatatgataaatagtactttatatttgacttatatttttaaaaaaattaaacaaaacagacgatcaaagttgggtacgaaaaatcacttataatgggacggatggagtaattgggtttacataagaaaacaagctggatttgtatgcaaattgcagggaatacatgcctgcaagattccaatggaagaagaaagcatcaagtcaggaggggtaactagaggacagatcaaaggagatggtagtaacatgcacgcatcaccaaccagtctacactacacgcatctaccttcactcacagagtaacagtgccatacacacgggtgcagtagtacgtgtacaaaaacaaaacaaaacaaaaacatttgtcacatagttgcatcatcaactccatctttaatacttcccaactcaccagcattgttatcagctgcaactctgaactccaagaagatgcattgctgcattacataggtaggcagtttgtgtgtgcattgctgttgctgcagagatgggagaagctgcagaggaaggagcagtggatggaagctgccatggtgaagcagcagcagaagctctcgaggtgctcaggtccatggcaatggcgtcctcctcgctgacatgctccatcccacagttcccggcgaaatggcagtctatcaaggacaagctccggcagctctgctccggcctggattccctgtgcggcagcgtcggcttcggcgtcgacgtcggcggcgatgaggagaggcatggcgtgctggtgcagcttgtggcgtcggcttcggcgacggtgaggagcatccaagccatggcgtcgcagtgcggcgatggcacgtacaagggtgggaggctccggctgaggagtgatttggacaacctgagctccaagctggaggcgcacatgaagcagctcagggagatggcttcctccgggatgccgtcgccgtcgcaggccatcgtcgcggtgaggccaagcgccgacgccggcgccggcgagaagatgttctacatgcgggatctcttctccagggtcaggattggcggctctgtccagaggagccagtcgctggccaccatcggggagctcctggcggaggacgaggtgtgcgtcaagatcgtcgccgtcgacatcgacgacggcgtcgccttgctcaccggcttcctcgagtcgagcgacgcgcgcctccaggaggaggccgccggcgccgtcgccatggtggccagcttcgactcctacagagggatgctcgtcaaggcaggcgtcatcgcgccgctcgtccagctgctggacgacgcggccgccaccgccgccgtcgccgccggcggcggcgccaccgcggtcgccaaggagagggcggcgcaggcgctgcgcgagctgacggagaactcggacaacgtgtgggccgtgtgcgcgcacggcggcctcaccacgctgctccacgcctgcggcgacgccggcagcggcggcaagctggtggcctcgtcgttcgccgtgctgcgcaacctgagccgggtggaggaggtgaaggtgttcatggcggagcagggcgtggtcaccgagctggtgaagctgtcccagaagaaggaggaggcgcgcaagctcggcgccgtcgagctcctccacgccatggcgctcgacgacgccgacgtccgggaagaggccgtgagcatgggcgtgatccagtcgctgctccagctgatataccctgacctgccatactcctacaaggcaagggaggtcgcccttgcagccatctggttcttctgcttctcctccgtgaactccattgatgacctcatcagctcagatgttcttggctggcttctcttctacctcaacaatggcgattacgccgttcttgagtgcacactgaaaattctgcggcatttgtccgaggtttctgaggagtacaacaggatgatgggcagagcaggttatctcagtgcactgtcaagcttgcttggagcaaaatcatgtcgggttcgcgaaatggcagctcaagtgctctctagcttgctgttgcttcatccgaatcgcgtgattttcatccaagacggcgacaatttgaacaggttgctgcagttgcttgatccagctgagggaaaattggtggcaaaggacttgatcctttctgccatattgtccctggcagataccaacagtggaaggaagaagatcatatcatcagagcatttcagcagcctgaaggaattagctgatactggggactttgatgcaaagaaggttgttaagaagctaggaactaacagattccaaacaattttcagcaagatatggagtgtttaagttattttgacttcttttttttccttcagttcctttactgaatacacccttgatttagcattagtttatttgatttgttgtctatagtttttgcttgtcttgtaatatctatattcataattatgatttctctatgttgtacatttccacttctgtgaaattcaagtatcaatataatgccttcagacttctgtcatgatcaaaaccaagggactatatactagggtttacattatcgtcaataaccgcggttaccggccttaccgtgggggtacggtaatagaaaaaccacggtaacctcctcaaattcaaataatttttttaaaaaatgaatttttgataatttttgcacagttttgtacggtttttcacggttaccgtgcggtaaccgtgcttaccgccagggctgtggcgcggtaaccccggccccagcggtttgggaaaccctgctatatactgctactcttctgcagtttcgtttctgaatatagattagcaacaccgatttttactggccaacatttagcaaggcaggttcatcaaactgtttggcttctgatgaaagagcaatctcgattctcatctcatcagtctcaatttgcagggacacccaaagagtatcacttttattcctttgtgaagcaaggacaccaaaagtacttgaaaacagaaaatacttattttccataccatgtattctgagccgtcaactagacaactagacaactccagcaaatatcctgtactacattgtagataggccaaatacagcttcggcatctgaccatttgttaagactagcaggactgcaggaccaagtgtgtgttaacctgttaggaagtagccaaactaacagattaacccattcttattactttactggtaggagaaaaaaacagagagatagaacaggcaactgacaagtaaacacaggcacacagccatactgaaggtctgaagccaaacatgaggagtaacatttataacactgatatctctttcatactagcaaacaatgatcagcatttagtgagacaaagaacaggttgtcctatccaccaatttgcttgtttccttctcctatctttcgatacaggcgttcatcccgtgatacttttaagattagcacgtgaatctccagcaacgactgatccaggcttctgtttgtgggccaaaattcaccagattggcttgaattttgagtctgtaaatttactcacaatctgacaaccaatctgatttgtgatagactgatagtttacatgccccaagactgaaaatgcagtggtttggactcattgtcccatattagcatgcttatttatgcattttatcacccttatcatccctgggcagctaaattttgaacttactatactggagccaaacaaatttatgaggaaaaaatagaggtgtcagtttgtcactggatagttgtttcttgctgtcccaacacacaaggaagcagctaaagacaaaatgtagggaaatcagtaagccacttattgacttaaccacaccatgaatcctgtacttactcgaagtctcaaaccaaagagcacacttacaattccaaaacaagaaaccatagaatggactcatcactactactatctcttttcacacattgactagcataggaaggccttgacaaaagaaacaaaaaaaaaagaaagaaagaggaaccagaccatgagatatgaatgtaacagtagccggaccatttatgcaacacgcccctgcaaaaagaaaagcctcactcgaatgctagctcaagataagcaggcaccttgaacactcaagaagaagacggagctgagctgatggaaggaacggatcaaaccatggtggttcatctcaagcttctgcgaccgcctcgggtgcttcgacgtcgagcgcccgcccgtcctcggctgcagccgtgaagaacgagcgcttcccgaccaattcggcaacccgcttggcgcatccggaatcgcgagggctctcgtcaggaggcggcatggtcctgatctttgggagcatttcagcaaccttggatatcgtttgaggagagagtggatcattggaaggctcgatgaccttcgctctgatttcctcattctggttcgcatcccctgatgatcctgggagagactgcttgcgtcgcctctcctgtgctccactgcttccaagggaagcgccaggagtgaggctgtagcggctcgggatgaccctcatcttggagctccccgccatcctcttggcagtggcggcggcggcggcgctgccgctctgacttgacgacgcacctttgggcttgagctcatccaccaccttgttgcctccccttgtgtcagtagccttgccattggattgcctcctgggcctggggctcgggctcctcgccttcgctcgacttgctgctgttccttgcctcgagtccagtgtctgccttgtattgctcgacggccatggcttggcggggacggcgaattgcttggagggtcgggtttcttctcgaatggcgttgagcttggtggtgaacggcttggctcgcgccgccgctggtgccttgctgccgacgccgtggtggatctccaacggcccgaggctgacgcccctgcgacgctgcaccggaggctccttgattggcttcaggatccgcgccgtgccagcgcgttgctgttgctgatgctgcgccgccgcgggcaccctagggttcgccgcggcgatctccatgggcccgaggctgagccccctgccccgcgtcgccggaggcttcttggtgcgcagcggatgcttctcacgattgacgatggagatcacatccaggggcccgaggctgaggcccctcggccggggcctcaccttcgcgaccatctcccccatcggagcgtcgtcgcggttgggctccggctgcttggagacgcggagatggtggagccgggacgagaggcgcaggatctccgcctcgatgtggccgatctcggcctcgacgtcgtagccggcggcgacatcaacaacctcggggcggtgattctccttgtcgcccttgcggacggccgcgacggcggggctttgggggagccaagccgatctggaacacgaggagtcgtcgaaggcggcgttgttccagacgtggaccagcgggatgagcgggtcctcctccatcgcctccgccgacgaacccccttcgcctcctcctcctgcaacaacaacggcggtggccgcagagatcagagaccaggcgcaaatcaatcgacgaacaaacaaacaaacaaacaaacaaaatcgaaccgaatcgtcagcgagagcaaatcgacgagcacgcacctggatcgaatcgatcgattgatcaatcggtcggttgattcgagcggattccttcccctttgcgcgattagcgcggagcttggatcggattaggtggtgagaacttttgaaatttgtgggaaggggaggatgatgcgaggagggggcgagaggaagagggtttaagagccaggtcagattcgaccgttgggacttggggagcggagggggagcgcgccgcttatatatttacaagtggatttttctttcttagaaaaaaggaaaaggaaaatacatgagcagacactgcggatggagacatggtgtgtggtggggttaacaagaccgaaagacgttgtaggaagtgcgcatccaccaaactccgctccttgtcttctctccatcgaaccatcctgaaattcattttccttttgccagttttcgtctcatttttcgggggacatgtgtgcacactatactactcctttcaaaaaaaaaaaacagtatatgctttttgtgtgtactacgctagttactactacctccgcctcaaaataagtgcagccgtggatattcgtgcccaacgtttaaccgtccgtcttatttgaaaattttgtgaaaaatttgaaaatatttagttacacataaagtactatttatgttttatcatctaatagcaataaaaatactaatcataaaaaaattttaaataagacgaacagtcaaacgttgaacgtgaatagtgtaaaactacacttattttgggacggagggagtaccagtagagtatggtttctttatacttacgtttttaacgttgtttaatcgaggcatcgagtgttcctcccatacaaattagagccgtagattgcacgaatgcgcaaaccccacaaacagaaaacagagggaacaggaatgtattggagggcgtttgctttctgagttcagaaagttgccgccaaattacaaacttgtgtgagttttgaaatttgaaaggggaaagatcaaacttattcatttgttcttcgcacgtcacgtcatatagggcctgtttggcacaggctggagcttagacaaacagtttcagctccaccaaaattgggagtggagctgggtagagctctctcacaaaataaactagagttatggagttgggtttagtcagctccataactccactccagacccaactcctggagctaaatttaggagttggagctgtaccaaacaggcccatagtcgctaatgcaaaatggtacttttgcttgggctgatggacttgccaatttgccatcagcccatcagcagcccatgcgtggtggcggccttcggggcatgacatgaaagccccttgtcttcaactcaatgggccgcggaaacaagcccattgagaacatagtatgacggaactcgaggaaattagcaaaagcccataggcaattttataccccatctccttataccctttttattattgactttgcttcagtacgtcacgcatgtacacatagcatgtggtcaggcatacctggcccgtatctcacgagtcacaatcctaaatgaactttctcttcctttctcttctttatttgagaagatgagctaattttctctgtaataaacacctaaacaaaggaagaaacactaacacaaatcgcaatctgccaagcaacgtgatcgtgcagcttgtggagtaagcgaaccaaataattgagcagctttgccaagtaacagaaacaaataaacaagtatgccaagttgccaagccatagagcggtagagccccgtcacacaaacggtttggtacgatgcaacctagcttcccggggcacagaggagacacgagacaggccggatcgccgtcagttgggcccccagagcagcaggtgcatgatcttctccgtcttcatgatctccgtctccgccgcgtgccgcctccgcacctccgcctcccacgctctcgctctcgccctcgccctcgccctcgacatcgtcaccgcctccgcctccgcctccgtcgcctgccggccgcgcccgtccaccgaaggctgccgctgctgctgctcgcccttggcggcgtcgcgctcccgcagcagcgacgccgcgcggaacgcggactcccgcttgcactcccgcccgttgcacatcaccgccgcgccgatgcccaccaccacggcaccacctgatgctcgcgtgccgcgctcctcgtgtcgatttcgtgtgcaaagctactagtaatagccagcttagccagctaatttgcctttctggcatgttatatagggcgccacgaaatttttgtcgcccatgcgatgcggtgacgtgacgtgactggggctcggctcggccaacgggtggagcgcgtcgtgacaggtcggtcggtcgcggcctcgtggggttgcggcgtcaagcgtgcggtggggagcgcggcggcgtgcgcgcctcgactcgacaagtcgacagggcgggggggaaacggtggacgggagcgaccacggatttgggccgagccgttaggcacacgacgggggccgtcgtcgtacggcgcgaacccagagaaaacggccgttccaaaccggtgggtatgtgcggctcgcgcggcgcgggatgggggtgtgcaccgcacctggtgctctgttccctttctcctctccgcgtcggtgcaaccaacaactcgcgaatcggccagcgatatgttcggtttttattttcttcgctctgtgactctgtctctgtctcttccatttcttttcgtttctattttacgaggaggacatgttcgagttgtacgctgcggcgccggcgcaccatgctgcccactacgctctttttttctctcgttaagatagtacttattttatccctatttttattagcacgtttttaaactactaaacggtgcggtgcgttctgtacgaaaactttctatatacaagttttttttaaaaaaaatatcaaacgtatacatttgttaagtttgcaatagttaaaatttaattaattatatgctaatagttttcttattttacgtgcgtcaacttaatctttattttcatcactttttagagcaagtacaatgagagactataagcccgctataaacatatttcgaggagatgaaatagaagagaaaagaacagagggctacagatttgtagccaactgaaacacggactcccaaatacatgtgtgcatgacaagtgtgaaaagataaattgactattaagttaactatagataatttaaagccagcggttggctatactattaaacttgctcttaaacaccccagctgcgaacccacgcgcagcctctggatactcccgaggatcaccgccggcgcatattcgtggcgccgtttttattttagtgcgattgaaatggagtacaacaagtgtgtttagtacttgttgattgagttgattccgtcgcatttggcgcgtgcccatttgcttagtactaaagcccagtctgtacgtagaagactaaggcttaaggctctgttcttttggttgagttgggaacccatccctccggtacggaaaacgaaacagtccattagcacgtgattaattaattatttgctaattttttttcaaaaatggatcaatataatttttttaagcaactttcgtatataaactttttgcaaaaaatacaccgtttagcagtttgaaaagcgtgcgcgtgaaaaatgagacgggggagttgggaactccaggaaacgaacagagcctaaaggcaaacggaatccacacaaaagagagaatttcaactgttataaatagcagccgtgatgtggagagtacgctgattgttggatacagcgtgcagctcttacggcggcagccggcagagcgtgaagaatctagaggatgttgaacatggtaacataagacaagtatcttctgcaagcctttgtgatgtttcatgtgaactaccactcaacttcaacatatctttctttagtgaagagcaaaagaaccttattaatttttctttaacagagaggagcggtagtagagtactgatacatgacttcatgtgtttgtcacttaattaaaagttcccaaaccgtttgatttgtgttaaatcttataaaatccacaatctcattaggggttatatttcaccaacaaacgtgatttcaaaccatgtctgacaattacgcacgtgtgattacactttcaatagaaaagtacttcatccattccattttaagtgtagttgtacgtttctatgtctaatatttctgtccattttatttgaaaattttattaaaaaataaaaataaagtcatgtctaaactattattcatgttttataatctaataacaataaaaaaataattacaaaaaaaaattaaataagacagatggtcccacaactatgatatgggacggagagagcagtgatgtttataaaaacaatgagagaggggaaaagaaatgtttatcaatttacgagtgctcaaaagttaatcactaatttgactacacactttcagaaaagatcgtctgtgactttgttcagtgacaccagtcgatagaatattctaccggtgcaaccaaacccaactctcaagctaccctcaaccctggtttttgggaatcagtgtgtagtttactcgtcccaaaccagcaaccggagccccctgtttcgcactcatcgcgtccttcctcgctgccacccctccccacccgccggatcccccatatataaatgcccctcacctcgtctcctcgccattgccgcaactcacagctcagtgtcaaccaccacaaccacaagcaagcaagccatacacatcaagaaggcgtctgcgtgcgaggaaatcatccggtttttcaagctaaaagcgtgaagatgagctcgtcgtcgttgagcaagaaggcgtcgtcgttcgtggtgacggcgagcatgagcgcggtggaggcgctcaaggaccaggcggggctgtgccggtgggactacgcgctccggtcgctgtaccagcgcgccgccgccgccaagcaggtcaccggccgcgccgtcccggtgtcgctgtcgtcgcagaccggcggcgcggcggcgtcctcctctcccgccgccgcgtgcggcagggccgccaggtcgaagaggtcggaggaggagaagatgcagaaggcgtatcacctcgtctgctggggacctaattaaaatctgttcttcaaattcgtgatttcgtgtagtagttttttcgtttgcaatttgtccacccctcattttctggtgtgtaaatcgagccaatacctgcagggatttttgtattttgatccgttttcatgtactactacttccccatctgattctgatggagaattgctatgtgcaaactacggagtaaaaatcaacaagatgatgcgattgttgcacggaattaattacctcttctctgttgggtgttcatcatctgttgcaacagaaataaacaaaaaaaaagaatctttagttctaaccataactgagttgctgcattgttgttagtgcttggtagtagtggttgcatggcagagatgccaaacgcatgattgagtgaagcgctgatgatgatcagatcaccggccaaatgcgcatcaacatggaccggttaccgttgttcatcaacgctgcactcaatgatgcatttgattctctgtttccataccgacttgtcccctctgacatgatctgcatctcgttatataatagtgtgcgctctggaaaacactggatccaagcttgaacaagtggtactgcgtgtactactgtactacagctgctgcaactttcgtgtgttagatcgagcttgtactactgccaagtgattagcataggggtgtgtttagttcacgctaaaattagaagtttggttgaaattggaacgatatgatagaaaaattgaaagttatatgtgtagaaaagttttgatgtgatggaaaagttaaaagtttttttaaaaaagtttgaaactaaacacgatgtaggtagagcgtgtcttcacggccccaacgagtttcacgaatgtacaaggtgtcgaaccactgcccagctacaactagatttcacaaagatcaaacatcaagtttggtagtaccaagtatattgcccacaacaatattcaagattgtgtaaaagaaaaggcatacgtgcacactatttctttgtactgctcacccaactaatcatcctggtgtgtatctcaggagtaggagggcatttcaacctcgtcgtccatgcgagtcatgacacacaattgtccagttaaaaatgcttaactggtcatcaggatgcgtggcatgacacaccacaattgtccggttaaaaatgcttaacacacaaagatctacgccatgatttgcctgcttgggttggttgctgatgcactagtacgttgacctcatgttatgatgtcagcatcactagagggtgggctagctttgaactgggcttagtcatggcccatgggcttgtaaacatccaacgaaggtcataaaaacatgccgacgccgaacgtcactagtctctacaacatgcaactatgcaaggttggagagtaattcacggagcgaatatcgaataaccgccgaacaagcgcttaattttagcatttcgattaaaattcttggttgaattgcactatgaacaaaattacttctactacaagtctacaaatcaacaagttaaacgtaattaacctctacatgatcgatctcccaaattaaactaacctgtaggggcgatcagatcagaatcaaacagttcgtgaggcgccatttggtcagtattttttttttatccccgatcggcgtctcgccggagaaaccagagcacctcgtcgggcg

SEQ ID NO: 9799 - DNA, 29364 bp, Oryza sativa
cggggcagcagcactttttcaagcggtagccaagccaccatcagcaatatacaagctaaagaagaacagtgagcacatcagccatagccaagcaatctgcaatcagaagggtttgatctgcaatcaaagagaaaactatgtgccaaaccggtagcaatacaaatgtgtacagtacacagtcagaacaagagcataatttagacaaatttgtttgtcagatcaaatttttaagcaaaacataagaaacagcacaaaagggtatagcagaagcaaaatttggacacaatgattagggatcacttattcattatagttcttccatgctgctctaccacagcaaaacgtttcagacaccatcaaaccagacttaaggatacacattacaggtaaatagtacacaatgaaacgggacacgaccaaggaccagaccagacaaccatagctccattggggaagacaaataggcagacttgtgaaccctagaacagcagcagctccatggctgaggacttactggccaccacggaggcggagcaccaggtggagtgtggactccttctggatgttgtaatccgcaagggtgcggccatcctcaagctgcttaccagcaaagatcagacgctgctggtccggggggatgccctccttgtcctggatcttcgccttcacgttgtcaatagtgtcggacgactcaacctcaagggtaatggtcttgccagtcagggtcttcacgaagatctgcatcccacccctgagcctgagcacaaggtgaagggtggactccttctggatgttgtagtcagccagggtgcggccatcctccagctgcttgccggcgaagatgagacgctgctggtccggggggatgccctccttgtcctggatcttggccttgacattgtcaatggtgtcagacgactcgacctcaagggtgatggtcttgccagtcaaggtcttgacgaagatctgcatgcctcccctgagcctgagcacaaggtggagggtggactccttctggatgttgtagtcggccagggtgcggccatcctcaagctgcttgccagcaaagatgagacgctgctggtccggggggatgccctccttgtcctggatcttggccttgacattgtcaatggtgtccgaggactcaacctcgagggtgatggtcttgccggtgagggtcttcacaaagatctgcatctgcacacacaattaccgaagcatggtcagcaactatgaacatgaaattataacaataccaagcaagtacagcagaaatcagtcaatcaaattattccaatatgttagatacacgacctaaaccacaataacatcagtgtacctatcaacaccaacagtgacctaacaaaatagagagacgcaccgtgctcgagttcacaaaaataatctgcaggtctatgaactactagaattccatcggcaaactgattcaataactactagcactatcccgagagcacataaggcaggttaattaacataggctagaatttacaggtgcaacagttgataagataggcataagcaagtaaaatatcctgaaagctatgctatgtaatcactaatcaacaagacgcagcccttagattaaacatgaacagagtagaatctatgcaactagagggactgaatcaaaaacaacctaagcaaaatatacctgaagctgctacttggatcaacgagaaaaacagagactaaatcctactaattgaacagatcggaacaaatcacaaccctagcacagttctacttctagatccgaaccaatcaatacttggaccacgaacagcatcgctcataatcacagatccagcataccacgcgaaccccatctaaacctgttcaaatctaccacagatcgcaaaacggagactaaccacaacatctcacaatcacgaacaggccgggaaatcaaatcaaacgcgaggaacggagaggatcagaaaatcgcataccttgagaaggcgattcgacgcttcgcttcgaggggagatttttttttctctgcgattttggggttcgattgacggaggaagaggcgaggagggggtggggtatttataggtggggagggggggactcgtgagtgggcccaggggtgcggtgggtggggcccagtgagaatatagacaaataaagaaaggagagagggagaggcggtttggggagtccgtccccaccacgcaaacgcgagaaggaaagaaaggaacggaaagggggcgggtccagacggcgccgcggagatatcgaggaggtggaaagctgatgccgtttgctcacggcggggttggtggccgttaacacgcagcgaagcggcgttactgccgtgtacgttttgtgacctttcgaaagagagccccagcccaagaaaggctggccaggtttttttgtactgtgtacgattacgatggaagaaaacatactcgttgttttgtattggtacatactgggccgtagtaaaattagaatcagttgttaattggttattatatataccatcttaagctaccaaaattaataaagttgtgatggctatggtatattttggtagtgaattatattgatttggtatatattagaatcaatccaaccacaacacaaccaaaaatacctgaagctcaatattgatggtgcttttcgactatctagcaaatgtggtgaatggggctttataattgaagcagcccaggatgcactttgtgcagagactgatgtgatatatatatatattaaatttgtttggtgctatataagaaacataatatcttcgtcccataggtgtcttcccagggaaaaaaatatctttcaaaaaatcaaatagccaaaagaaaatcatgatcaacaaaataatcatcaggtcgacattcctgatggcacgtagcatctgccctggcctcccacgcgcaggcgcagcgacgtcggcgtgccgacgtgataacggagacggagggagacgcgcatctgccaacggctacggcgccgtgccttgcggtccaaccacaccccacgtctctttctctctctcctgaattttctttccttttttccatcatcaaagctgcatgatttggccacacgctggtagtaccagcaagagccaaggaccattcttgctttaataaaaaaatcaaagaaaaatcgagaggctgaggctgagcctgagggagagaggctgtggttttcgcaaaggcggttttccttcttatccgctggtttttggttttccctcgtcgtcgtcttcctcgtttgagaatcacagtgactttgcaatagacaggcattgcagagaagagagagattgagagagattcctatctctcatcttcagatgactgtttgtttgtagagattctttgcagtatttgcagctgaactgcatcaaaatttttaatcagatggtttcttgtagtgttagtttttctcgttgtaagtaaaggatttctagttctgtactcatgtactggtactgaaagtctgaaacttggcgtgccgcgttcagttcagttcagtagtgtctaggcaaggtatcttcagataatcagatgaatagcatgaacaaaaaactagtaactgaacactacatgattttaatcaatggcatgaacgaaaatagagaaacaatacatgattttaatcagaatgtcaacctgacaacctggatttgctcaagggctccatcggttgatttaataaaccaaagtcaaagctaaaatttgaattttcaaacttaattttaaaatattttcaatgtagtttttttaaacattgtcttttacctcctccgtcccaaaaaaacctaatcccagctacaaacctggacataggttcatagctagggtttgtctttttcttgggacggagtaatagctcattaaaaacacatatacaaaagttttacctgtaaatcaatttgtattatactccctccgtcccataatataagggattttgagtttttgcttgtactatttgatcactcatcttattcaaaaaaattatgcaaatataaaaaatgaaaagttgtgcttaaagtactttggataataaaacaagtcacaaaaaaataaataataatttcaaaattttttgaataagacgagtgatcaaagagtgcaagcaaaaacacaaaatcccttatattatgggacggagggagtattatggtttattagggaatgtgggtaactgatgaggttgcaggttgctgtcgtttgtcatctaatcctgctaatgctactagattttgttagtaaaattgtgctacgtgcgtaaggtgaaaggagctgtttgctgagaattatttttttgtttcccaagctgatcaggacagcatgttttacggtggctcttaagtcagcaaccaattgcttaaatgacacttgcaggtaaacaaacacgcaattcatcattgacttgtaggatcaaccgacgactccgtcgtaatttaatagggccatacaattgaaaacgaccctgcaactaatgccaaaccactcgtgacgtgttttagttggaactaatctcttctttgtactgcaagttgaagctaattccaggactaatagtagttaatgtttggccaaatggcgattaaaactatgcttaacgatgagcaagataagaacaatatgtgcattggatgactaggcaggtggcagcattcgttaggctcggttgaattgaaccattagttgcggggtgcatacatattgaacaagactattatgagcctccaagctggaattatgtggatgtttctgctttcgatttcagaagtctttcttatgaattgaatgttctaggataatctagaagactagaacgagcgttccatgaaaattctagaattagttccttcctaacattgaattcagttcccgtacctatgcgtatccatcgagttcctccaatgtctttttttttcttaatctcattgcgcaaattatttgtattttgagaatatgttactctcataacttatttgggttcagagacaatggcaagagtctccagcgattggaatattactgtgagtattgaaatggcacaccgcacagatcgttcttcttttgacatatttttttggacaaaattcttttgatctttgccacaaatcattattgtcggaaacaatatcttgatctagtagacctattttgtttcaataccaagatctagtagtcatgatcagagagtatatatttagaagtctgtccattcagattctttgacacaatgtttatacatgacatgaaaaatttcttcgacaatattgcttcttgtagccagctcttttggttgtggaaataagtagagaactacagtctagagacacactctgagcttctttttttttttgaacgaattacacactctgagctttcagccgaaaactaacaatcccattcatatttgctcttattcacggccatttctcttgttcagacaaaaagcataatgaattcaaggatatatatatataacgcaatgaactctccagtcttactatactgcaacaagcttccctgtaacttcagtaaggtaatgacataatgtcctactaacaatgtcacaaagtcacaggtctttttgtttcatcagagttatgcgcttatcccacttcacttcttttgcctcctcttcagtcttcagatagcgagcaagtgactcagaggaaaaggaagaacaatgcttcagtaattttctgaatttggtttctcgaacacagctgcttgtctgattgtcgtgctacatctgaatacaggatgtcttgtgctattgctttggaagatagctattgaaatctagctcaacatctcttaattctttggaagtgtactgcttcctgaccctgtactctactattgtagatcattcagataagtgcgatatttacataaactcattctcaaatcatttacttttgcatagaaaaattgctcaaaaacaagagattggacaggcatcttgtttttgtttcagactctcagttgcgctggtccattggttagaaaattaatcctcttggtttgcctcctagcagctatgtcaggtgtgagggccatggcgacggcgagccggccgtctgcattggctccggcagccggtggacggggagaggaagcaccgaagcaggcacagcgagggaagagaggccgatcggatgaagacactttggaccgctgtatagatggccatatgggccgagccttcccgtgcaggcccaggtacggagcggcccatctagccgtgccgtgcttgggccggcatggcatggcccctttctttttcgtttttagcgaatctcgtccatattttctcctatttcccctcatttctcctaatttcgctatgtttttcctaacttttttctgcttttatcttttttcctagcctaatatttcaaattatagggttaaatatatggatgggctggcaacaacccatgcacctctagcggtttgcacataatgacccgtagccttctcgaccaaggccacgtggcccagtacgacacggcctattaaccatgccgccatcggggcacgcgtcgtgctcaggcggggtaatccgttttgccacctatagatagctggtttcttgaggttacccttggatcgttgtctcaaggtgagagggctgtagtaatggtaagcttgtcgtcactcgtcagcaacaatgttagacctcgacagataggaaactaaagtagccacggcgagggaggagagaggcagatgcagatgagggtggttctacgaatttgttggacaccgatgtagatggttgtgaagcaattaaaaatggatcaatttgtacattattattataatcgatataattagtagcgactgaaatatgattttttttctaaaaataattatgattaccgccaatggtagcgagacaaatcaaaactttcctgcaaaatcataaggtcactaggaatagtagcgccacaattttcgctaccgatttagtgcgataggagtgaacaagcagcatatgactattgaccatagtttgatttcaatatcaaaagtttttgtgtaaattgtgatataaagggttgttgctacataagaaagagcatgtaggagtataaagctataggacttcaaagaagtttgaagcttagtatctataaacttttctttttataatcttctagttctcttatttatttagctgtttcgaagcttttgtaaaatttggctattaatatccaactgtaaatataaagacgggatttctatcaattatgtaaaagaatcctaaaattttaggaaatgttagatccaaatatgtggtcccgagtttacaacatatttgcaaacgaaaaataatttgtgaataaaacttttatatacgtgttcttagcgatctaaaagcaaaggctgaaaaataaacttcgatgagaaaacttcaaaatcaactctaaatttaaagttaaaaatttaaattttggctgataagcttaagtataagtataggcgagaagatgagaccacttatttgtaaaactttaggatcgcttcatcgccttatcaacattaaatacggagtacaatagatccggacgttggattaatcatgcacggtccggattgagtcgcggaagagatctgcattttctgcgaaaaccctcgcactatttctaattttattattacccttgttgccttcctccccctcctatacctcccctcggcggcgaggcggcggagctccggcgagcctggagcacgtcggggtttcccctcccgcggcctcgccgtatcggatcgccggcgtatggcctacgtctacctaggtattccttccatgcatggcctccgtgctccggctagccgtcccgcccccacggtcgccgccgtgtccccgcgtgctgccggccacctccggggcgcggcggtgcggcgggctcaagctgtaatcagccgaagaggcctcgatatcccttatcccaccacctgcagatagtgatacagtgctccaagtgtgcgctaattctctgaagtctgaacatgcccttggcaaccgatttaacccagtgtcagcgatactctattagttggtaggagtactactaactatgtcatattagtcacaattcaccaattctattgtcttgaattgcagttttttttggttaatttacaatttatttcccctcttcagagttcagatactatgcgaggaattgagagacagccgagcttcaggtacattctgaatcctccaagcttaccacacttcggttttcttaccaatattcagttatacggtatcagaaagacagcgaagagaagttggtgaagagtatcatattctaatgcgagattactcatttactctgttgcttcagccttcattatagtgctcacctaagcagcatcttaatataccaaccactacgagtacacttgacaagttgtcaatcacagtgtggtgattaatgacaagtattttaactttctagtttctacatcagtaaagtggttgttactatgtatgtagatagctagatgtggtgtgactgtcatggaccatatctgcaagtatttggtccaggaatccatcataggtctaagtatgttgcccacatcctaaattgcaaacaatgccagtggttgggtatagtaggtgcaaggcatgatcgttcagattagatctcgtcttcaggaaaaaaaaagaaaacaaaagatgagatgtttgttttgcttttggatgccatcatcttcaacttggtagctatgtttgtttgtttgtagcctgcaagaaactgcatctttcaattgtttgcataaagttccacaaaaagagcatagctgttgactagcctacaagttaatatcctgtattaacaatgtgtatctttcagcacaaataaaaatggagcatcttccatatcccaacgaccctgatgtagcctgcaagagactgcatatctcttctgaaactttgaaaatataaaaatatattgcagaataagagctttgctgtgatgactaatcttctctagttggtggtcccatgtggtcagaggtgtctctaaggaagctaagaaagagctgaactctgtgattatcttagtggcctgggaaatttggaaacaccggaatgactgcatcttcaacaatgccacacctagtactgctgccgtattggatgctttggcaagggagagtttattattgtgtactgctggggcaagagctcttcatgaactcttggcccggtcgctctccacctaggagcttagctcctgcgggagttgttgcgcatcgcctcggcgatgtttttgtgtttttctcttcttttttcagagtgttcctttgtgaagcactctgctgtacataccttttcttctccttaatgaaatgaaacgcatggctcttgcgtttttgagaaaaaaaagtatctttcatcaatacaatatgttatatactgactattccatattcatgataaaacggaccattttgttttatgataacaggtgtcccttttggtcgatttgaaattatattaagggacgtagaccaaatcactatgcaaatgaggaacaatgatgttctgaaatctgttttggatatgcaacttctatatttgcaaggtacctgcagcttatgaagcctgaaatcctggcaaggtactaatgaagacaagcagttccatgaagtccttatataacaacagtgaagttctatattgttttatgttctattttcttagttagtatcttgtttagagaaaaggctttacaccctgcttttttagtaagcaacaagagtacaggcatggtgtcactggggacgattccagcttaactcttagtgtttgcaggtttcctatctgttacgcctttaatatctcaaagagtacagatttaataggcaaagcccagagaagtactagcacccaaaaaatttgttgctgatgttgaactgaaagtaagaaccagactaggtaagcaaaacctatgatccacagaaaaaagaattaagtctgctcacaactacacttaggtgtcaaacataggttgctacgggaccactgaatttaatttaagttgataaaaagataaagtatgatagcagcatggaaatatttttagttaagaaaaatgcttatatggttttcctatatctaagtgtacgcttcagataatatctttggtccaaatttaatgtggtccgttttgggacgaggtagtggtatttttcatctaactgttaatgattgccattcatttttctacaagctttatcttcaatattatgagtctataacattctctattccaatgtattctacccaaaataattaggcacggccaagtacatagaggttattaccttaatttttacagttcaaggtcaagaccatactttataaccaaacatttggttgtttgatgattaaaaggaaataggaccatcagaccccatgcattaatagaggacagatttgagcaaaactcagcttttaaggatctaatctacctcaagcaaggctgtattctcttttcatgccaagtgaaaactaggcaggtgcacttgctccggcacttcattttcttcttcagtccatactcatgcaagtagcttgcttggatgattttgagtaaatttaggatgttactggagggcacaaaggaattcaggtagatcaagctattgtgcatgtaaaatgtgtatcacatagatccaacatttcgttccattctatttggtggagactggcccagaatacttatggtaacttgtcaaagacagcagcatgtgagagtgactatgcaacaaatcttttgcattggtaatatgcaactatctggagcagatcatgcagaaattaagcgctagcaagaaaatgtttagggagaaatggcatatttaagctcacgataaagtaatccttgaacattaagatcaagaacagctaaaacatcacatgttatcaaatatacacctgtcttatgaaatggcccaaatgagatgacagcagacttttggaataggaaaagccagctaacttgttagttgtcacctttatttaagtagtcttgagcttactcttattctcacactctctcagcccattctgttccttctcatccctctttctggtgtgtagtgtgtccaataattaggaagcagggctggttgcttctgcgataggagaaaactgcaaaccagtgtaggggcaaaaatggctgcctgctgacaagttctagttcacagtcaataaagccattcaccttggaagtgactccctattctgatcagcagtcatacacaaattcatgcagtgtatgatcttggtctccatgcatgaactctgctaccccacattctgaagattaactgatgcttagatatgtgcatggcaaagtaatacactagttcgtgagtatttccttcaggacacttatgttctttctttgtttggagtactgaggcacctcaccaatggagataaagatgaaggggatattcaaaggtttgaagataatctctcaaatattcggtaagcgaagcagattgtttatctttgctgcatctacctctattttcagtttttgatgaattagctgaaccacaatagcaatgcacagtttctataccattggttatataccagtatgaccattgctccctttcggttatccagcactgcagaagcaacaagagatggaaatcgggtgccctacagacgtcaggcatgtgtctcacataggcgtgggcactagtgattcatgcccaagctgggtaaggatctcatatctcatagctggaaggtttctccaagtaatcttctttgcaatgatctatacattttcctattctctggttgtgattttttatggcaattttactagatgagtgaattcagaggattggaagagttgtcagcaggctccatgggctcctttgcacagtcaaggaagacatcctgggcatctcaaggcaagtatctccctcgatctcttccttctgtccacttatgcgctcctttttcagtgtttgctcttcatgaagttttcagtcgggacgggacgctaatgatgtctgaaacctttgctcatgcaagaaagcataactagtcatgtacttgtgtctagctagttgattcagaatctacatactccagtacaagcttgaaccttctgttctacagtagtggcataccataccattgctctgtctgctcttctccattaattctggttttggaaacttcagcctagtttggtgtcaaggtagacttgattgtcatatcagcacttgcacccttttttgccattgtctgtccccatcctggtggaatgcgatgttcagacttgcagcgtcgccccttgctgactaactctggaggagtgatatgtcggatctttcgtgggaaatcttgtgttgtcaggggaccaaacgtcggtgagtgaggtggcgtgcctctctacagttcgtccactgatgcagctccgatctcttgactgagttggatgactgaattcatgctttttttcttctcttgaaagagtttcatcatgattttagtgggttatgatgtaaaccctgcacaatctgcttttgcccaacccgtttagcaaacagaatttcagaagtcatgagaaaggttaagtcctcaggagttctctttgcgattctcgacagaattgaactgattttcataaaattcatgtagaattcccatatccccgagaaggcctaacagtctttctggtgaatcataccattctttaacaaatcatgtcaccctacctcctctcatttcattatgttttgtctttgaattgctgcagattttgacaaaccaccaagagccacgctcccaacagaagtctgcacagacaaatccggccaggaggccgcctcctgctgccatgacatcccgagaggccccaagaacccgaggaggaagaaggcagcaagagcatcatccgcgagctccttcttgtcgaggtcaaggtcctcctcgtttgtgacagcgtgcggtgatttcagcgagttgcgtggcggcctccgagtcgcctagtttgaatgacagttcatatagttttctggtgtgtgttttcttcgtgctgttcgatcaggaggagaataaaatcgcctgaaataatcgtatgagcgttgtgatggatgctaagcgtctagattagggacatgtgtaatgtgtccatgactgaacaaactatgcattgtactgctttttttgagttttggctatttctgaagtttgaaaagttgaccggacctgaaaatggtgaataaacaaaaatgttccacctagtctgaacaattattctctgaagacattgtcagattttgtggatgcgcaagtcttttgtctattcctgaaaaaaattgtcatatttggtggctccatgctccctgccttcttgaccaatcctgaaactttttacagcatctttgagcattctaggaggacgcaagagcccctaccaaatcaaattctcagaatttttttttttactgaatgttactactgctgtttgttcagagattcctctcacaatgttccaacacacctactatattcgatccaggaggcttctgaaatttttctatgacatgaatgattgtcctttctgaactacaagatgaactcaaattcttctctgaatctctctctgtgcatagataagattagctgctcgccgcctatgcagagaattcttttctgaatccttctactactgccgaccaacgcatggtgtcgtcgcctcaagcctcgccatgtgtgtgggttaacatctcgacttctcgagtcatccctcatctgaaaatgacgttggatacgtatccaaatcgaagcattaaactgtgaattttcatgagcacttgtcactctgtcagaccatcacctgtacaacacatattatgccaatgaaatacccaattagtaataatcaaagtgacaacctgtggcaagtgctaactccttgtaaagtgacacgtccattgcattcagacaaagcctctgactaggcttattattaccaagtctccaattcattaattctgaatttctgtatcaccactacaaatacccagcaacccagctttgtctgatcgatcagatcaggcacagcactgcagtgaaatcgatcactagtcgtggtggtatcaactatcaagtgtgcaagaaaaaatggcgggagcagtggcaactgtcagtgtggggctcgcgtggttgggtctcatggccgcagcggcgagcgcgacgcagttcagagtcggaggaggcagaggctggagcgtccccgacgccaacgccgagccgtacaactcgtgggccggcaggatgaggttccagatcggcgaccagctgcgtaagtcgccgcgccgccgccgagatgatcgccggcgaggatttcgccggccgtgcaagcgtggtgatgatctcacggtttctttcttttttttttttggttggtgcagtgttcgtgtacccgaaggagatggacgcggtggtggtggtggatcagggggcgtacgacgcgtgcaacacgtcgtcgtcggtggccggcggcggcggcggaaggtacgacgacggcaacacggtgttcacgttcgacaggtcggggcccttcttcttcatcagcggcaacgaggccaactgccgcgccggcgagaagctcgtcgtcgtcgtcatggcagaccgcggcggcgccacgcgcctccgccgtcgccgccggctgtgcctcctcccgtcgcgccggtgccgatgccgagcccggcgtcgtcgccaccgtcgcttgcgccagccgccgccaccccgagcttggcgccgtctccggtagctacgacgccgagcccatcgccgtcggtttcacctatggcgccggcgcctgctccgacgacgtcaacaccgagctcgccaccggcgccagcggccatggcaccgtcgccgtcaactacccctggaggcgtggcccagccgccgccgccgccggggaccgatggggcgaacgcgacgacgccggcggcgcccgcagccaacgaccggagtggcgccgccgccgctgctccggtggtggccggcgtcgtcgtcacgtcgctgggagcatacatcggctacgccatgctagctatctgaagctttctgcttctgcagtgacgtgttcttttatttgtgcagtgtaaagttaaatgaaatcgagtggtatattgttacagataccgtagagactagagaggattatctctggatttgtttttgcattggtggaataatgatagtgaaataaaaatgtggttgagtacttgagtcattgagtctgcatgtttgcgttggaagcattgaagagttttttttctttcaaatgaaaaattgtgggatgatacaaaggaacttagcagaggaaaatggtgtaagtctaaaaaaaactcacgtatgagacatgactcgaacgtaggctagcttagtggtaagaacgctaccagggtttagaccagcctttgttcgaggcatgtctcgtgcgtgggttctctcaccattttccctctctatcaataacagctgctaagttctttttttatcatcccacatttttaaagcatagaagagtttagctaccaacgtaatgaaatgtaaataggttagaattcttgcaactagccaactattgctttgaagtattattttactaactttttggattgttgaagaattataataaaatgctattgcttctttgactatttgcttgattggttattgatccttactttataagttgtcctcatatattcttggtaagttatgaagagtttagctaccaatgtaatgaaatgtaaataggttagaattcttgcaactagccaactattgctttgaagtattattttactaactttttggattgttgaagaattataataaaatgctattgcttctttgactatttgcttgattggttattgatccttactttataagttgtcctcatatattcttggtaagttataagaaagcaaagttttgtacatacctccactcttaataaaatttggtcaatctttctttggctaatccggcaaaaagaaaagaaaagaaaaaagaaacaaaaagaaagcaaagttcctgtcgttgaattataagaactgtagttcgcttggagctgaagtgtgatctatcactaaaatgtcgatatgaaaataataaaatgaaaaggattaaattcggggccctcattacaccttgtatttctccttcgtgttttctaataatgaagatttgttttttaaactcatatatataaattctaaagggataagtctatttgacccccctgaactattgcgttcgtctaaaatacaccccttcacttcaaaatcagatatctatcccccttaactttcaaaaccattcaaattacccccctgtcttcaattgaagtggttttaaacagatctttaatccagcacatcattttgtttcactaagatgtgtgagatatcatggtatagattgaaactgagaggagtggtggctggtatatcggactcaaaaggagtggtgccttttatttttcgtttttaagggggaatcggatctatagttgaacttttttttcgtataagagagggaatcggatagaagtcggactttttttttaatttttttcgctttttttttctttcgcccggtttttttgaccagacaattattgttggggaatcagacaaattcatttttcccctgatttttcttttaccgcatcagatttggtttttcttttcttttttcgcacgttttcttctgcccgttttttttggatcggactattttggttttttggcccggtcttttttcgccccttttttctagataggacagatttgcagatttggtttttcttttttttcgcacgttctctttcgccctgttttttttgaaagaaccacggtaggggaagcctccaccgttaagattttatattaataaaggggaaaaaattacaataaatttaaccactgtaacaatgtatttctctcagaatttttgactctatgaactaaaagggagagatcattcctaaagagaactctccaagagggaacaatgttttcaaaaattaaactattcctctgcttccaaatgttccaagcagcataaagcaccttctcaacaaaatgggtagagttatatgaatttctggccgtgaccaacatttcaccaaagcttaaagaaagattccaaaccacactaaattacgcccaacattgagtgctaaaaggacactggaaaaataagtggagagttgtttcccttgatcctgttgaacaaagtacacagagcaaggaagcattttgaggggagcaacgccctattttttttggatcggataattttggtttttttttcgctggtttttttcgccttttttttctggatcggacatatttggttttttttcgtactttttttcgcccggtttttttattggataaatttagtttttttcgtccgttttttttacggacgatggaatttaagtagtagagataaagataaaagaggctactgtataacaacttctccgtgcttatcacctcgtccagtccagatagaaacctcaacaaactggccctagctattcgctcccgcagcattcgaactctttaaatcggaagagcccctcacccctcagctttcacccgcgccgccttttccaccaccaaacccttcgagtccccgtcgcagttgcggcattccgacgaacacctcgcgcgcgcgcgcgtcgccgcctccatctcctgcgtcgccgcggcgtctcacaccaacacctcgctcgctcgcgtcgcgtcgcgtcgcttgatctcgcaccgggggggagatgggcaggggcagagggaaacagcggaaggaggccgaggcggcgcgcgaggaggaggagcggcggtgcctcctcgaggcgagccccctgcgcaaggaggccgtggaggcgatgcggctggatcgcgagggccgccacgacgaggcgatcgcgcgcgcggacgagctcgcggccaagcacccggagtccgccgtcgtgctccacctcgccgccggcctccaccagaacgcctccacccgctccgcccgcgacggctccgacggccaggcttcggtgatgcacctcgtctacgcgcgcgacctctacgcgcaggccaagcgtctcgcccccaactgcgtccagatcgccaccggcttcgccatggcgaaggtcgccagcgccaaggactacgagccggatcgcgagatcatgcgtgccctagccatctcctcccccaccgacccggcggagaacaacgtcgcgttcgacctcgaccgcaccctgagcaccaccatggacaggttggcgaaagcgagggaggccgcgctcttccactctcaccatatcatgtcccacatgtccgccaagatcattcccgccgtcgtcgtcgacatgctcgacatctccaagcgcgagggcgcggccacggcgaagaagcaagcgaagaaggcgctcgtcgagcgattcggctactcggcgcgcgcgcacttgacccacgcaaagatcagcttggatttcgcgcgcggcctcgacccaaacattgacaagaagccgtttctgaatagcatcctcgacgcattgaacaatttggttgaagagttcagcaattcgcttgagattgccatgttccgcgcgaagctctggtttgtcatggggaagtattgttctgtggaagtggagtgtgaccgggcaatccgtatggaggagcctactgatcccagggaggaggacgtgcctcctggatctatccccggagagaagcctgaggataggaaatcttatatccgcacagagctcaaacgtttgcttcagaagcttgtcttggtgtgtagagattactggtgctcactggcaagcgagaagcaggacagctttcgattggtgggactcaagtatttgcacctacactttgttactttctatcaagatgaccatgaagctgcaaagaccatatctgatgcactcaactttgtcaagaaaaacaagtcatggaggttctggatttgtccctattgtgttggcaagaagatcccagacattgattcgctcttgcaacacatgcgcagcaagcatcccgaagggggtttctggacgaacctgcggcaagtttttgatccagaatcgatctctgatacatatcagggtgatcatttctcggacaatgcaacaatctgtcaagattcagaggagaattatgtcttacatttcaaaaggatggatgatattttcaagtacttgtttcttcgagcagctgataatattgaagaaaagccattttctcaaatacgagaggaaaaatgcagaaatggagtttttatccttgagaagattaagctaaagctgaataatgtccccacagatatttcaagctctgaggtttgagaatcttctgttttgcatggccttgtttcaacattgttttgttaaattcactcatactgacagccatctttgttatgttgcagttcaatgaggcttgtgctgaaatccgagacctgtggcgttattttcttgaaatctctcttatggattatcgtgtagccatctcaccgctcgcaatgtgtttcatatcggtatgttaagtctagagattcttgtttatgtatagttatacatctgatctccctttactgagtactgagtctatactataatcttaacaggaccagttactaacatgcatgactgaagataaagaggctgccagtaatagtattgatgttgctgctattaatgcagtatttccttttgttgatgtctgtcctgatattgatgcaatatttcctaacgttgatgatgcccctgacggcaatgatgctgatacatcaacatcaggttattcagaatttcggatcctctttcaatgcaacctgtcttgctttgatacatatcttgttatgttcatgcatctctcaaattatatattggcagaaaccttatagctaccccccaaaaagcaacccacatgacttttattcaaataaagaaacccaatagttacttcagtttaatttcataatgtgagaaatgcagtatctacgtttgtgcgaatgtcacattttaactctttctaataatctgcaacgaatcatcacattaaaatttttattaagaaaaccattccagttgtttggtagtattaacattacatagttgctttgttttcaggacaactttaacattccctatccaaaaggtaattatcagatggtctaatcatccctgaaaacggttaaacctctttcaattactagttgtacctctgatttatttgtcaatgtgaacatagtaatttatttggcgcctgctgtctgggtgaattctgctcctaccaaacgtcagcggcactacaccaatgaatgatgacacaaaagagggaccgtcgcctatcctcgatacccttttctgccctgtaccggagagcgtggaagtgtagaacacctgtttcttcgatgctctaaagtcagagcgctatggtcctttcttggctttgatgtgtctcttgcctacctccctgccttggagcatctctgaacgacaatccttcctgcactccctgccagccctccttcgatcccttgaacgattttggtgtgcatcccttggaacatttggaaatgtcgcaacaacaaggtcttaaacaatgtcgacgaacaaaccagtcaaaccgcctggtgctgcgtggatgatgtgctgcactggactggagctgcaaaacgatggtccatcaagccttggttgaatagggccgtaggttcttagctttttccagttcctaattccgtttcctcctcctgtccccctgtaactctttttcaatcacattgtaatattgcttacgaatatattaatataaaggttcaggctggcgtaagcccaccgtcgtttctgtcaaaaatataaatttcacaattatcagttgtatctgtgatttctttgttaatgtgaacatagtaatctctttgtaattacatgatctatccatggttttttttgccgggtcagccaaagattggctgaccaatttcttaagattggggagaaaaacaaaggaatattacagcgacattacaaacagcgtgaacaagcgaaagagaaagagacaatacaacaacgattactcgccgaattgggagaagatcccagctaccctccacaccgcgatttcttcttttatattctcggctacttgctccgtggtcatcgacacatgctgaaaaattctagcatttcgttccttccaaataagccagcaaattaacatgaaggcactgtcgaagtccactttgtagctcgtccgaaaacggcgtcgcgttgcaagccaccagtcagcaagtctgctgtcaccgtctgccgggattgcaaagtttgcattgcaccatcttctgatctttcgccatacctccgccgtaaaaggacaggttacaaacaagtggtggcaatcctcgtcttctctctgacacagcgagcagagggggtcgtgcggccaatttcgcttcgcaagattgtcggcggtgagacatcgatccttcaacgcaagccacatgaagaaacgcacacgcgagggggccctggatctccacagtagctcgccataggggcagtcctcagcagctatgaagaaaacatcataagccgacgccgccgagaatttcccgtcgcccgtcagcttccatctgatctcgtcaggcgatgggagcagggagaaatcgtggacctcatcccataactgaaaaaattcgcccattgcttcattggatagtgcaccctgcagaccacggacccatttgttgttgcacaaggtttagcaactgaaagtctagcacgccccacataagaaaacagcgttggccatcgccaagcaaagcagccgtgcccagtccagtttgctgtccaaaaatcagtgttttcgccatttccgacaatgtacttcgccactgatcttttgccgggtcggcgaaggagccgaccaaatttcattaagattgaaagggggaataagtacatattttacacgacattatactgtcggtccagaggttaagacccctggaaacaggagtggggaggggaagcaaagaaagaaaaactgcggtaatgctagggctactcctcacaactttcaaataccaccgcagttctccaaactgctacttcctctttgatgtctgccactagatgctctgctgttttgctcttttgatcaaagactctagcattgtgttctttccatattaaccagcttaccagcaggaacagggtgtcaaaagcacgcctgtagcgcgtctgaaaactgcaccgcgctagctgccaccattctggcagagatagattttgacgtcctgggggtggaaaactcacgttgagctaagacctcagcaaagaccagactctaatggtgaaggaacatttggagaggagatgatcacagtcttctagctctgtcaaacacaggggcaagcaggatcatgtggccatccgcgcttagcaaggttgtccgctgtgaggcagcgacttttcaccatcaaccacataaagaatctcacccgagctggtgccctagccttccaaatcatctccccataagggcagcgtactgccgtaaggaagaaaaactcataggccgatgcaacggagaattgcccattggttgagaacttccaaaggatagaatcctccaccccttgctgcagctgaaccagctgcagttcatcccatagggctagataatcgagcaacgcccttcctgacaaggagccctgcagtctcctaacccaagtattattggataacccctgacttattgttagattagctctgcccacaaaagaaaataggatgggccatctgctagcgatgctcccgtcgccaggaagccaatttcccctccaaaagttcgtgtcacatccatcgcctagcatatggactgcagttgagctgatgatgtcttgaagatctctgtccgtcccccaaccagccattgtccatggcctatctttgtgctccagtcttttgaaatcccatttcatccttaatgctttcccaaaaagatcgatgtctttaattccaaggccgccatttgaaattggccggcacagatccctccaagcaacaagacagtgccctccattaatctcttcctgccccttccacaagaatacgcgacggcgcctttccatttctttgatcgcccacctaggcagctgtagaacagagaggaaatggaccggaatggccatcaacactgatttgatcaggcatagtctaccgtcaggtgagagtaatttgggtttccaacctgcaaccttcttagccatcttgtcaagagtgggttgaacctccgctttggtaggcttcctgatcgagagaggtagcccgaggtaagtaattgggaaatcttccaatctgcaggctagagtgttctgcgccaatgtcttctgagactcagcacatcttatgggggtaacggcactcttggagaaattgatgtgaagcccagtagcagtcccaaacagattcagcagagcttttaccgcttccacctcatgaaccagcggcttaagaaagataatagcgtcgtcagcatagatcgatatgtttggagctcggttcctcaagtttactttgtcgatgaggccaatggtggtagtttgctagagcattgagtgcattgtgtccattaccaaaacaaagaggagaggagagagagggtctccttgccgtaaacctttctgcggcttgaaggattcacccagggcgccattcagatcaaccctagtttcagctgtcaagaaaagggcagccacccagcttctccatttcggcccaaaccccctaaaacgcagcatattcagcagaaagctccaagacactgaatcaaaggccttcgagatgtcaagtgtgaaaagaagcatcgccttgtgatttcgatggaattgtgtggccaaccccttcacaaaaatgaaattctcatggatggaacggcctctgataaaggcagactgggagtgagccaccagctcatccatgcgaggggcaagcctgagggccaaaatctttgttgcgagcttagcaaagctgtgaataagacttattggtctgaaatccttcaaaagtgtcggtgcatctttcttcgggagaagggtaatgatggccgtattcaagagttcaagattttgtgagttgcctgtgcaaaatttatgaagagcttctaggacttctttttttattacatcccagcatctctgatagaagaggccagtgaagccgtcaggaccaggggatttctcattctgcatggccttgattgtagcccagacctcttcctccgtgaaggcatcatccagctcagataagtttgccctagccaaatgaatttcttggaaaaggatttgttttaaatcaccctgtgaggcccccatcacatattcgaaatgggtcttcgccatctgttccatatcctcctgcgtggtggcaatgacgccatcatgctccagccagagtatcttcaatttcctttggtgtgatttcattttcatgaagaagtaagcagtgctggcgtctccctctcgaaggtttctgaccctggcacgctgccgaatcctaattctttcaagtgatgcaagagccaaacagcgccctttgagcgcagctcgcagctgccgctccaagtcagatagaattctaatttcctgtgccacatcaaaacggagaatgatttcattcgcaatctgaagttgtagcctgaaattactcattttcttctgaccccacttagacaagatcttactcaaccgcgccatcttgacatacagaatgcaaaaggggtcggtgctatccacactgcgctcccaagattctttcaccacttccatgaatccatctaattttgtccaaaacgtctcaaaccgaaacctcctagagataggtttgaactcaccacatgtcagcaaaagagggcaatggtcagagtttgaggagctcaaagcctgcagatgcgcctcaggaaagagatcttcccaggaggttgtcacaagaattctgtccagcttcaccaaagttggtctggcttgttcgctgctccaggtatagcgtctgccaaacatgtacatttccttcaattctaaatcattaatcttgcttcggaaggcattcaacagtcgtctattaatcctcgagttgttcttgtcttctgctgcagcgataaggttgaaattgcccgcaattaaccactcccccaaacaaatctcccggatcactgacaattcttccagaaacaaaagcttttcttcatcaccttgtggcccataaactgaagttaaggaccatgatctgttagcagccaaccagcacaaattaacagtaacagaccaagtgccaatatgaaccacatcccctcggaacagagcactcttccaggcaattattactccccctctagtctcctcagcgggcaaaaacacgaacccatcaaaatccagaccacaaagttcataaattagcgactggttgacagcggacaacttggactcctgaaaacaaacgacagaggaactagaggagattacagactctttcaccaacgcacgcttagcagggttattaagaccccttacattccacactaggaaactaaaacctaacatagggaactggacacacttcagattagctgaaaagggaaacaaagcaatcaggccggagacgcgacctccacccccggaagaacttcaggcagaggttgaaggggtgcggccatgtcgatttgcaacagttctgcaatggcctggacatgatgcggaggcagcggttcatcaaagagcttctcgaattcctgaaccgcttcctggtttgcctcttcttcctcctcaataattcccaacttcttcatagtcaccttctgggctttggagatcgtgtgccgccgtgtcccattcccctgcagagccaaccgcgggcttcgccatggcgtgaatccttctaggatagttgcacggcgtcgagtcctagtgactgggacagaggccggcggcccccctaggatggatggaggcggtgtggtggagatcgacgaaatgaaggccgagattctggcttgaacctccggtggtgcctcgttctcatcagtcgcacgctcttcgcgtgcccgacgaccgacagctgccagagcgccctggtcaacggccaccgcttgggctggacacctgcggcggctgtaaactaacggaaactccgtcaggccaacgggcctggtcagtcgcgctggagtggccaggagcccatcttcagttgccgggagcacgatagctgacagcccatctccgtctgcaggcccatctccatccgtaggcccatcctcagctgcaagcccatcttcagttaccagcacctcttgaactgtccaggccggctcccttgatggcccgtcgtcggtcgcaatcgcgccaatgctagccgagtcgccccgcgacttcccgcccagcggatcaagcactgtatccgacgtcaccgccattaagggcaactccaccgacgaaatttcgaactcttcgaaagacagccttctcaccaacggcaacacggcatgctccagcattaaacacgctggcgcggtggcaggacgctgaagactcgcttcccctagggaagcacatccgtgaaccgagtccaccgcgtccggaaggcccgtcgtgggtgtacccagcgctgtctccgcggacaccaccggctccaatggcggtaccaccgccggcacagcagcaaccctatggctgcctttaagccagggaacgatgtgaatctcatgttcagaatcgcctatcctgctcaaggattacaggccgattagtttggtgcacagtttctctaagttggctgcaaagattatggcacaacgactggcgccgaagctagaagcactaatcccttgctcgcaaactgccttcattaagggccgctgcattcacgagaattttgtttttgtcaagggcctggtgcaacaattccaccggcagaagaaggcaacgatgatgttgaagcttgacatttccaaagcgtttgacactgtctcttggggttttctgctgtcaatgatggagtttaggggatttggcccgaattggcgaagatggatctcggctgccctcctaactgaagaaacaagcattttgattaacggggtgctgtcagatccaattaaaccggctcgaggactgagacaaggcgaccctctatcgccgttgctttttatcttagtcatggatgctctgcaagctttggtttctcgggcaaagctggctggtttgctttcgcctctaaatgcaagaagagatttgctctcggtgtatgccgatgacgcggtgctgttcttcaagccaacaaccactgaagccaacactatcaagagattgctgactctttttggtgaggcaacgggactcaaaaccaacttctgcaagagcgctattacaccgattcagtgcagcaatgaacaacgagttctggttgaatccatcctctcttgccgagttgaagacttccccatcgtctacctaggcctcccgctgggaacaaggaaaccaacgaaagcagagctccaaccgatctatccatggtgattgtgtgttcttatcatccagtaactcctgccaatctgctgaggaaatgccaagtattgatgttcccaacaaagaaaacaaggacaaagacatgtttatcttgcatgtgatcatacaggtagtacaaagttgcatgcagtatgttttgtcatgtgctaacttctgagttctgattaactatgaacatgcgcagtcactgtggaatttgaggtgcttcagagatgagattttaagggcaccacctgcaacaatcctacatatcaaagaaaacttctgcatcgctgacctattctatggaatcttctttgcttgggagaataatgacacaacggagtggatgttttactgacctctctgaaggttaatctctgtaaaattgcaaatgataacatgtttcagaaggtatgtgggtttctttgcattgtcattgttccacacttccatatgcactggaatgaacaaacttagatatacgagtgcaatgttctttagttggcaagctctgttaatcaattcgttgctgtttttcctgattaacatgtaaagtgccgaactaatcggtcggaggctaccatgatctttattctgcttcagaactttatccttcatgtatatttttctgccttcacaaggttaaacctggtgaatcaatttcagttgcaggctggaaaagaattgcttctgaggttgtggcaacgattcttcaagcactgcatatgtcagaaactcctctgcattttgatttcaacagtgagattgaggaacgtgaagtaagtcctgtcagctgcggagattgcatatgccgaacacacgatctgttcgggattaagttccatgtgcaaatgagctgcaggtgtgggaagtgttttggtgagaaagaacatactacgattttctgtagacttgatgccagttcacctcaaacaacaaaggtgtgtcacatcagatttcctgtgtagctaaaattttatattatatgcaagagtagcaaatagttattgataactttttgcagatcgaatcctttgcagagcttccggttctctatgatgaacagttgtgctttggggacaattgcaagcattgtggaagtccgaagaacgttgatgtttctccttcaaacacaccacatatctttacaataggtaaaggtccttgtctacaatagtaaactgcaatttaatatttgctctctttttcctgcctaaacagaattacagaacatgatattggttgttcctaaaaaaacatgttattggagatatacatgacaaccacttgttgtaactcaaacatatcctgaaactttaaggttgacttctattaagtttgatacggtttgttattatgctggttaggaaggaggctttttgctatgttcttttatccttttggtttcctaaagttaacatcaaaatgtttgtttggtgttccctttttgccattatgctgcaggtttatactggtttggtgattgtgaaaaccaggttcagctatctgaagttctagttggcattgcacatcccattgatatcaaacttctctgcaagggtgttcactcctcggcaaaatattctctggcctcaatggtatgtgcaaagaaaacctttgactttttcatgaattaaattgttgatataa

SEQ ID NO: 9800 - DNA, 10462 bp, Oryza sativa
tctctctttctatatgggaacgcttgttataaaaatagtaaagtccatcaccggtccctaaacttgtaccgctgtgtcatcccggtccctaaactcgcaaatcgatcattcaggtccttaaacttgttcgactgtatcatcccggtccctaaacttgcagatcactcgtttaggtcctccaacttgttcagttgtgtcaccccggtccctaaacaggacggtctaaaaactttataccaaaaaataattcataactttttcatgtgaactctaataaagacaaactttatatcaaaattgtagccctcgacgcgacctacaactttgtagttgaaaattttttgaattaaaactgtttagggtcccaaaatattgttgcatgtttatagattttgtaattttaattttaaaattacattttgggacaaaaaatgacgttaaaataaaaaaaacgtccaactacaaagttatagatcgcgtcgagggctacaagtttgatataaagtttatcttcattagagttcacatgaaaaagttatgaattatttttaaatataaagtctttagaccgtcctatttgacccagatgatattcaaatccaagtttagggactggggtgacacaactgaacaaattggaggacctatacgagtgatctacaagtttagggaccgggatgacatagtcgaacaagtttgaggacctgaacggtcgatttgcgagtttagggaccgggatgacacaacgatacaagtttagagaccggtgatgtactttactcttataaaaatataactacgaaggcaaaagattcgattacaattaattgaatggatagaattgtttgacaaatcaaactttaaacttttctaaaagaattacaatcaaatttaataaaatttaaattaggaaaattgcataaaaaaatcatttggttttcctatttctcctctacctggaaaccaaaaggatatttttttaaagaacttcaaccaaattggaagacatgtgtccatggagagagaaggtcaaataccattaaaattttcatcaaatttaattaaaattcattttaaaatttaaagttggggtaatatatttatctccttgatttgtttttaatctaaaattgttcttgcacttatgcttttcaaattagctttttatgtacgaggaagaggtagtatggtcattggaaaaaatctaacggccagctaatagaatagacataaagtagatcaaaacacataagagagatgacaaactcaggggtatgaaaaagatatgagcatagggcaaagatttagaggcacaaaaaaaaattcccaaaaatattacagtatgccaaacaacattagtacggagttcttatgtcaatctattcattattatatactgtattacattattaattaaagagaagaccaaagcaaaaaaaaaaccacattaacataaaaaaataaatagagatagattatacgtacgtgggatcatgttataacgttctgatcaatgtgattgtatctaaactacaactgcatgcaaacttacgcgggttcgttacaataaaagaactcacctgaaagatactgccgtcttcaataatgtatccgtcaacgatctctttgcagcgcgctgttcctccaattgcaccacattttctctgatgaaccaatcccaagagtacatatatatgattttgtagattgaaattaatttgagaatagatcgaccgatacttcatgcaaccataccaaattaaaagcaattcaatcagcaatgtgtagtgtaacataccgcttggttcatcgaaaagatcggcctgatcgttccattgccagatgcagaggaaataagcacgaagcagcagctcatcaggagaacgccgacgaaaaggattgtggccatctcgacaatgaacaattaatagttggtcgtcgtatgattcgagtctttagatctgcatataatatatatatatatatatatatatatatatatatatatatatatatatatgtttttctatatggaaggtatgttttaagaaagaatatatgtttcctttgatgctgatcgaagctcacatatatgaattatattttgaaatatgcattatttttcgtagttttacacatatatacatgtttctaacgttgttgtgaaaatatacttttcccgctgaacgggaacgcgccaccgcaccggcggcgcagcttgaagacgcgggaccgtgtcagtctagcggtgccgcgatacagttgtgcggaaccgacgcagttccgcggattggttgcgcgggattagtggcatgcatgcattagcagtaagttagattacgtgcgtagtgtagcatcctgtgagccggcattccattggctggctcgtgcaaagcatatgcacgtaagcatgcatgtattggaggagcatgcgccatcccgcatcaccaatctgcggggacgcgacggtcccgcaggacacagccgcggcaccgcctcgccaccacgttcccgctctcccagaccacggcaccgacgcggtgccgcagggaccgcagtggtgccgctcgttcaacatgcgtgaacaacccggctggcggttacgtagcactcccgcattcccatcgtgctgtacgggtatatttgtgctaattcttcttatgcatatatataaatgcaaatcattccaaaggaaggtatattatcaatttttttccacatatatagcatttttatacggaaaaaatagcacgcaaactggccttacttccttattaatcgtctaatattgctggagtaactatatatacaaagctaaaaaaattaattgttgttttctgtgtgtatatacgtagactatgatatggaaaattataaacttccggcagttgttactcccttcctatcccttttggcggctctaacaggcctttagatcaagtttaatagtagagtcaggccatgtttagttcccaaaataaaaattttcacgctatcagataaaatgttaatttggacacatgtattgaatattaaatgtaggaaaaaaaccaattacaccgattgcgtgtaaattgtgagacgaatcttttaagtctaattgcgccatgatctgacaatgtgatgctacagtaaacatttgctaatgatgaattaattagccttaataaatttgtctcgttgttttctggcggaatctataatttgttttgttattagactatgtttaatacttcaaatgtgtgtccgtatatccgatgtgataaccaaacccaaaaaaattccccaactaataaggtctcaactgtgagcttatgttaacatgtaccagtagaagagttacatggttattaactactagtataattttcttctcttctctctatctctcacttccttcggttccattattcttaatgttgtggacaaagttaatgtcaaacttcgtaactttgattatcaataactataaaaatatttaatttaaagtaattaaaacaacacatatagatttatctttcaaagtacaataagaaaagtaaacatgcatttgtttattatatatattataatagaaaaataaagtcaaagttatattttggagaccgtgtcattatccaaaacgtcaaaaagctatggtaccggaggaagtatgcatttaggttgtgtttagatccaaagtctgaatccaaactttagtcattttccatcagagcaacatgtcatacacacacaacttttcagtcacatcatctccaatttcaaccaaaatttaaactttgtgctgatctaaacacagccttaatgtgttcttgaagtactccttcctcccatactccctccggtactgtatatacctcatgttgatgcatgttgaggaagcgagcatgggagtacttcacatgaggtgagtacttcctatactttatattgaatgtattcttgacgttttggataatggcacgtcacatgagcttggatcagatgaaattagcgagtacttcatgttgaggagtatgcgttatatcttggtactgtggtacgaatatgtgaggaatataaaatgaactttaggtgcaacctgtcaaattaaaccttgcacgcagaaaggccacgatccggcacggaagctagtgggccgggctgcaaattccatcttattttatgtgggcctaaacgggcccatctactagccgcacgggagaagaaaccctagaaacgcttacctcctctataaatccctgcgagagccgccaagccgtcgacgcatagcgcccatctcctctccgcccgtcgcctgtttcctccgtaatctcttcccgttttgatctcgttttcgtctgattgctctcgaatttggtttgatttctattgtattttcgtttcgctggtagacaaatagatgttggagcggtgatgagcaattttttgtggactagagtttctgatactacttttgtagtatttgaagaccaaacccttggctgtctgagctcctcattctatccatcgctacgaccattctgaattagatttagattgttttatatttctgtttgcggcagctgatttgagatcttggtagcggtgatgagcaatttttatttggactagagtttctgatactgctactttgtggtagttgaagaccaaacctttggctgtctagttccagatctcacaaaacatactgttgcttttagattattaggctgttgtttatccttcgattaggttttagatctcttgattagatgcgtccattaccaattccggaggattattcagttcttcacggtataatggctcggacgccagatgatattcttctgatgtgtggtcatatcctgattgttggcgttcttggtgccagtctaatcctggaaacgccacatatatttacatagtatttttttcgtttatgtgaattttgtcttttggggatctaaatgatgcgaaactctgaaaggaaagcgtccaatctgcggattgtggcgttccatgacatttctttcatattgaataggaagatctgatagattcctcaattgatatgattttgtttaaggttatttgctttgtgatttttgttaaattctttgtgcttttttttcagatgtggatgatgaaatcacaagtgaaaatacagttatccctgtctgattccttcataagggtgctgagaatactttaatctgacacagttttgatgaacctatatctccttttaaattctatggctgttcgtgcagattaatcttttgtgagttgaatgcgaattgttggattggatctgatgcctttgatgacatgatggtttcagaactggcacacatcgttgttgccagagctatgttgatattgctcatgaactaggacggtctgaggcctttccaatccgatactatagaaaaataagagttcaaaagttttttttctgagtatgttttattgcttgcttgctttgatattgtttctgagtatattttgccgtcccaactgtgcatggtcagaagtgaagaatcggcagggatttcatattggagcattctgcaatcagagcaaatggaccacggagaatggaatgtgtttgtcaataagtaaaattgtactaaagtaaattgtggcaaatctgtatgttgatttgtactatgtactggtatcttgctctaaaacattgttaagttttaccagcatctttgcccaaattgaattcgtcaattcttctctggcgtcttagacggaatttggactataaacaacaatttgctctgctggttaaatttcgtacttcgtagcctaagaaggatgcttagttcgtgggcctgcttaacgatataggtggtgttattaagagttccacgcattatcacaaatttgaaaaatagattaatcttatatttataacaactaactttaatatagaaggtttctacacgaaactttacggtttgccacttttatcctaaaaaatatgttcaatactcctccgatccaaatatataagcacgaagtaatattatgaatactgtactgtattggttccactaagacagaagcgaaggaatttcttttaaattgcaaatgtcataccggtattattcattgaactaaaaatgtggatttgtacatgttccaattaaaatcatgtgcagggcccagtatgaaaatggaccgatgggaggctgggagcccacctggctagtcgccaaatacagcccaatgattttttttttcgaagaataatcatactcgcgagatggatcatcagttaattagcgtacgatgagagtttgacacgcaaatgacaaatccgtattgcatcatggagggacaacttcaaataaacagtaaactttatttatttcacggacaaaaaaaatacatgtacgctacttaatagcgctaaatatctactagtatgacttaatcacatcctaataccctaaaccttgtgtatatcttaaaactcctgagactaaagaagactacggctgaagcagacgacaggctacggtgacacacctgccagaaacaaatagacaaaatcagaagatgttagatgagaaaaagaatcataaattttaacagattaaatttcagagggtttcaaatacgaatttacctgaatatttacgacgatgggggactaccaggcgctggagcagcagcagatgggctctgaggcatcaatggaggcaccgagggcgctgtcaaatcaaacaaaacaccagattagattaattaatctcttcatcaaacaagcaatgcatgaaaaaataaacatgtttcatgatggtttatactaatctcttcaatcaaagaaacaatgcataaaaacaaaacatgtttttacgatggattatgttatcttcaaacaaacaatgcattagaaataataaacatgctttacgatagggtttaattagggtgtaatttgattagcaagaacttactgttgcacatggagaacgtctgaagtgggaccgtggcgccgcaggtgttggggagcgtcatcatcttcatcatgtcgacggggagcgggaggaacttgctcaggtcgccattgatgccgtggcacaggcagatgggcgccgtgctcaccagcgacttgaacccctcgcagcaggtgcccggcggcgtctgcgcgctgctgttcgtcaggtagtccgcgcacgacatcatcgacaacagcggcgtcaagcactcctttggctgcggcggcgatggcggcgccggtgccgccggcgaggcgggtgatgcttgagacggtggcgagaccggcgagctggggaacgggaacgggaacgccgggaagccggacccagacgacggcggagcgccgcccggcgaggcgggcgcagggaacggcagcgggagcgggaacgggaaccggaagccagagccagccgaaggcggagcggcgccgccgccgccagaagagccgccgatggggatcagcgggaacgggagcgtgaggaacgggaagagcgggaacggcaagccgggtaatcccggcaatgtcggcgctcctcctccggtggcagctttggactccccggctgcggcaatggcaggctcggacgccgcttcatggttgaacccttggaccctcgcttctgcggccggtgccagcgccgccgccgccacgacggcgaaggcgaagaagagggcggcgagcttggacgacggcgccattctgtctcgtcggcgagagatcggtggtgggtggtgagattggtgttgcggctttggctgattgttgtgcagagcaacgtgggatcgctcgcaatttatagcgttagaatgtagagatttggagtttgaatgttcgtgtaataagattggactctggattaatttcttgtacgtaaaagcagattttagtttgaacgttcatgtaacgagattgaactctcgactgattttcgtacgtgattaagagatatctaatgaacttattacgggtgcaaagtgtatgatgttttctcatctgtgctttcgtttaacgttaaggatgcaatagagaacatcatgatacagcctgcaatcctgacgatctcaaactacatgggtgaaatttttcaaattttcagatataagttgacagaatttgtaagtttgcagttgttttcatacacacaggaggagaggagaacgccattgttacggcacatggagtctgaagctaatacttcgtcctgatacttatctgaattctggattacgctggctgaacaatttttgcgagtccaaccagtgtgaagctgtctcttttgttttgattgcctcgaagagataatataagctcgtagtagtaataattcttaatttctggtgatattgaggacatataactcttttttttcagataaaccgcagagtattcctttgttttacctcaaaaaagaaaagtatgtcgttgtccagagttaaaacttcaatttgtaattatcagaactatactgaagatacgggactctgcagtcctgaacaaataaatgccgtctcgtcatttggatatatcatatatgcatagttacggcaattgcgtgatgaagtctggagctgatacttctgtttgtaataaaccagagatttaaaccaaacacaagaattttgatgagtccaatcagtgtgaagttctatctctgggttcgcttgtcttccagatcacacagcttctagctattctgaatttagattgatattgaaaacacagaattcttcatatttttagataaaccggagtactatttcttttatgggaacagagagttttttttctatgttttcctccagcattggtcttccagaatgtttgggttaatgagaagcctaccaaagcaaagcgtttgtcgatcatttattttatagattctggagagtcccgtttatctgtttgaatcttttcttccggacatcacagatcttcaaaagttcagaatagatttggcttcgaattttaggatttcactacagcttgcaagctgcaagcaacaggggcatcaatctggcaagcaacaacagggcatcaacacgcatagcggttcaatagattacgtaactcgacacaggcagcacacagtaaaacatatactagcataaaaacctgagataatatagcatcagcactggcaatctggcacaagtcaaacagcctcaaaatcatagtacatctcaagagataagagataacaacgcattacaggagcaacagctgccaagtgccaagtcggcggctaggaagagaggacaaagcattactggagcaacagttgccaagtcggcgcagcagcaactttttcagccgtagccaagccaccatcagcaatatacaagctaaagaagaacagtgagcacatcagccatagccaagcaatctgcaatcagaagggtttgatctgcaatcaaagagaaaactatgtgccaaaccggtagcaatacaaatgtgtacagtacacagtcagaacaagagcataatttagacaaatttgtttgtcagatcaaatttttaagcaaaacataagaaacagcacaaaagggtatagcagaagcaaaatttggacacaatgattagggatcacttattcattatagttcttccatgctgctctaccacagcaaaacgtttcagacaccatcaaaccagacttaaggatacacattacaggtaaatagtacacaatgaaacgggacacgaccaaggaccagaccagacaaccatagctccattggggaagacaaataggcagacttgtgaaccctagaacagcagcagctccatggctgaggacttactggccaccacggaggcggagcaccaggtggagtgtggactccttctggatgttgtaatccgcaagggtgcggccatcctcaagctgcttaccagcaaagatcagacgctgctggtccggggggatgccctccttgtcctggatcttcgccttcacgttgtcaatagtgtcggacgactcaacctcaagggtaatggtcttgccagtcagggtcttcacgaagatctgcatcccacccctgagcctgagaaccaggtgaagggtggactccttctggatgttgtagtcagccaaggtgcggccatcctccagctgcttgccggcgaagatgaggcgctgctggtccggggggataccctccttgtcctggatcttggccttcacgttgtcgatcgtgtccgaggactcgacctcaagcgtgatggtcttgccggtcagggtcttgacgaagatctgcataccacccctgagcctgagcacaaggtggagggtggactccttctggatgttgtagtcggcaagggtgcggccgtcctccagctgcttgccagcgaagatgagacgctgctggtccggggggatgccctccttgtcctggatcttggccttcacattgtcgatcgtgtccgaggactcgacctcaagtgtgatggtcttgccag

SEQ ID NO: 9801 - DNA, 75496 bp, Oryza sativa
  unsure (1)..(75496): unsure at all n locations
gccattagcaaatatttatagcaccacgttatcaaatcatggagtaattaggtttaaaagattcgtctcataatttacacgcaatctgtgtaattaatttttttatctatgtttaatactttatgtatgtatcaaacattcgataaacattggataagatacggtgaaactttttgcgtgggcagagtaggactagtattttactcgtaccagcagccgggcctatctcacttcgttgtctgcctttcacatctcgaattctcgactccaatctccatattttccatgtgcttttcctctctgactactaatatcactttatttctgctgatgatgctgtcactttcacactgaagctctcagctcaagggccaatgggccatgttggtgactactttagtgagcaactttctaaaggaaacatgaagatacaacaaactacacaaaagaagttaggcaggataatcaaatctgaaggtgaaattgcacttggagatggatggacagagtcacacagggcaacatcatgaggcacctcagcattttacttgcaggcacaaagtctggagctggaaatttcagggggaagggggaccattctgacctgaaactgaacctgctgggaagagcccaaaggctactacccaagttacctgtcctgaaaacagcgccttttaaggatctgtctcacctgagctgttgcccatcatgcgcagcaactaaagttcagtcgaagttgccacttgccagtaggctcttgcctagtcagagcatcttcgtttcaacaccgaggaaagatcaaagatgagagtttgtgacaacatgggctcaactttcctgttgaattctgtgacaagaacgtacaccaacggcagtcaacggcgtcgttgacggtcatatcagataatcttatgtttacatttttacttcaactcctaatgtatgtagctttatgcaaagggtggtaataatgtacacttcatggtcattcctgaatcctgaaccattgtgctctacctatatgatagctgttttctgggctaaaacctgactgaaccattggactgatgctttgggtatcctcgtcaggttgttcttgtagtcaatgtagtagagaccgaatcgcaccgtgtagcctgagttccattcccagttatcgagcagggaccatacaaagtaaccatggacgttgcaaccttctttcctgcagtaattcaagtcggagagttcttaagtagccgtgaaacatatggtcataactgtcaacagaagattgatgcagtcatgctaactgtagctatgtatgcaatcatgatggtgtgtaactagcttctcccgtgtcattctgggggtctgaatgcaacaattcggtgaagctttggtagaaggcagatgcagattatgtggacagtgccgttcctgcggttatctcaggaactagagagctatgtgtatgttttaccagatttattgtatctgctttgcacatatggatgcccattggtgcgataagctagcttgcactcaagaacaacaagagttgtgaacctactgccttcgttcccttacgctgtatctatgtgccaattatagctcccctatgatggaaagtaagcttttggcttcccctctcgaaagaagagaactgctgatgattttatatgttccaatgtatgtacacagaagtgaaacttcaccttatagcatccaggagattagacatataatcattgtggtactgtatccttttatcatcttgtaggacgtcttctaatctagaaaatgggtggttggcatcatccatacctgccataaacagctccctttgttaactattattatatgctttttaaggaaagaattcttatctactgtcaataatctccagccaacataccattttcagtaatgactacgggcgggtttccatacttttctttcacatgtttcatcagcttgaacataccccatggaactatgtgcagccaacttgatgctgcctgaaagttgatcaatacaaattttagtttcaaccaatcatttgactagaaatagcataaatgaaaggataggtataagtataacaagtcttagcaacggcaagaatggctttgcaaattgtaccgtttctcctattttcttcccatgtctataagctgccatagtgcatgcagagaagtcagtaatactgaaaacagaccaggaaatttagaatctctttatttatcaagactgaccagttggtatgacagcagaatcggttgaagcatcatccattacaagtttcctgatccgcaatctatcgtttctagcatatagtgtagtgtagtggtttatgccaacaaaatctagtgatccagataccaactttgatgcgtgagttgaaaactgaggcagcctatcacctgcaagtttctgcatagaaggaggatagtggccgaacattaagggatccaagaacctgtattcacactagaaaaatgtcataattaatatacgtccagttgctatttagtgtaattatataggaatttaaattaattgatgtatcaccatccaagctcaaagtccattgctcgcgctgctgcttctgtgtcttcatcggcatttgagaacggttcataccatctagaattaagcgcaatcccaatgaggcctccttgttcattctgcaattcatacaaaaaatgcatgcatactattgtcttaattgcttctatttttaagaaaaaaaacattactagaaaatttagtcacatggatcaccttgaaatgttgttcataagcacgaaaagcaccagcatgagctaaaagtatgttgtgagctacaatatatggttcagttgatgatttaccctctctacagaacacatgtgacagaatagaacatctcccaggtgcttggatgccaaggtcatagccgtcaatcgcaaagttgtaaggctcattaaaagtgatccagtgcttcactctatctccaaattccttgaagcaagtaaacgcgtactgaacaaaatcctcgctgcacaattaagatgtcataatcactacaaaaaagaatagaaagagaaattttgatgctacctaaccgtttaactgattatctcagctaaaggaagatgatgtgatagtcttccatacatgatttctgagttcaaccagcctccgtatctgtcttcgagtgcttggggaaggtcccagtggaagagagttacatatggttctatgcctgatccacaaatatagagaacaccaaagaaaaaaagttcatattaatggctgttggaaacagtttgcattatgcagacaccaaacaatagaatacactagacctttatctaacagggcatctatgaggctgttatagtaactcaatccttcttcattaggttcacctgttccatctggcaagatgcatggtggtattagtgaacaataacaaaaaaaaaaagatagattttgcacataatttacataattcatacttggaaagatccgtgaccatgagatagagaagcggtatgcatccatgccgatgtcattcattaactccacatcttcctgccagtttatccatttagttgatgtccttatttcattacaagctcaatcaaagaaatagaatcgactgaacaaataagacatgctctatccagaaagccttcttgatgctccaaaatggcatcttgtatttggaaaaacatcagaaatggtcttcctgttatcttagttttggaagcagcatgctagagaagtggatttgcacaattagtatactagtaattcgtaaattagcagtttagcatgcctacagtctctacacatttaaactgtaaatggcccagacaaaacttgcactgggataatttcctaacaatataatacgtcagacattgatgcttggagatacaaaagtgcgcaagcaattagttttcataaattactagaaattgttgaagcaaaggttggcaaacatttgacctaacttccaggatgcctggatttgcacattcctggttaaatgaccagttcagatttctttgaaaaataatcaattcaggttccatcagatcatccgtaaaactataattcaaatttaaaagaacaacgtaattggtcaaggcaaagttcacatttttaatcccaacataattagccaaaaggtaaacttcatgtcccagattacatatcaggaacaaatgaagtaaataacataaaggaggtacaggaattcatgaattatggataactcaccttgtagcgatggtagtgatcaacagcaacatctgcattgctgaaatcaatcacccgacctgaagaaagattacattgctcatattgcagtcatagtttgcacctcagattagagtacttctacaaataaatccccattactgaacctggtcttttcgtgagagtatcccatatggtaggtccacgttggccctcattcacggcaccttcatactggtaatatattgaccagaaatatccatcagacatccatctaaaagaactcaagtgaaattagagatcttttggtaacactagacctggtaagctgaagaagctgtgccaaagataaaaccgggagggaagtctgctctgcttatagcttcaacacaggcagaaaagctgacaaggatatgaacaagtgttaagagactcatggccttcccttcagtaggtagcactaactactaatgtccacagtctatagataagtagcagacaggattgtaagatatatataaaccttgttgagttggtggggtgtgggaagcaactgaaggctgatcatcacttgtcttggaatccaacgcgcgtctctgctaagtagctcttgtggaggtgacaggttgcaatatctctatcacactggacattttatcaaaaagggaaggaaactttgacatgtccaactctgaaagtgtcacgggtgtagcaaactaaagctttacttgagtgcaacaattccaggcgcattaaggatttcccaggattccagcatttaagaataaaaattgtgtaactgagccagtctttaggaagctacaccagtttgagaggagtgcaagcaacatggaagaaaggctgtgttaatatcacgataacacatttccttcctaaaataccatcctgcagtattgaccccccttttttttctcttatgcaatgatgctaagtgataatgacaataaggagcctaaaaaattatgattaggaaaatacagtggttaaccccaatataataggaatctttgttatccaactagtttggcagcacggcataccaacaaacaagtactactaattattgatcaccacatttgttgcattgatttaatgagtggataaaccaaaactgatagcaacgatttagtgatgaatttatcctgagattatagcacagtcacacacttatcccattggaaagaaaacggtttgcttgcacggcagagcctttcaagaattgaatagctccagtgatagccacacgaaagggacaggagcgatttgctgatggtgaccagtggaacaggcaagaatgtagtgcacgtgttatccatgaaatccctcacatgtacacctaaggtttatcactaaatacagtaacacacaaatacacaatgcatataaacgtagacttttgagtcaacagttttgtttatcacgaaatatagtaactaacactcaaatacacaatgcatagaaacgtagacttctgagtcaaccgtgttagaatagcttggccaaagatgctcgatgattcgaaatcttcggtcaaaaagcttggaattcatagtataacgaccactgtcactatgctatttggttttaggtagagaaaccaagagttcttcgattcgaaattaggttggttcctcaacctcctcacatggatcggaaggcttcgattcgaagtcgtccgattcacatcggtgccatctacctacccatccccattccccaccgcccacgcccaaccctatcaaatgaaacgcgagattgcaaccccccaaagagaagaaaacggcagcggaaatggcgacgtcccgatcccccacgcggcgtgatggggaagaactcctcaggcgtacgcgcatcggcagcgtcgtcaccgcgaaagcgccccccaaaagagagaggaaatgggtcccagaaaagcgcaaaagggacggaacttggggggttgcttgcctccgcaactgtcgcttggcttgcgcgcgtcgccggcgacgtcgaagccgccggaatccgggaggcgccacgcctgggcgcccccgccgaagcagcatctcgcggcgcgtggcgtggtgatgatgcgtgtggagacgaagccacgcaacgcaacgaggaagacgacgagcgtatgctgggctgggccttatccgaaaacgggtgtcggcccatatcaacccaggacgttcggcccacgttacttgaccacaaacgggattgcggacgacgagcggcccacgacatttgggccttaaccggattgctgacgtgcgtgatagtaagtctattttgcctccctcatgttctctgcgagtcagcctgccacgtcaacaggaaccaccctacaaaccatctaagggttgatctgctacggttttcgcttattcgaatcgtttattagcaaataaaaatttatttatgagtaaaatgtttatatatgtccataataacttaaagcaaatgttgtaaaatataagcattttaaaaaaacaaaaaagcaaattcaaaactaagttctcaaattcaaattttggctcataaatataagcataaccaaacaataagaccgattttcctccattttgcggttgagggaggtaattcaatcaggagcagagatgagaaatgtacaatagattttatctgtgtaggtgcgacctgttcttgttgggtcgagacgggattgcggcttacgtgaggcccgctatatttgagcctgaacgggatcgcggctgacttgggccgtaaggtccgttgtagttgggctggattacgataggcctttcattaggcctttatgagtcttacaagtgggccaatccattcggcctagaggcccatttgtcatgtagaaaagcgctcgccattatcctgtccgcgagcacacgaaggcgttcgttatcctctgctgcttctctgcggtttgagcgagcgagggaggaagaggaggggaggagacgaagatggccggggtggcggcgttgcagggcgcgatggcgtccctctccatctctgcgccgggggcggcgagcaccagcagcttctggggccacccgctctccaccttcgccgccgcgccggctggggtttgtgccgactcccaaccctgattctcatttttcgcattcctttatgtttgctctgctcttatgattcgctggaaaagtagaaatgccagcttgcactgagatttaggattttagagctcaccaacagcgtggcattgcaatggtgatgtctacatcgcctcactgtactgttgttgccttcaggagttcaggctcaggacctcaactagccaacaaccaacgttgtgtcaaaattttgtggtatattttttttagagaaaaggtctcaaggattttgtggtatagttgaacctagttggctagtataaggagggtttatatgaattaatgaatgcttgaaatctcaagtttgagtatatcaactgagtgaattcagaagttagaaattgtgttgtctaccatgggatgtggcctgttatgtttcagtttaaacttgaatattatttttttcctatggtggtataagcgatggatacccaatattcagcctttcaagcagaggattatttttctgaaagatgtgccctctagtgagacagaccatttcttgttctaacctgctgtatagatcacatttcgctggctagaaacaattttgcctttgaactttaaattactcaacagtagaaatttcacagaagacttccatgggaaaatgatggaaactcatttcactcggggatagcctgtagcaaatgattggcacactcggtatacttatcagactgaacttgttctatcttttgtatattctttttggcgttccttagctcttctagatagtctactgcacttcgtcctcagaatgagactcactcacgactaattacttacctggaaagtggtgatgagagaaaataaggccgaataattgctcttgaatggagtgactgagctatatatggcacttatatgatgaactgtactaaaatctgcacttatatgaagaaactcgtactaaaagatcatatgattatcctagatattcttgcctaagaaacatcgtgagcatgattcatgtcatatctcaaaagcagctgattattacattttatgtcattttcataagaaactctgacaagatatgcataaatttttatatgcaggttaaatttatgatcaagacatgcccaattcaaatgagggtaagtttcaattcttttttggtctgcagcttgctatttactcaaatgtctgaaatttccctttttccaatgcagcttaagcgatgggagaggaagaagtgtaaaccaaacagtcttcctgtcctgcacaagatgcatgttaggattggcgatacagtacaagtcattgcaggccgtgagaaaggtaaagttggagaagttacgcggctttttaagcacaacagcactgtaatagtgaaggacttgaacttgaagtccaagcacaagaaaggaacagaagatgaaccgggtgaaatcgtcatggtcagcattgtttctcttgaaacttctttctgtgctgcttctagctagtgtcgtatatatagtttcagatgcctgatcgttaacctatggttgttggtgttttctttgatcagattgaaggccccattcacagctcaaatgtgatgctctactcaaaggaaaagaatgtggcgagtagggttggacacaaattccttgaggatggaacgaaggttcggtacctggtcaagactggtgaaataattgacagtgctgagaattgggtcaaggtgttcaaggaaggaagttcggagtgatcatggtagcatgggagtcctgcacattttctgaactgcactttttgtatgcccaaatgagttgatgcttttctagattcagatttcagagtcttgtaaatttctatacagttgccaacatttttttgtatccaatgacatgcttggcttgttaaccagctactagaatggttcagctacattcgctcatacaaatgattttgtaatgttgttgctgtcccctgtcctgagctattattcgcaaccattgactaatttggtccatttccatatagaaatatagatgagatgtacatataaaacccatgaatgattgataagttcttttttttaaggagtagtaagataggagtatcataaaagaaacaagcttagcaattttttttttgaaacaacccgcagcgatgtttctattgatatagtaggaaaaaaatacaaatatatagtgctaaaagatagcgatgtttctattgatatagtaggaaaaaaaatacaaatatatagtgctaaaagattatagtcagaaaaaggaaaaaacaaatctgatttgccattgataacatgaaagctcaagagctcgtgctgacggctgagaatcaacatagcagatatggcacgcaaatatcaaatccaggtgatcgtaagcaaaccacagttttctgcttgcgttttgctccgcgagggaaacctgacacctgtccagatcccatgagacgaagatgcaacccatcaaggtcacgaaaacaacgggaagtcggcaacctgtgctgcacagtgcacacagcctttgacagcacgtgcgcagcgcgcgagccagatctagctggtagtacagatgggcagcatcggcggcggcggctcgccggaggagcgcgcggcggccggtgggccggtgtgcgtgacggggtcgaccggctacgtcggctcgtggctcgtccgcgccctgctccgccgcggctaccgcgtccacgccaccgcccgcgacccaggtacgccgtacgcgcgagctcgctcgctagcatcgatgaagctcgtggcgtggtgaaactgacgatcatggcggccggcggccggggtttggtggcagacaaggcgtggcgggtgttctccgccgtggaggaggggaaggaccagctgcgggtgttccgggcggacatggccggcgaggggagcttcgacgccgccgcgaccggctgcgtggcgttcttccatgtcgccgcctccatggacatccacgtcccaccccagaatggcaacgacaacaacatcggtaatttacgaagtttaatctccgccaaatcaagattacttccatcaatcgctactaaccgcatgcacatttggattagaccgtaattaattagttttcgtgttcttgatggattcttgaagaggagcacgtgaggacgcgggtgctggagccggcgacgaggggaaccatcaacgtgcttcaatcctgcgtccgcgcggggacagtgcgcagggtcgtcttcacgtcgtccatcagcacgatgacggcggcgacgacgacggcggcgaccgggcggcgcaaggccgtcgtcgacgagtcctgcctccgcgccgccgccgacgtctggaacaccaagcccatcggctgggtgcgtatacataggcgcgcgcacacacacacacacacctgctacactccatgaatcctctgaaaaacttagtgttccatggatcaatgaacattttgcaggtttacatcctgtcgaagctgatgacggaggaggcggcattcgggttcgcgagggagaatggcatcaatctggcgtcgctcgtgctgccgacggtggccggcccgttcttgacgccgaatgtgcctaccagcatccagctcctcctctcaccaattacaggcaaacaaattctccatcacacaagtacataatcatgtacagattgtactaatcttgcaatgatcaacagcattgttctgaaaatcaatttgtgtgttcatctccatatgcaggtgatccgaagctgtattctctgctggcatctgtgcactccaggttcgggtgtgtgccattggcacacatccaggacgtgtgcgacgctcacgtgttcttgatggagacggagcaagcggatggacggtatctgtgcgccggagggagctatccgatggcccagattgctcagattctgtccttgcactaccctcctttcaaacctgcaaaaaggcaagcagctgtcaaccagccacatccatgtctttcagatcatagtagtagtatttttttagggtcaagttgatcttgtgcttttctggtgtttgattaggactacgttgatctggtgtgttttggcatgaagctgcaggttaagcaaagatttccatggctcaaacccgtcggtggtatcgtccaagcggctgagggatttggggttcaggttcgagtatgatgttgaggaaatcatcaagaacagcgtcgtacagtgcgttgatcatggattcctgcaggatcccgacagttccaactgttagtggtagtagagtagtgagtagtgacgctcagtgagacagtgactgagccaagttgctgtctggttgggcctgaaaggctttctttcttgtactactagtagttagtacttgtaattcagtaatgtattgtattgacaagagatcaaggcggtatgaaatcagtttcagaaccacacacacacacacacacacacacacacacattttcagtattatccatgcagctcaacattcaccactatctcgaattgatgccatattcctaagcaccacaacatcatgcaaacatccactgataaacacacgcatttgcaaatctaaaaaaaaaaactgctaaaatcatgtgctttttttttctgaagaagaaacaacagcaaaatgtacatactaacaaatcgccagcatctaacagaacagaacaatacctgggatcagatcaccactctaaacaatgattcgattcctcaattcttaaaagcagttttgcagaaggaatcatcaaggtttacagatgacgacgaagcaagggaggagagctctcgggttgagcaggtagagctcctcgatgctggcgtaggcgcccaccttgccggcgacggagtcgaaccccggctgcgccgccacttcctggagattctccagcggccggtggatcctcccggcgaccaccctgcacaccagcagcgccttcctcacgcccgcgttcgccgcctcgtcgccgtctccgtctccggcgatgcattccagcgcgcgcttgctggtggaggtggtgaacacgccgacgccgtccttgatctctctggtcgccgagaagccgtggcggatgatgcggcagacgctgcagctgcccgacgtgcagagggtggaggagtcgccagcgccgagggagcaggcgagcgtcgtggcgtggaaccggaggagctcgttgccgtcggcgaggcagcgcgggtgcttcttggacagcctcgccgccttccccttcaccgcctccctgaactcctcgaaccgcgccaccgacctctccgcgttgtgcaccttcaccacccgctcgatgcggcccagcgcgttctccgtcttcgcccacccggccttgcagatgatctccaccaccttcctcgacgagtcgccttccaccagctcggtcactgcaagaacgcgcgccatggatgatgaaacagagaggcagagcaaagcttgccttgagagttcgtccatggtgtttggtgctccgcttaccggcgtgtctggagtggtggtgcgactccagggcgtcgtggttggcgaagcggtcgccgcagcggtggcaccggatgccgacctcgcaggaggccctggcgggagcgggcgacggcgcctcggcgttgtcgtcgtcgtcatcggcgcggcggagcggcgacatggcggacggggacttcctcgtcgagacaggggtggtgctgcaccgcagcaggagcgggctgtgcgggaacggcaccccgccgccggcgccggcccacgcgccgcggccgggggtgctgatccggagctcgcacttcgcgtccgacctggcggcgagcagcacgtcgtgggtcaccgggttcagcacgtcgttgctccctatcgacctcgggctaccgcatcccccatcgccttcgccggcggcggcggcggcgacggcgtcctcctgcctccggctgccaccgtactggctgtggaacacgtccctcaggttggcgatggaccgcgagcaccccgacctgcgcagcgccgccgccgacgtcgacgacgacttcttgccggctgtgacgccgccctgagattcctcccgctcgatcacgccgcaagaatcccccgatttgcagttgagcgacttcttgagcgccgcccacaccgtcggcatctcccccttctccggcgactccccttcctcgccggacaatccgattgctgccaatcaaaccactccatttttaacaagacacgcaacacacattccatgattccatctagagaaaaaggatccaaaactaaagcagatagtactaatcactgtatattcaagaaagaaattatctacaagatgaacagggggaagaacctgaatactgcaatgactgtgcactgctaactgtaagtctgtaactgctaatgtcattcattcctcatcattgccttcttcttcttctaccttcagctggccagagagtattactgtctccatggatgcaaagttcaaactgaacgggtctcattggcacatgcagctagctagaggccggcattatcttggagtaaactggtaggtaaaaacaattgggactggctggcctctgaaattgctctttggtcttatgcatggactatgccagtgacatgggctcactcttcagtcttgagacgttttgctacttccaaggggaccagaaacggacgaacggatcgtaaatgggtctgcggcttaggagaatctttggcactgcgtacaatgcacactctggtctaatctttgaacaaaatacagtaataatactgggctatggggattaaaaaaagtttgagctgatcggtaacagttcagttcgtgccaatgggctaagctatggcctgattgatcgacaaccggcactgaaatgcggcagggttttgttcatttgtcaccgcataatggcatgatccaaccacgcatggccgttagcaagtcctaggataccgttcagtaagcggtgatgcaacgtgggtgctcagttggcacggcatgagctgatcagattggccattttggctccaggattcatagtcaaaagaaattacatgtcctgcttaaacatatagtaataaatgcaaaagaaaccttgaaaatctaccaaaactcaatgagctaaacagtgtgaaacaaattaattttagagtgaagtgcttgccggtctctagtccacttgtgtcctctaaattcccgaactttcaaaatacattttcaagtctccaatttatcaaagtttatcattttggtcctaaattgacacgagcctattggattctacgtggtgattatctggcatgccacatgaacactaaagtgacatgtcagatagatattctagtcttttttttcttcttcttctttttccttcccttcttcgtttcccttctgtcgttttttccccacatgaatgggaaggaagacaagaaaagaaaaagagaaagaaaatgagtcaataccggcatgccacgtgagcgtcacgtaggatcccagaggagttgtggcgatttaggcactttgataagtttggagacatgaaaatatgttttgagagttcaagtacttgaatgacacaagcaaacaactttagggaccgaaacaatacactttactcttaaatttaggctatgtgcgacaaatgggttataagatgtgtgattggaaaaggaaaatgaatgaatgtctaggattaaatgaggtgtgaataataaatagctaagatacaataatgtcctttgaataatgttccatttgtcaaatgaatccttaaggcatgcatgttgaccagatgatcaccgaagcattaaatttgacaaaaaaaatctctggaaaaaaaggcgtatcaaacaaggactattttaccatcattcgaaggtggtgtcaaattatagccagccaatacatgaacaagttagaaaactgtcaaaacccaattcatcaatagttgagatttggtggtggtatattttttttccttttttttgattatgaccttttagggttgtaatcttgtaattttttttctctatcaatggaactttgcacggttgttaaaaaaaaaacagttgggacttttcaagaaaaaaaaaacggccggagcactgtcaaacgaactcactaataggcctcgaaatctgattgggcttttcacgaacaaaggcccataaaatgtagcccatttaggcccaaactgtacatcacccgtgattaaacggcccagcccaaacatcataacactggatagggtgcagacaagggtcccacccgtcagatcccaacacgtcatcattgccgatccgcttccagaagcagcggcaagtttccatctccttcttccccttggctttttatcgctcgatcaggtggcagcgacaacgagagggagagcgagagctaagttcgccggagaagatggcgatgcggcggtggagagaggatgcggtggcgctgtcgctgcgcgggtgcggattcggcgacggggacgacgaccggccggagaagccgcggcggtacggggtgacggagatgaggagccccttctacgccttccgccccgcccaccacgcgctccaggttctcggagagccccccgcctaatccatccccatttttgtttcatgcttctacgaatcgctgctgggttgtggaatttggtgtagttttaacttttaatcgcgttctgattcccaccgaatcgtgtttgaaatgaagccctatctgctgcataattcttcgtgacttgattgtttatttgttaattcctaaacagggccaccatattggaatcttcagtctgtgcgatcaacgatcagtgtcagtttgtagatcaagtggtacatttgtggatgtcagaatgcgtagcagctacagctagttttatcagttagattcttaaccaagctgttccctcttatgtcgacatagcatggtcccgtgattatatgaagtgcttaatgccatttgagaatttgagaattgaggatgcttacttgcaatgcaaatgaactttctggctactttattgctgcattgaagctgtgactaggaagattttatattactgtttcctttcaaatgaagaaaattctagaatctagataggagtacatcacttgaaaacagaatgaacctcctggttagggatttcaaggaataaaacagctcgttctcaaggctgtcatttcctgttctatttcaggaaatattggattctctaggtccttttgttgatggtttgaagtttactggtggatctcatagtttgatgggaaaagaactggttagagagattactgatttagcacacaagcatgacatatatgtgagtacaggagattgggcagagcatcttctgcgtcaaggaccttcttttttcaagcaatatgtcgaggtatgcaggcattttgtttgttttgaggtacattggtagtggtacactgtgatacacacttgtctctgaaaattctgaaaccacatgcatgacattagatgttccgtttcaggagtgcaaggcattaggatttgacaccatcgagctgaatgctggatctctcaagctcccggaagaagctctcctgagattagtccgcctcatcaagactagtggtttgcaagcaaagcccctgttttcagtgaagtttgacagttctgatattcctccatctggagatagggcatttggggcatacatagttccagtgaagcagaattcaggtaactataataagcaatcgctttctaatgcccttgtttagctacttctctgcgtactaagcaatgtaagtacaaacgcaagaaaacagcattaagggaaaagttgctcaacatacatttgtcaacatcagtttttccttggggaatttagttacaaagcaatttaatactatcaccgtatgtttatttggctatgctgttggctctgtgattgtactgtctacattttcctatgatgccttcctcactttgatgtggtgcagaaagagtcgaggatgttgacctgttgataaggagggccgagaggtgcttggaagcaggggcagacatgatcatgatcgatgccgacgacatttgccagcgcgctgactctctacgggcagacatcgtcgccaagattgtaggccggctcgggctcgagaagaccatgttcgaggcttccaaccccaacacctccgagtggttcgtcagaagatacgggccacgggtaaacgaatcttcaattcttccctgagaccctgaagctgtgcacaatgctatgcttattacaatgctatgctgacagaccattttgcaagcaagaagcttagactcgttcatgaggcatttccaggtgtatctaacgtgttgcgttgtgaatgtaggtgaatctgttcgtggatcactccgacgtgatgaacctggagcgtctccgaggcttcaacatgcgtggagtctgcaactctcccttattcggaatcggctcgcccttcttcctgatgtgacgacctccctgaatcctcctgatgtatacgaccttcctgaatcgtgccagtcctatctcgcatggaatgctgtgttcgtggtgttgagatgccttcctgcaataactggatctggatgatgtgtagtatgaaaaaaatgtactcctgtctgctagcagtatcagctcatgtatcgtatgtactcttcattctctactcctgcccggaaacttattactccttgtcacagtttatagggtgttcttttacaagaaaaaaataactcggtaaatgtttgactaataacaattgcccctaatcgtcgtattaacagtgctaaatattatacacgttatcttactagattcatattttgaagcattcatcgggaatatagcatagaataaattaatggttcaagtatgcaattgaagattgtgtaaaaaaaaaaagaccacctataatttggtacggaaggaatattatcattggtttgggcttgtttggttgggccgctaatggtgcgcagagaacatgggcctgatttgccgggccacatgggccggactttgctatgaggcccatttcgtcgtcgtcgtcgtcgtcgtcccgtctcccgaactcgccgtgcggcactcgtgctttgctcttctcgtctccccactggccgccgccacgtctcgtctcctcctcctcctcgccgccgccgccgccgccgcgggagaagggttgggttggtgaaagagagatgagggagatgatgggtcctccccgccgcggcccggcgtacaagacgaagctgtgcgcgctgtggaggcaaggcgagtgcaaccgcgcctcctgcagcttcgcccacggcgacgccgagctccgtggcccgccgcctcgttccccgttcccgcctcgcggtggacctggtatgcgcgcaccccctctccctcctccccttccccgtctcgctctccccttcccatctgcttttctgcttctcggcggttgccgtgtgctctcgatccgcagctaggtggctctaaatctgttcttctgcaatggaattactgtctccgccgatgttctattgtggacagattgtgccgattgttttctaggaaattattcagacggagtgaaactgggttgagtgtgatctgctatcagtttgaaaagtttgggggatattcatattttgagaagattcatggtgtcctaccatggccccaagaaagagcattctttttaaaataggagtatacatcgtttcatctgtttatgttggatttcgtttataaatcctgagaggatgggctgcatatgtggggaatatgacagacagtgcgggatgctggttgtacagcgaagtgaaagagatatcaattccatctgcgctgtgtgctttctgcagaaacttttggaaatgttgtggaactgagctagtagtaagagaaaatgattagaagaataccaaccatggtaacatctgacaagagctgccctgtaagataaacactgatgacctggtttctatctctggctacttgttggaagaaatatactctacagcctgcacctggtcatgtgatatcagcactagagtcatttatatacaaaactagagcgtaataattccatcagtttgtgtgatatcattttgttgtactgttttatcgcccatatattatccttttcttatagtactttggctgccaaagtttcatgaacaatgtgacatctttgctaatcatatttttgctactgtacaaattagctgttcccagagagattttctccaaccgactacttgcagaggatgacgcatcctattttcattgcacaccttttcagttggtaatcagacattttatggtcgctggaatgcttatcttgctacaggagatttcttgagggatatcatgtggtttcagtcagatgcatgttatcttaatgtgctaaagcacctagcagcttttgcaactaattgtaacaaatttgctgaatacacagcggcaaggtctcctcttgggctttattcttgcctgccattccaagtatgatcacagaaatataaaatttgaagtcaataccaataatatctggacaagtggaattaggtttgttcgacaatattggaatttggaagatctttcttcgtgataatctcagtatgatgtcaaaaattggatattccatccattattcacttctcatgactgacacgttacaaggtgctggatttattttttaagtggtgcatcatacacgtgatatgtgatcatatattggtctccctcatgcattagtctcattggatctgctcttttatgcccccctggggttatgttggtgcctctgctacttactgataattgaataatcatatggctcaaggttgtggtaagcttaatgggtttgtgtgctgcctcatatgtgtatagctcctctatcttttgtggcatattgcttctttgtacatatatgtatgtaaaaactaccatactgaattgtagggagacgagaccatagacctgatgactttagaggtaggcatctgagaccccataggaggaattcccctgaaagagatgccagggatcatttgttccgtgatcacagaccgcgctctcgagatagaggtaatatgctaccaataaaattcttcgttgtaactagtctattctatttttaaacttctatataatctctgaacttttgtatgttgaaatcttccctgcaggctctagtcattcaagatctcccatcaggaagaggtatggggctagggtatacatacatctttgtaatcgagtccttacatgtggttatgcctgtttttatctattttattgggcatataatctaccttcatgtgaccgaatgacttggttcctgctaattgttaatgccctttgcttgtgatgcacccaagggttagcaggtagcctggggcatgcttatgttaaaggcacttgtgcttgttgatatacttataaattacaaactacacaactacatacacatcagagtatcagacaaatataaacatgttgctcttaggcttccatgcaagtaattatgttcacaggaccattttgttaaatatgcaagctgagaaatgtgtatattaatcctctcatacaaatgattcttttttcaaaattttcaagaaaattattatttgttgcaccatttaatgcagtgtttatacagcaacctactgtagagtataatactatcttatcttgctctgtttaatgagggaaccctttgggtttgttgttttcacgaaagatagttctactatgttgccatgtaaccgctgcatgtttttgtcttgcaatttggtcgtttggtgcaattgtatttatgtattccatggatctttcattgagggaaggcatagaaagaagcttgagggtggaaaaactaattcatcagaaagtttgaactcctctgataacgaagatagaaaaaaggatgatagattcaacaaagctgatgataaacatgataatgaagcacaggtttgattatgatctatgcaatccatctcgctagcaaacagttatagtcgtcccaatgctactgaatctcttttatatatttgcttatgttatgcagctgcaacgcattcaactggatatggaagcattacatgaggagaaatcttcactggaggtataatgttcttcatacatatgttacatgtccagcacaaccattagttacttctgctttattattatatgcatgcacatttgaaaagctgatacctgcactacatggattgtgttgagcattctaccacttggctgcaatttatgtttagtttatataaattttggactgctccaatttttctgttttgttttcctgccttaactataatgattatctgtgggaacttttgtgttgagtaaagttcataagatgttcaatccattcagatataatcagatggctccagatatgatgtgtcaatattgacgttaactgatgctacaattgaacaaattgatggctagtttacctttttaagtgacaaatgatacacttcttgaatctcttttagttgcgcctgttgcacttattgtactcttgaggtgtttcaaattcttcttattgttcattcttgcctgtatgttgatattgtaccctattgatgcatccttcttccttgtattataggtgatactgaatggcaagatcaatgaagcatccaaactttctagcagaatagctgatcttgaatcacaattgaacgatgaaaaagaagcttgcgaaaggttttttatttctacaacacatgagcataatcttctctctttttgacaaaaacatcagtttgtggattcttcagctgattaaaaatatccccatgtcgtctgactattcataatactgctctgtcacttaggatggcctcaaaaacaaagaaactcatcaaagcacatgcacgctatgtgaaagctcaggatgatttaaagaggcaggtttcctgtttgtcacctatctgatctgcatacttctattttgtctatatgagaagacaaccctttttttagtctttacatctattaacacattaaagggggtgcaggtcgcaagctcgttttgagaggttcgctgatttgcttgcttcagataccttgaagccgtgtagcaaggatcagggttctagtgctgctaaggaagatccatataatgcttatgaaatgagtccaagtgatcaacggcagaatcatgaaacaactagaaaaagatccgttgccctctcaactagcgaagaaggaaggaatggtaagctaactagatgacatgtttggagatatctatttaatagtcgaatggtttgtccgtattaacgctgccaactagatattagacacatccatgattttcctctgtggtaaataaacaaatgattgacatcctgttactctcacctgtggcttcttcagggaagaaaaggagagagagttatgacaacagggatcctatgtcagagaaatatagaccagaagatgctctagaaccttttcagagcagcaagggaactgaggcaaaagaactattatctgtgaagaagaatttgggggatggtgacaacaatgagaaaggaaatgttgtttcttctgcaaatgtttttacagatagggtgagatgctttcttgcttattctctttatattctctgtggttgctagttgctcgttgctatttctcagtaaaaattagctaatgttatgattcaaagttgatttcctttttgtttattatcaaatctggtagctcgtttggctagaatcaaatccgataatctaatgtttgttcattagcagctaataaccagaatactataatccatcagtttcaaggttttgctgattggttctaaatgaatcatttgtgttctgtgatccaagtttgataactagaataacttcgtgacaccatatggtaattgcatgatttatatgtatcatatgtgttctttatgatccaaatttgatatctaaaacaactctgacagcatttggtaattgcatgattttcttttatttcttgatctctttccatgttttaattttttttctaatatacgtcctccacataattccctcccactagtattatgcttccgtttccaaacattgccttggtatttttctcagagcatcatcctgacaatttgtgccctattttgcttacagtatgagggcggtgatgatgatgatgttcttgtggactagtaaattcatgcagatggagattgacaaagatttcagcagtaaggagtagggtgaagtatggaacatgcgttcattgccatgccagttgcgttttcacagactaacctgaaactaaggctgccagcctgttatttatcttaatgtatcatttaatacaccgggcattaggaattaagcatctcgataacttctgtggcgaagacgagttgcattgttctcaaacaggttattctcacatttgggcaaactgtgcgtcgttattaccatggattccaagtagcctgtatggataatgtatctggcagcctattcgagttaggtttggtattcatggattcatcattgtgttgtaaatttgtaatgctgcgatctttagcgtctgtgttactacagcatcccatggtttcactcggcatgaagcttcaatcctttttcttttttctttgagatggaagttgaactgtggatgctaaggccaccatcgtttggcttagaggtgaaaatggtaacggtaattcccggccgactggcgttcgtttttgacttttaaccggccgaactatatggaaatggtaatcgaccaaaaaaatatggaaatggtaaaaaatatggaaacagaaacggaaatggttttgctgttgtaccgatcattttcgtatttaccgtattcttgcgaaaattaccgtttcttataatatggtaattaccgtatttctaaatatgtcgatatttatagggcatgtatctacttgacccacaggttaaagattgattgactcttcaatcaaatccctaacttgagtgcatggctaaaatatagttatatagtacaaccctaatttatgtaaagttaaatatatgtttttatagtttaatgtttccgtatttgttaccggtttccgatctgtaccgacatgttttcgtccgtattattctgtttccggttttccaatatttccgataccattttcatttccgattttaccgttttcgattttgtttctgagaagaatatgattacggaaatggttgaggctgttttccgatcgtttctgaccgttttcatccctagtttggctaaatgcaccatatgacagcagatgttgtatagaggaaacgataggcgcttaaattagaatgtttcaatcccgcgtgagcctttgtgcatacagtattttagaggctttttgtaggaattctatttcttcaaccccttaataatgttgttcttcgcatcggttgtaatttggtaatgccatttttttttttgttattgaccagacatatggctaatattaagatatttctaaattctgatttggttgagttcggctacaaaccaacagttgctatcaagtcaatgtggtgtttgaaagatgaatataaagattaagtgtttttacgtaaaatgagatggtattacgtatgattaattgagttttaattattacaaacttgaaaaatatatttatttgatattttagagcaacttttatatagaaaattttcgcacgaaacacaccgtttagtagtttaaaaagcgcaaatattcaaattttcatccaacttttgttcaagaaaagaacagggcctcttttcgaaaatcagctatttacgagggatgtttctgtaatttcacacaaagaagagggtacaagctctcgctctctctcggagtctcgggaatcctctcccctccaccgccgccgccgccgccatcaccggcgctccgagccctacctccctcccctcccctcccctcccaacccggctgtctcatggaccggcaagcccaggactacgcggccgcggccatggcgtacgcgcaggcgcagcagcagcaaccgcagtacggcttccaccctcaggcgccgccgccgccgccgcagtacccgcaccacccgccgccctacgccgcgccgctccctcagtacgcgccctacgcgcgcggcatgccgcccccgcaggcccagcagctctactcgcacctcccgccgcaccagcagcctccccacttcgccgcgcacgccatgccgtcgccctccccgccgccgccccaccccgcctacatgcacccgccgccgttcgactccgcgccaccccccgccgcggccccgcccccctccgacccggagctccagaagcgcatcgacaaggtcgtcgagtacatcgcgaagaacgggcccgagttcgaggtcgtgatccgcgacaagcagcacgacaacccggactacgccttcatcttcggcggcgagggccacgcctactacaggtacaagctctgggtctcgccgcggccgccggtggcgccgtaccctcccgggtcgatgcacatgatgccgccgccgctgggtccgatgatgcgtgggccgccgatgcaccagccgggttacccaccgttctacgaccagcaccagcatttcggtgctcacggccatggggagtatgatgccgcgccgcagcaatccttcaagggcctctccgggccgcttccggtggatgtcgcagctgagctgcacgacgtgcttaccaatctcaatggcaccaaggagtcgatcaagggtgccaagacatggttcatgcaaaggtcgccgttcgcgccggctttggctgaagctctgaaggatagagtgtttgctttagaggattcggagaggcagctccacattatcttcctggttaacgatattcttttcgaaaggtatagcttcgatcggcatctgcttttggtatagaattgctatcctctgctgatgtgaaatgaaggcacgctgtctgatctgattgactgaataaatcacatgatacgatgaagaaagcaagaaaacattcctgctgcaaagatatctatttgcctaatatttagcaactcctttcatggtactagttaggacttaggactacttgtttaatcctttgtccaacatggagatgaatgtctttaggtgtttgttggtccttcaaaaactttgcgatgaactgaggtttattcctagtagatctgttatgtcatatgttcttttcctgaaagtcaattctgttttagcttgtgcttatatccatttgtcaggagggtccataatcagatcttagcttctacataatgtaaattaacattagaataatttgattcatcaagatgttagcaatagcaaaatcagctcattgcagacaacaatgttgaagctagcatctgaggataaaattcaaatgcaatgcatgttttatcaataatagcatgaatgcttgatgatgatatttctgctatatgttgtcaatgtttgatgataggtcatatggatcagtagatcgctttggtttgtatcactcattgtactgttttattgataccttttgtgcatttgatctggagaagctgattgtggcatgaaatctttattaattaaattaatatgtcacgactacatgacctttaatcgtttgtttttacatattcctggtcctttgctgaccatgttcgatctgctgcagcttacaaagacgaactaattctcgggaccttgacaatgaggctttggcttttaaatttgtgctgggatcaatgcttgcaaggatatataacaatccacagagcaaagatgataaccagattcgcctcgagaaaatcctgcagttctggggttcaaaggaagtttatgaccaggaaaccattgctaaccttgaaagagacatgaaaggtggggtagcatatcctttgccaccacggcatgtctcaccggatccctcaacattttcaggtgtgtcctctctctttttccatctttcctattattttatgtctgtacatgttgtctacattgaccagcacatttttctcatgtgagttcataaagttttaaggtgttagttttggcataaggattttgtttgtagttttgtgctattgtccttacttcttttgattggataactttttttttctcgaatactgatcagattactctcatgattgttatgtttatatgttaatgcctaaaaaataactttgtaagttggtatgtttgaagtatgtcggcagttcgctaaatttcaccatgcaacagttatctctacttaaatacctttgaagttcactcttattaatatgttcatataactagaaaaatcaactattagcttcttgtctgtttgttatttcctaattaaaccattgtacagattgagtccttttattttcttaatttaattattgtagaaatagatttgttgtggcatcatttctttgcaatactactaacttttatatgtatacaatggaccttttgctttttggaggtaaacctaaatacgcggttggatgttatttcaggatcagtgcatcagccctcaaaatggtcctcagatccacaagaggaaatggcaacccatcctctttctgttccaccccaacctgtgccttctgcacaatttccattaaatcaacttccagctggtgtttaccctcctgtaggtcaaactgcttttccaggatctttgccagtgcaaacccccactgtgctgcctcaaactgctgctacaccagctatcacaaatgatccaaatccacctccttatccactattcccccctggtctgattccaggaatggtgcgaaagatgcagatcgggagtggagtgccatactctcccctgagtccacttgacatccccacaatcattccaccatccactattccggagtccgagatccttgagcgtgtatcgaagttctttaaggagattggagaggtaaacccatcagaagggccaatgaagcaaagcgagcccgatgattacgataactatgagagggacattcctgctcgcaagggtggtgcatgtattcctcccccacccaacttgcttgtaaaccttgagacagggatgcgtgcagatggttcggttgatagtaaaccggggtcaactggccgattgggccttggagcgtctgccgatccaaatgagatcggccagtatgatgatgtctactcttcatatcgcaaacagaggagcagtacataccactcttccatcagtgctcgctcattagcaccaaagtgaacggcagaagcatcatatgaaccctttcctcatctgtgtaggactgtacttaaatgaacagaattggcttatcaaatgattgtacgatgcaactatgtattgtcaccagtagcaaatgatgtttcttccagtatcttcttgtaagaggggttttgatcgagctgattttgttggcgtttttagttcagatttggagttgatattctttccaagcttccagtcctaaaatgtggcttcagtcactgggacaggattgctgctcagtaaaaatatgttttctcatgtacaaaacttgtatccttgtgagtttagtcatgtgaaattaacatcattagatttttcaccaaaagatattttcataccgtacttattaatttccacgcgcacattcaaatacatatcagttgtcaaagctgaacatcccaagtcaatctgtactttttttttgtggcacccatgttcagacattgcacgtacaggtgtatgctcatgcgaatatcaggagctgtattattatctcttggagataagcgaaactcttcagcgtagttcagattttcagaattctgatctattgcgaacagatgtatcagctccagacttcaccatgcctgtgtcgtagcaacgcatatattcaaatgagaacccatttgaatttattgttcaggactgcagagtcccatatcttcagtacagttatgataattacaggctgaattattacctctggacaacgacatacttctccttttttaggtgaactctgcggtttatctgaaaaaaaggatcaccttgttctcagaaattcataattactactcgagttatattatctgtttgaggcaacaagcaagcaaaaccagagatagagcttcatactggttggactcgctaaaattgttcagcctaatcctgaattcaaattattattacgaacagaagtattaaaacagagataagacttcatactggttgaagcttcagacttcatgtgccgtaacgatggctctctttccacgtatgtaatttgagatcgtcaggattgcagactgtatttacaatcgccaaatgaaaacagagataagaaaacatcaatccaattatccaaagttggatatatgctacctgcctaattagtagaagagtaataagttcgtttgacatatgcttacctgcttaatcacgtacgaaaatcggtccaaagttcaatctggttacatgaaaattcaaactaaaatctgctttacgtacgagaaattcatcctgagtccaatcttattacacgaacatttcaaactccaaatctctacattctaacgctatggttgtctggtctggtccttggtcgtgtcccgtttcattgtgtactatttacctgtaatgtgtatccttaagtctggtttgatggtgtctgaaacgttttgctgtggtagagcagcatggaagaactataatgaataagtgatccctaatcattgtgtccaaattttgcttctgctatacccttttgtgctgtttcttatgttttgcttaaaaatttgatctgacaaacaaatttgtctaaattatgctcttgttctgactgtgtactgtacacatttgtattgctaccggtttggcacatagttttctctttgattgcagatcaaacccttctgattgcagattgcttggctatggctgatgtgctcactgttcttctttagcttgtatattgctgatggtggcttggctacggctgaaaaagttgctgctgcgccgacttggcaactgttgctccagtaatgctttgtcctctcttcctagccgccgacttggcacttggcagctgttgctcctgtaatgcgttgttatctcttatctcttgagatgtactatgattttgaggctgtttgacttgtgccagattgccagtgctgatgctatattatctcaggtttttatgctagtatatgttttactgtgtgctgcctgtgtcgagttacgtaatctattgaaccgctatgcgtgttgatgccctgttgttgcttgccagattgatgcccctgttgcttgcagcttgcaagctgtagtgaaatcctaaaattcgaagccaaatctattctgaacttttgaagatctgtgatgtccggaagaaaagattcaaacagataaacgggactctccagaatctataaaataaatgatcgacaaacgctttgctttggtaggcttctcattaacccaaacattctggaagaccaatgctggaggaaaacatagaaaaaaaactctctgttcccataaaagaaatagtactccggtttatctaaaaatatgaagaattctgtgttttcaatatcaatctaaattcagaatagctagaagctgtgtgatctggaagacaagcgaacccagagatagaacttcacactgattggactcatcaaaattcttgtgtttggtttaaatctctggtttattacaaacagaagtatcagctccagacttcatcacgcaattgccgtaactatgcatatatgatatatccaaatgacgagacggcatttatttgttcaggactgcagagtcccgtatcttcagtatagttctgataattacaaattgaagttttaactctggacaacgacatacttttcttttttgaggtaaaacaaaggaatactctgcggtttatctgaaaaaaaagagttatatgtcctcaatatcaccagaaattaagaattattactactacgagcttatattatctcttcgaggcaatcaaaacaaaagagacagcttcacactggttggactcgcaaaaattgttcagccagcgtaatccagaattcagataagtatcaggacgaagtattagcttcagactccatgtgccgtaacaatggcgttctcctctcctcctgtgtgtatgaaaacaactgcaaacttacaaattctgtcaacttatatctgaaaatttgaaaaatttcacccatgtagtttgagatcgtcaggattgcaggctgtatcatgatgttctctattgcatccttaacgttaaacgaaagcacagatgagaaaacatcatacactttgcacccgtaataagttcattagatatctcttaatcacgtacgaaaatcagtcgagagttcaatctcgttacatgaacgttcaaactaaaatctgcttttacgtacaagaaattaatccagagtccaatcttattacacgaacattcaaactccaaatctctacattctaacgctataaattgcgagcgatcccacgttgctctgcacaacaatcagccaaagccgcaacaccaatctcaccacccaccaccgatctctcgccgacgagacagaatggcgccgtcgtccaagctcgccgccctcttcttcgccttcgccgtcgtggcggcggcggcgctggcaccggccgcagaagcgagggtccaagggttcaaccatgaagcggcgtccgagcctgccattgccgcagccggggagtccaaagctgccaccggaggaggagcgccgacattgccgggattacccggcttgccgttcccgctcttcccgttcctcacgctcccgttcccgctgatccccatcggcggctcttctggcggcggcggcgccgctccgccttcggctggctctggcttccggttcccgttcccgctcccgctgccgttccctgcgcccgcctcgccgggcggcgctccgccgtcgtctgggtccggcttcccggcgttcccgttcccgttccccagctcgccggtctcgccaccgtctcaagcatcacccgcctcgccggcggcaccggcgccgccatcgccgccgcagccaaaggagtgcttgacgccgctgttgtcgatgatgtcgtgcgcggactacctgacgaacagcagcgcgcagacgccgccgggcacctgctgcgaggggttcaagtcgctggtgagcacggcgcccatctgcctgtgccacggcatcaatggcgacctgagcaagttcctcccgctccccgtcgacatgatgaagatgatgacgctccccaacacctgcggcgccacggtcccacttcagacgttctccatgtgcaacagtaagttcttgctaatcaaattacaccctaattaaaccctatcgtaaagcatgtttattatttctaatgcattgtttgtttgaagataacataatccatcgtaaaaacatgttttgtttttatgcattgtttctttgattgaagagattagtataaaccatcatgaaacatgtttattttttcatgcattgcttgtttgatgaagagattaattaatctaatctggtgttttgtttgatttgacagcgccctcggtgcctccattgatgcctcagagcccatctgctgctgctccagcgcctggtagtcccccatcgtcgtaaatattcaggtaaattcgtatttgaaaccctctgaaatttaatctgttaaaatttatgattctttttctcatctaacatcttctgattttgtctatttgtttctggcaggtgtgtcaccgtagcctgtcgtctgcttcagccgtagtcttctttagtctcaggagttttaagatatacacaaggtttagggtattaggatgtgattaagtcatactagtagatatttagcgctattaagtagcgtacatgtattttttttgtccgtgaaataaataaagtttactgtttatttgaagttgtccctccatgatgcaatacggatttgtcatttgcgtgtcaaactctcatcgtacgctaattaactgatgatccatctcgcgagtatgattattcttcgaaaaaaaaaatcattgggctgtatttggcgactagccaggtgggctcccagcctcccatcggtccattttcatactgggccctgcacatgattttaattggaacatgtacaaatccacatttttagttcaatgaataataccggtatgacatttgcaatttaaaagaaattccttcgcttctgtcttagtggaaccaatacagtacagtattcataatattacttcgtgcttatatatttggatcggaggagtattgaacatattttttaggataaaagtggcaaaccgtaaagtttcgtgtagaaaccttctatattaaagttagttgttataaatataagattaatctatttttcaaatttgtgataatgcgtggaactcttaataacaccacctatatcgttaagcaggcccacgaactaagcatccttcttaggctacgaagtacgaaatttaaccagcagagcaaattgttgtttatagtccaaattccgtctaagacgccagagaagaattgacgaattcaatttgggcaaagatgctggtaaaacttaacaatgttttagagcaagataccagtacatagtacaaatcaacatacagatttgccacaatttactttagtacaattttacttattgacaaacacattccattctccgtggtccatttgctctgattgcagaatgctccaatatgaaatccctgccgattcttcacttctgaccatgcacagttgggacggcaaaatatactcagaaacaatatcaaagcaagcaagcaataaaacatactcagaaaaaaaacttttgaactcttatttttctatagtatcggattggaaaggcctcagaccgtcctagttcatgagcaatatcaacatagctctggcaacaacgatgtgtgccagttctgaaaccatcatgtcatcaaaggcatcagatccaatccaacaattcgcattcaactcacaaaagattaatctgcacgaacagccatagaatttaaaaggagatataggttcatcaaaactgtgtcagattaaagtattctcagcacccttatgaaggaatcagacagggataactgtattttcacttgtgatttcatcatccacatctgaaaaaaaagcacaaagaatttaacaaaaatcacaaagcaaataaccttaaacaaaatcatatcaattgaggaatctatcagatcttcctattcaatatgaaagaaatgtcatggaacgccacaatccgcagattggacgctttcctttcagagtttcgcatcatttagatccccaaaagacaaaattcacataaacgaaaaaaatactatgtaaatatatgtggcgtttccaggattagactggcaccaagaacgccaacaatcaggatatgaccacacatcagaagaatatcatctggcgtccgagccattataccgtgaagaactgaataatcctccggaattggtaatggacgcatctaatcaagagatctaaaacctaatcgaaggataaacaacagcctaataatctaaaagcaacagtatgttttgtgagatctggaagctcagacagccaagggtttggtcttcaactaccacaaagtagcagtatcagaaactctagtccaaataaaaattgctcatcaccgctaccaagatctcaaatcagctgccgcaaacagaaatataaaacaatctaaatctaattcagaatggtcgtagcgatggatagaatgaggagctcagacagccaagggtttggtcttcaaatactacaaaagtagtatcagaaactctagtccacaaaaaattgctcatcaccgctccaacatctatttgtctaccagcgaaacgaaaatacaatagaaatcaaaccaaattcgagagcaatcagacgaaaacgagatcaaaacgggaagagattacggaggaaacaggcgacgggcggagaggagatgggcgctatgcgtcgacggcttggcggctctcgcagggatttatagaggaggtaagcgtttctagggtttcttctcccgtgcggctagtagatgggcccgtttaggcccacataaaataagatggaatttgcagcccggcccactagcttccgtgccggatcgtggcctttctgcgtgcaaggtttaatttgacaggttgcacctaaagttcattttatattcctcacatattcgtaccacagtaccaagatataacgcatactcctcaacatgaagtactcgctaatttcatctgatccaagctcatgtgacgtgccattatccaaaacgtcaagaatacattcaatataaagtataggaagtactcacctcatgtgaagtactcccatgctcgcttcctcaacatgcatcaacatgaggtatatacagtaccggagggagtatgggaggaaggagtacttcaagaacacattaaggctgtgtttagatcagcacaaagtttaaattttggttgaaattggagatgatgtgactgaaaagttgtgtgtgtatgacatgttgctctgatggaaaatgactaaagtttggattcagactttggatctaaacacaacctaaatgcatacttcctccggtaccatagctttttgacgttttggataatgacacggtctccaaaatataactttgactttatttttctattataatatatataataaacaaatgcatgtttacttttcttattgtactttgaaagataaatctatatgtgttgttttaattactttaaattaaatatttttatagttattgataatcaaagttacgaagtttgacattaactttgtccacaacattaagaataatggaaccgaaggaagtgagagatagagagaagagaagaaaattatactagtagttaataaccatgtaactcttctactggtacatgttaacataagctcacagttgagaccttattagttggggaatttttttgggtttggttatcacatcggatatacggacacacatttgaagtattaaacatagtctaataacaaaacaaattatagattccgccagaaaacaacgagacaaatttattaaggctaattaattcatcattagcaaatgtttactgtagcatcacattgtcagatcatggcgcaattagacttaaaagattcgtctcacaatttacacgcaatcggtgtaattggtttttttcctacatttaatattcaatacatgtgtccaaattaacattttatctgatagcgtgaaaatttttattttgggaactaaacatggcctgactctactattaaacttgatctaaaggcctgttagagccgccaaaagggataggaagggagtaacaactgccggaagtttataattttccatatcatagtctacgtatatacacacagaaaacaacaattaatttttttagctttgtatatatagttactccagcaatattagacgattaataaggaagtaaggccagtttgcgtgctattttttccgtataaaaatgctatatatgtggaaaaaaattgataatataccttcctttggaatgatttgcatttatatatatgcataagaagaattagcacaaatatacccgtacagcacgatgggaatgcgggagtgctacgtaaccgccagccgggttgttcacgcatgttgaacgagcggcaccactgcggtccctgcggcaccgcgtcggtgccgtggtctgggagagcgggaacgtggtggcgaggcggtgccgcggctgtgtcctgcgggaccgtcgcgtccccgcagattggtgatgcgggatggcgcatgctcctccaatacatgcatgcttacgtgcatatgctttgcacgagccagccaatggaatgccggctcacaggatgctacactacgcacgtaatctaacttactgctaatgcatgcatgccactaatcccgcgcaaccaatccgcggaactgcgtcggttccgcacaactgtatcgcggcaccgctagactgacacggtcccgcgtcttcaagctgcgccgccggtgcggtggcgcgttcccgttcagcgggaaaagtatattttcacaacaacgttagaaacatgtatatatgtgtaaaactacgaaaaataatgcatatttcaaaatataattcatatatgtgagcttcgatcagcatcaaaggaaacatatattctttcttaaaacataccttccatatagaaaaacatatatatatatatatatatatatatatatatatatatatatatatatattatatgcagatctaaagactcgaatcatacgacgaccaactattaattgttcattgtcgagatggccacaatccttttcgtcggcgttctcctgatgagctgctgcttcgtgcttatttcctctgcatctggcaatggaacgatcaggccgatcttttcgatgaaccaagcggtatgttacactacacattgctgattgaattgcttttaatttggtatggttgcatgaagtatcggtcgatctattctcaaattaatttcaatctacaaaatcatatatatgtactcttgggattggttcatcagagaaaatgtggtgcaattggaggaacagcgcgctgcaaagagatcgttgacggatacattattgaagacggcagtatctttcaggtgagttcttttattgtaacgaacccgcgtaagtttgcatgcagttgtagtttagatacaatcacattgatcagaacgttataacatgatcccacgtacgtataatctatctctatttatttttttatgttaatgtggttttttttttgctttggtcttctctttaattaataatgtaatacagtatataataatgaatagattgacataagaactccgtactaatgttgtttggcatactgtaatatttttgggaatttttttttgtgcctctaaatctttgccctatgctcatatctttttcatacccctgagtttgtcatctctcttatgtgttttgatctactttatgtctattctattagctggccgttagattttttccaatgaccatactacctcttcctcgtacataaaaagctaatttgaaaagcataagtgcaagaacaattttagattaaaaacaaatcaaggagataaatatattaccccaactttaaattttaaaatgaattttaattaaatttgatgaaaattttaatggtatttgaccttctctctccatggacacatgtcttccaatttggttgaagttctttaaaaaaatatccttttggtttccaggtagaggagaaataggaaaaccaaatgatttttttatgcaattttcctaatttaaattttattaaatttgattgtaattcttttagaaaagtttaaagtttgatttgtcaaacaattctatccattcaattaattgtaatcgaatcttttgccttcgtagttatatttttataagagtaaagtacatcaccggtctctaaacttgtatcgttgtgtcatcccggtccctaaactcgcaaatcgaccgttcaggtcctcaaacttgttcgactatgtcatcccggtccctaaacttgtagatcactcgtataggtcctccaatttgttcagttgtgtcaccccagtccctaaacttggatttgaatatcatctgggtcaaataggacggtctaaagactttatatttaaaaataattcataactttttcatgtgaactctaatgaagataaactttatatcaaacttgtagccctcgacgcgatctataactttgtagttgatgttttttttattttaagtcattttttgtcccaaaatgtaattttaaaattaaaattacaaaatctataaacatgcaacaatattttgggaccctaaacagttttaattcaaaaaattttcaactacaaagttgtaggtcgcgtcgagggctacaattttgatataaagtttgtctttattagagttcacatgaaaaagttatgaattattttttggtataaagtttttagaccgtcctgtttagggaccggggtgacacaactgaacaagttggaggacctaaacgagtgatctgcaagtttagggaccgggatgatacagtcgaacaagtttaaggacctgaatgatcgatttgcgagtttagggaccgggatgacacagcggtacaagtttagggaccggtgatggactttactatttttataacaagcgttcccatatagaaagagagagtaatatagtcatttcagaaaatctaacaccaaaaactcaagggtatataagggagatgataaaagtcaacaacaaaaaaagataggctttattattcataggcgaaaaagattgttctcatcatttttacttgtatttatgtacctaatctgttgttttttctttcagtcagctgggtatataacaaaaacatatgaggcacactatggatttatagcaacaatggacgtttacggcttccctcttagcccgggccaaattgtcagttatggttcagcttggatcataactgataatgttgatgatccagtatcgaatttagaagtcattcagatcggttggagggtagattttttggtttatgtcctatatttttttcttaactaggaaagcattagtttctagttaatcgtcttaatatcctcacaggtcgagccaggtgataaacgcctgttttcgacctctattgcaatgtgagtgatttttctacacatccagcatttcatattctgtttactaatactcttgcagccactaaaaaatatcatttatctcttcaaaaaagacatcgggtcctagctttccgttaacagatccctctcacgtggacaaaacctgccctggttttcaacccaggatcggcgcatacatacgtcctaacgattctatccctggtatttcccaaccaaatggaaccaaggaatacatcacactcaaaataaccaaggttttgttttttcaccaatcccaaaaaatcaatatcgtatatcaatggataatactcctatgtgagaacaaaaaaggtttaatctatttttctctttttgataatgatgtacaggatataacttaagcgaattggatggtgcattatgggtttaacagggatcctgatctcattggtcgcattcccatgtcgtactacagtacactatctaactcagcaactaacatctggtttggaggcatggtggctacaaatgctacatttcaaccgactcctccgcttccgatgggcagcggttacatgccagctgacaacggtaacatggcagcgtccatgaagaacattcaactcatcgatgagcaagggcgagcctggtcagcaggaaatggtttagttggcttctccaccaagaaggatgactacacctttactcctattgttggcgatcagtttttctacgggggccccttccagctcacaagctcgggaaccatgttgcgcgctaatgtcgtttaccctcttctactagtgttgtttttttattatcttttctcatagctacctttggcataggttgaaaaataatttagattatgcctattgaaaaaaaatcactatgtatatttaaatatttcctctgttttatattatagtcatatgattttttttcttagtcaagcttctttaaatttgaccaagtttatgaaaaaaaaatcagcaacctctcctccacgttgccccgtcgtgccggtcaaaacctggcggtacacggtgggtgttgcggggcactaggttgtgtctgagccgccaatggtcgcctccgcctccccgctgtcccgcgaagcgggccaatgtccagtggcacgaggtgagggcgtgggctacgagcagagctgattgaattttatggtggtgttctcggtccgtttagtcctgcatgactggattttgtattgagttttgcccgattgaatttcttattatcgatatttaattttatgatttttccatcgtacgcggctggtatatagagcgataatggacaaaaaatcattcataacccttagtaaagcaaaatcggactccaacctaaagcgggggcaacatcatgcttacgtaagcgaatgatggatagtagaaacactactaatgtttaacaaggtatatatctatatctataatctataactaatataaagattcatatttttcctttcgtcatagtaattttgggtccgtcaatcagaaaagcggcaccctccatatacacgcgcaattacatccgtacgacggccaaagcctactcgtgtacgccggacagataaaaaaaaatcaaagatcgattaacaaaccaatcgaacaatcattgtaagtattacaactacaccgaccgataatcctaacaataatctaatctcatagaaccacttcccaaaatcagactttcatagttcgacacaaccaaatccaaatcggatgcacaacaccataaggcaaacacaataaccaaagattcacccaaataaaatcaacaaagggatccatgggagaactccaatccaccccaacaaaattagcattgcaacctaaagcaattgacaaatcccttcttacatatccatcttgacctctttcttcagcttcttcaggtccggcactagatcgatggcgactagcctggatagaagatgaacagcgctggaccacttgatgttgtggtcacaccgttgccgcctgcgcttgcaccttcctccattgccacttacaaccaccagatccggagaagttgaggtcgttgccagccttcacgctgccctccaccggtccaccccaacgccagcctccgccttgctagatccaccatcaccatggccactgctggtctgctgccgccttcttgtccccttcgccgtggtcgttgcgaaccggacgctcggggcgggaggatgagagggaatgctcgaggcggaggatgagaggtggaggaaaggagaggtagaggtagcgaaccggacgctactgcttgcctccttgctcggagtcagaggattcgagattgggatgaggagaagtgggtttggtggcggcttgggtcggtggggagtggggactggggagcggacggggattagggattaaagaataaagaccgtgggccactagatggcctccggttttttcttttccgagcttcgtatagttgatttttcttgtactcatcactgctgccggcacgattcgtctcttgcagcaggcacgcatcactgctgccaatctgccatggtgccaccacatcatttataattgtgaattggaaataagcagatactgtagtattatatatttgacaatatatttttttatgaatctataactaatataaatattcgtatttttcctttcatcacatctaattttcatcatgttcgtatgcaatccgattcggttagcaatagccatggaaaaaaattgcaaaaaaaaaaaaaaatcggtggccgccgacgccatcaccgccaccggagggaaaagagaggcagcaaagggagccgccgctgccggatccacccgcggtggccgccaccgccgacggatccacccgcggatgaagccgacgccgtcatcgccgtcaatgccgtcgttgagagggcgtcatcaccgtcaaggccaacgaggagagggagagggggagggacggccgtcgctgccgtctccgtcgcaccccgccgtcgctgcgccgtgccggtgagacgggaaggagagcgggagacggagcgcgaacgccaacgccgtcgtcgccgccgttgggagggcgccgtctccgccgcaccctgtcgtcgccgcgccatgccggcgagaagggagggagaagggaagggaagcagcatcggtggtgggagagacggcgccggtggtgggggaggcggccagcttgggggagggggagaagcgggagatggggagagggagcggcaccgccggaggggaggggaggggaagcggcgccggtggggagagagggagggggagaggaggcgttgggcgcagggtggtggccggctcagctgggggaagggggagggggagggttagggtcatcaatttggaattgatctgagccgtccatcaaaatgaacggctcagatcgatcgagggtttgggccgcacgccggccggtggactagcaagtgagaggaggagtatgggggtattaagtagacttttgcgcttgcaggctaaagaagaaaatgggctgaaaagggcccatagagaaaaatgatttttattttgacttttatttaaataaatgctgaaatgatatttgtattatcaaaattaccaaaattaccaattaagctatgtaaattccaagaaaatttcaaagagtgtaattaatatagaaaatttaataaaaattaaatccaaacataatattttatttctcacacttactttacttgaacattaatttaattatatacctaccaacataaaaataccctaatattccagaaaatgtgtatttcatttaattagaatttaatatgttttaatttaatttaatcttttttttcattccgttgcaacgcacgggcacttttgctaaaatttcaaagtgtataattaatattgtagaaaatttaaatttcattaaattagaatttaatatgttttaatttaattctcttttcttttctttccgttccaacgcatgggcacttttgctaaaccaaacaacacttttgatcaatacacacactccgtaatcacccggtgcaacgcacggacacttttgctagtaaagataaagataaataaaaaataaaaaataagggactagctataaatcactcaaaagatgtttttataaaaatcatatgaatataattacggtcaattataatagttacatcatatttacatatttacattgtaattacatgtttgggtgcatatcaaaacaaaattgatacatgtctcatttggtaatggttgcatgctctccaccatgagatcctagaaaaaatgttttgggtgagatatagcaaaatcgaaaaaataatatccctttcccgttcggcttaaagtctctctctctctccctcctcgctgtcccacggctctctttctttccccctcgtgggccacgcctcctgcactagcccatcttccttcctctctctccggcccacctccgccttgggccgcctcgcccagctagcccagggcagcccctcccgcaccgacaggtggggcccacctgtcgaaggcgtcttcctcctccagccgagtctcgttcttctccccggcggccgacgagccctaaaagccgccaccgcatgcatccatcggcctccctgatcgtttcctctcccatttgaatgcgaaaatcgattccccactcccatctcatcatttgaaccataataatcccacccgatcgggcccttaatcgcattaaatcggcggcgaaccgtaccggcgccgaagcttctcaggttgcagtttgccatcgggtttgccgtcgccggccacctccgtcttctcctcgccgtagagtcctcattagtgagcccgccatcctctcctctccttccctatgagctctccatcatccgttgtggcacaaaacgccggcgagccctggctcccatgccgccggacgccggtgccggtctccagccttacctgcttggcaccgcgtggggccgacatgacgcaataaacattgttttgtaatatataaaaaataatttaagaaatttggaacatccattttaacaaccataaaaattcaattggtaatatctttgccgtttgaattccgaattaacccatttaagtgtctgatttttcctaacaatgaaaataacctattatgagctttgctgcttgtatagtttttcttaacctagtacccctctgacggagcgtggggctcctcaccgggagaccgcgcaggcccccctttgccggttcggccgggggcgctaagtgaggttcttcgccctcgatctgaggaatgtcagcgagagaggaaatgcacaagacacgggcgacgtagacaggttcgggccgctgagaagcgtaataccctactcctgtgttctggtggatctgtgtgtgaaggaatacagagagctctggagccagagagctcgagagcgagagagagttcagactctccaatcccctccccagagttcgacctcctctctccctctttaggcctgggccttctttttttatctggttaggggtcaccacacgggcctctcgctacctcagaaaagaaacatgctttttacaatgagggctaatctacagccggaaatgacctctgacaagcagtacgcacgcctccttctccgcccgcccgctttttccggggatgcccacttcaaccttcatttactggccagcgacttccttgccatacttgcgctgaagcctggaatgaatctgaccgggactgacatacccactcctggagttggcacgccggctccggctagggacgagagccaggaagctctcatcattccgacgggacggggcgaggcgtgtgacaggccgcctgttgccacctaacccgcgatctgacaggtctgtgaccggtcatataccgcgactggtcacagaccggataagcatgcgctgcgccgcattgaatgcggcgtggcgcgctcgtctagcccgctataaatgcggttaggtgagcgccgctgtgctcacctaacccacacacgtggcgccaaaaccacagggggtcggggcgccccagccctcggggccgaaacgggagcggcccgacccctcggggagacagagggaggggtggccacgtctccttcgggcccgacccccccgagggggtcaggccacgtgggtgaccgcggctacccaagcctctagtcacgatacccccggccccatgtcaccgacaccctccgtttcatgttacaacgcttaaaatttgactaaatttataaaaaaaattagtaatatttacaacatcaaattagtttcattaaaaatatttgtcttggattaaaaatattactattttttctacaaatttgattaaacttagagcatcaaaacgacttataacctgaaacggagggaatatattttaatggcaaaatttactacaggacactcaaaaaacttgtaattggctgagagtcaccgcaaaaacaagacacagctgatggacactacaaaaaattatgtaattaggtatagaacaccgaagacaatattttataatatccgggtctgaagaggtgagaaatttttcgaaatagcaagattgcccctggctccatcttcctccacctgtgagcagggagcagccgccggcgagtttgtcctgtggagcgggtagcggcaaccgcgcgccaggagcggccgacggcgcgaaggcggacgcggtcgggccggggagggagcgcgagggcggtggcgtggagcgctagcaggaggcggctacgcgtgaggccggcgacggccattcgatgcgtacgtgttcgacatcagcaccgaaaaccatttgacgcgtacattcgattaacacccaggctcagccggaggaggagtaggagggcgtccacggcggcaggcggcgtcgccggagcgcaggtggaggcggcgctgaaccgcaagaacgtggaggcgctcccggaggacgagacggtggagggcggcccggaggacgcgtgggtgcccgaccacgagtctggcggatgaggccgccgtctccggcaccaaaaaccatgaccactgcggagcggcggcggccggcggctcgccgtcggtgcttgaccaggctgtgttcgtccgcgaggaggacatggaggacgtcgagaggccggccgtcgacatggccgctgccaatcacaagcccaaatgagcatcaacttcttgcagcaataaccaataaagccaaataatgccttctgaaatctcatgtacagctagaagtagaaaatttccagtggaaatcttgcatccttggttctatgaatcttgttatctacagtgatcaatcgatcaatcggataacctgttctttgatgaatcttgttgtgtttttatcggatggaatttgctgggattgctttgaattcgtgcacgacgccgtcgatctcgatgaggctgcagtcggggaccttgtcgatctcgttcctcctcatctgcctcctcaccttcaccacctcgccgtggcggccattcgacgcgtatgtgttcgacatcagcacgtagtcgccggcgtccgcgtcggcgtcggtggtgcgccgccacatcacccgctcggcgcgctcgacgtcgtcatgtgcgcggcatgcggcgagcagcgagccccagatgagcgcgtcggggtgtgctggcattgccgcgacgagctcctctgcctcgtctagtctcccggcgcggtcgagcatgtcgacgacgcagccgtagtgctcgatgcgaggttccggcatggcgtcgagttgctggagcccctcctcgacaagtccggcatgacagcacgccgtgaggacgccgaggagggtcacctcgttcggcgtcacgccggctcgttgcatgccggcaaatagagacagggcgtcctcaccgtggccgtgcattgcgagacccaagatcatggatgtgtaggtgtaccggcgagacccagcgaccggcggccatagcaagcctcatatcggccagcgttcaacagcctcctcgcgcacggccacctcctgctcgcgctccgcgccgccgtcgccgccgccctcgcgctccctccccgaccgcgtccgcctccacgccgtcggccgctcctggtgcgcggtcgccgctacttgctctcttgccgtggacaacctcgccggcggctgctccctgctaattttttgtgtgtgatttcaggtggaggaagatggagctaggggcaatcttgctatttcgaaaatttctcacctcttttgacctggatattataaaatattgttttcggtatgctatagccaattacacattttttgtagtgtccatcagccgtgtctcgtttttgcggaccaattatacgttttttgagtgtcctgtagcaaattttgtctattttaattttgcgtttgctgtgtagacgtcattgtttcggaagattggttgttcttcgctgctgatccagaagactttataagcaatcaagtcatatcatacattaaagcatgttgaatcctaacatagtgaaaactatattgtttcgttgttattggatcgcttttataaataataccgttactattctctctccctcatggtgccatcccccaaagatggcgtcgagcactgctgtgaccttagcagaggaggaggccaagccagagatgggaggtagtaggatgcgggcctcctcgtcggtcctggcatctagttttgctgcgagggagaaggtgacaacggggtggagaggaggctctacgcgagattcgtcagccagcgggggacggtcacttggtcagcattgaggtgagtgctttagaagggatttgcttcaaagaccgttgtcaccgttgatcgcattgcctgagctccaatctaccttcaaccgttgctgagttccctcgtctatcctgttgttgagtagaaatagagaaatagagaaggcggagagatctgacatgtgggttctattattattattattattattattattattattattattattattattattattattattattattattattattattattattattattattattattattattattattattattattattattattattattattattattattattattattattattattattattattattattattattatactgataagagtgccggttgcaccatgtgtgtcatctcatgccaaaaccgcctaaaagagtgttcaaaggataatttatttggattaacgagtttgggtagcctggtgtaaccgttcagttggtaaattgtcacaatagtttagaggagtaatttgatattttgttcaaacgcggtagtagtacttctaatactattactgtattgttagcaataagcttatgtttcaataagaaaacctttttttagataataataagaaaacattttataacgaataacgtatgtattactatacagcattcatcatgtgaagatgtaatatagtttcatgtcgaaaaaaaattatataatggtattgcgaaaagatttgctatatagaaataatgatgatggtcaacatatgatgatccagcagtcagcggatgagtttgtagtgccagcgtcaatgtcactcttgccgagagaagtactaggagagcccggtgtgccactaccatgcaggccacttccaaatctaaccatatttgattagccactagtacaagatattaagaggctcatggcacgtcatcatatatttttctatcagaaagaccctgtctctttcaactgatctgaagcgtctctttcagctgatctaaaccttggcctgtactggccttttggctcgatgatcggaataaacagttgagatgctccaagaggtgtcacattcaaccatccatatatacctccctcccccctccatatatagcactagtatggaagccagtggcctaatgctgcatttgaaaaaaaaagaaaagaaaagaaagaacaggcccaaaacaagagaatagtggagcctggagaggctggcctggggatgcagaggcagcagagctaggtgggtcaattttagcccaacctacccattctaatctgggaaggaaaacctgttctgctgggttttggacacaccaagacaccatgagcagagggaggaacctactcattctgggaaggaaaacctgttttgctaggtttttgacccactatgagaagaggaaaacctggttttttttgacccatcatgagcagagggaggaacctacacattctgggaaggaaaccctgttttgctgggttttttttggcccaccgtgagcagagggaggaagactacaaaaccctcccatcttcttcttcgccggcgtgcgctctgtctctctctctccgcgactctgtcgccctagcttcatcctctccaccgcgtagctcagatggattatatcatctccggtgctccccctccccctgcgatcttctgcccaccacctctctcaccgccgccgccacctccacccattttctactctccaccagacgtttcgtacttctctccacccgcgctcccctgctatgctggcttccctgcatgcactggcggcggcggcggcggcaatgatggttctggcggcgacggccattccggcggggatgagcgtcgcgtgttcgtctgcaactgcaagtcatggtcatgggttcaagtgttcgttacgatgatcgcgtctctcttctcggcgtgcggtggcgcctacatctaccggagccagtgctggaagagcttgaagaagaagaagaagccaccgccgccgcttcctctgtatcgtccgcgtccgccgccggctggagacggtcgacccgacgtcaccgtacaccatcatcaccatcactatggcgccaacggcggtggcgggcacagcgccaatggcggcggcggactcgacggcagcagcagcatcgggaccaatggcggcgacatcggcggcaacgacgacctctacggcggcggcggcaacgaaagcttcggcgcagcctccgacgccgaggcgtgctcgatcatgtagcgcgccgacgaggcgacgccggtggcttcaaggcggcggacggctgcacgagatggggggggggggggggggagacgatggcgcggcagcggacgacagccagcgaaagttattctaaccttttttttttttaatctagaactagcacaatgcaagtgtttcactaaaaagaatcacccgtcagcgagggatatttggaagggagtatcagcgagagggattgcgaaaaagacaagcataatgcttgttgctttgtttcccttgttttcctaaagcatcactcctcaccatcaggattattagcattgcctcctaattcaagtggcttcttggttagcgttctcaacttctcattggctcattgctagaagatgatcgcatttaccaaggtgcatctacgacaccaccctatgggcggaacgactcaaaataatagatagaacccgactcaaaaggtacatgttttattcaatctcttgaaagtgagtgtgatctaagctcccgacaaaaaaaagaaaaaagaacacgagtggtttgaatgtttagtacacacatgttctattcaatctcttgaatgttttcataatcatgcttaactcaaaaacgaacacaactggctagttgctcaaaattatgagcaaggaaagcatgttaatctaatttcaatccctgtctatccccttctctatgattttcatggcaagggggaacaattacagtaactgtactgatctcgcatccttatacattacttgataatatacattatgaaaattttcctcgaaaaaaatatacattgtgacaaactccaaagccaagccggtccttattgaacagcaccagtagcatttctatcacttggtaaatagactggatcatcaaccatgctagtagcatttctatcacttggtaaatggactggatcatcaaccatactgacgataggagtttcctgctcttgctgagaaccctgtggagtgcctacaggtatgttgatgccagcaaaaccgaccaacacagcagcagctccgatgtagtccaatagatgaggagcatgacctgttagtgtatccacaatggcagcaattggaacttggatcgtgagaccagccgtggctactgttgttgttgtgagaaggattgcttttgcccacaagtagtcactcaaaacattatctaacaaacctgtaaagaacacaacagcttgatgttagtgctagtccatggatagtttgagcttttatgatcttttacgaagttattccgttatgacttcctacaatgttatatttaaaacaacgcaaaggtttacacacacaaacacaatgcattattatagctcacattatggtcatgcgtaaactgcaaacctaccttttccaacaataagaccaacttgctcccatgtcagcctgtggaatggctccagcttggtgaaattcaagaacaatgcaaaaggaaagaaaaataacatgttaaacagtccaaggaatccaagaaactgagccatgctcacttcgccttgaccttctttctcatcaggcagctttttccgtatcaaggtgatatacacagcatacaatccagctgaaacaatagaaaggacatctccaagtagaggatttgtggcaatggtattcgctgtactacctgaatcagctaggctaacaattatcgttcctcccatgcagagaagtacactgattagtttcaaccacgtgaatgtttctccaagaaatactagtgcaaccaagaaagtgaagaggctagacgtgctgctcaatatcgtatttgactgcaggtacaaagaaacaaggacatgttaccaatggacaggagcgaggttaaataatggcatggaaatgcaggccttagtaacacttactgtaacagtggtgtatcttagagacaggttgaatgtaagctgagcgagaaaccagaaagggcagactaccatgctgactctagccacacgagcacgtgtccagcgcccttttgcatccaaccctttgctgccatctgctacattcagctcggcctggacagggaagactgcttctgaagccaatatgtcttcaggcaaccttgttggtgaggctgtattgccctcttgttcacttccatggagaagatttatgctctccagatcagcagactgctccaggtccgcaacatccttgcctttcaactttgtccaaaagttgttgatagaatcctcaaagtatcgtgcagcctcaactattgggatgtaaataacaaatagagaattgcatatgtaggtaatcaagaatggagaaacaccctcatccacaacagactgaacaatgtagcttgcagcaatccatatactcgcaacagcaacaatgtaaatcaatcctaaacaccacctccacgaatctgtgctcatcattttggcccacctactgccattgacgccaggaccatcatcaaccttcatgcttcctatcaatacgaaaatcttaccatttagcattatacaataaataacagtttcacatggaaactatggctttagttatctagtcctagaaggaaattagattgcagaaggaacaggttgtcatggcatcatgcacatcatttgtgtccgaatgatcacacaaacaaccttaattcagactgtattgctgagttttaacatagctcctaatcagtactcatgcaatctttttttcaattcacaaatgtgtttgcccatcagttgggtcatcaatttccaatgaattgaacatctagaaacaggtgcagacctaaagggtgctcaactctaaaattttctccagcaaagtccggatggatctccaatctacaggtgcagatcccctagagttggttccaaatccacctacgcaaatctggaccattacttcttttttaggcgttagatgtagccatttgcccatgtcaccctcttcttccctaatcccacacataatgagctatacattcataactgacaagacaatgaataatttaagttatggcataatgcttgtgccgtattttataattttcgctgttgatctgctaataatatactcccaccctttccttatatttgccgtcgggagtactagtattcaatcaattgcggtaaatactggtgccccaagtttctgaaaagtaagtaatacataactatcatatgatgatgttcccagtgtcatatgtatttcacacaagatgtttcttctccaatcaagttctggttgtcaactactgatagcccaggaaagctaataagatacagattgacatgtcgcaaagcagtataggattgaaatgatgtggccaccccgagtagatggggaacaaagtgacttgcttaatccgccatccatagaaatcatcagctgaaatccaccccggtggatttggaggtcaaactccaggggatctgcaaccccaatctacactggctcatgaaatcgcggagaggtggagggagggaggctacgagagtaatcaataccttcaaaattcgactcgagccaggatgctggccggtggaaggagcccggccgcgtcgccccctccgaacctgctcctgctcaccggccgccgtgcgtccgagggtgccgcgccgggggaggaggccgcttcacgcctttgcctctgggccttctcgccggccgccgcgggtgtgaggagacgaagggcgcgggagaaggccgccgcgcctccggctccgacgagcggcggaggaggaggaggagagggggatccggggatggagaatttggagggagaagaggtgaggccgtgagggagggggagacagagattagggggaatttggtaattctccacttcatcaattgttttaaactggtcttacaacacaacgaataggaggagggatttgataatttgacacttcacagagtgaactttcgttttgagtaaatttcactttgcttcacattttactattgatatgtgctttggatcatcctttaatctatttttatataataaattggatatagttggataaaaaagttatcaggatggtccaaacatcatggaggtaaaattacttgatccaaaataaaacattagttgaaatgtgatccaaagcgaaatataggtgataaaatgtggcccaaagtgaaatatggtgttttgtttatctgataaaaactttaaacgttagctaccataatatagtaaattgcttaaattggatgcatgaaagccacaattttttcttacaaaataattgcacaatattatatttttagttggtttaagaagtaatggttaaagttgaatttaggagaccatttgaaagctgttattagtttcagagaatcaggctgtgtttagttccttcaaacttccaacttttccgtcacatcaaatgtttggacacatgcatgtaacattaaatgtggacaaaaaaaaaccaattgcacagtttgcatgcaaattgcgagacaaatcttttgagcctaattacaccataatttaataatgtggtgctacagtaaacatttagtaataacatattaattaggcttaatatatttgtctcgcagtttacaggcggaatctgtaatttgttttgtttatagtttacgtttaatactttaaatatgtgtcgtatacattttttttttttgccaaaacaactgatcacagcctcactacaaaagtttatatttaaatatctaaaattattgaatggtcagctggattagccgagctccgtacgggtgcctacctaccgggtggagtaccgccctgtcgagaaggcagcgcgtggacggcgacagccaccgagccgccgacaaggaggaccacgtgcaaatacgattatatggtcataaatactcctttgattttcagtattgtatggcgtcgaattttaaatatacgttttactttttattatttaaattatgtaaaataaatacaagaatatataagttatgctaagattatcttcaatgtttaaacgtacaattcataacaagataattaataattatataattttaataagacaatttattatattattttaagtaagatgaatgattagtacgttgaaaatgtaatggtgtcagatattaagagagagagagaaagaggggagcaatttaactttagaataataaaacttagttaattttttaaactttaactagtagtaggatctcaaattctagtttaaaaaatcaatatacgtaaatttgtctagtagaaaagtaaaatcgtaaatatatcaaaacattttaaaatttattttaatataatattaatgataattaatctgaatattatcctaaacattaaatatctatgactaaaaagtgaattattttctataattgaaatatattcatgggcacatacagaaatagttacagttgctccaaaataaaacagttacaatttggaaacaaaattacatagagagagagaataaacaggatgacgatcgaattaagttacatgtatatatatttctactgaaattttatcaagcaccgaggagctgaagatcgatgagctagtgataatactagtagtggatgtcgttgacgagggcgcagtgcttcctgatctcgccctcggagccggtcttgacgccgaccatgcccagcttcgccatggacctcgcgaacacctggaagaacacctccggcgggctggacaccacgctggcgatgttggcctccgcggcggcgtcggtgacgagggcggcgtcggactggaagagaccgcggcgcctgaggaggccgcggtagtagcccaggtcgaaggtgaggaagctgcccgggtccatctccacgatcgtcgtgttgtccgacggcgccgcgcacttgctccgccgcaggttcgccgcgtactccgcgtccagcgacgggtccgcgtcgccggggccgcctttcccggtgaagttgtacagccgcttgctgaacgagttgcagtgcgcgatgccgatcgtgtgcgcccctgcacccatcaactcaattagtgagttcagaagtaaattaaaagcatctactaccttcgttcgttttttaataaatgacaccgttaactttttatcacatgtttaaccattcatctttttaaaaatttacgtaattataatttattttgttgttagttgttttatcacttaaagtattttaagcatgatttatatcttatacatttacataaaatttttttaatagatgaatgataaaatatatgtttaaaagtgaacagtgttattcattaaaaaaacgaagagagtgcttttcaattactatattagattatttactccacgtctaaaaagaaatgttttctcgaaaaacttttttttctatgatattgcttctaaactacttattctacagcactatacttcttcactcagcatagtatttgttattttgttaagtaagtttatttctaaaagtatttagtttatccttatatgaaaataatccaaataacccatttcaaatggttcggtgacaaaactgagtggttgaatttcatagaaaaccagtgcaagtgcagtttctctgaagtttgtacctaaaaaccatttgtatattatcttagtccaaatcctcaattgaaatctacaggtagatggttgttcagcagtttgcggatttcattaactgatcagatacccagtactctgcaattaatgggagaaaacgagagatgtactggatatctgtttttctggaccatgcaactatgcgcaagtactacaagatattcagctcctgcaatggcttgcacgtagtattgtcatctagctaggaacctcaagtatgtggacggtagctaagctaggaatatcttaagtgatatgtatgcagtgttaattaagaatgcaacgttagacctactacggagtactatactacaacttcagaaaacatcaaaacatccatttaacgctgacatctacgtgactacatcaacacgagggtgtaattagctgtggcatgcagatgcatgtctacatcacaactatcattgctcactggtactacatagtatctatctactccatccatcccataatataaggattttgaagagatcgatgtgaggaggagggggtatatttgtatgaaaattttgagaatcaatgacgcaaactactagctagtgttggaattaatgaatgggccttagcccactcgaagattaattctttggaaaatcacaaaagcccacctcataggatggcatgcatgtggagtttagtaccaccttgcttattctaggagagggggacctccttaaaagggaggatgccctcctagccacttgaagcatgtgtggtggagagaagaggggaaacacacgcgcgctcgctcgcctcgcctggcagggcagggcagggggcgcgcgtgcacgacgtacgcgtcgaatggtccgaaaaattggctcctcacccttgcgcagatgcagcctccttttgcagttttgttttgctgcaaattcggattcgtttttgttttggaaacgttccgaaaaatccgatgcgtgcaaacggcgtggagtccggataagttacgcgcgacttatccggttcggttacgcgcagtagagatcgtgcgggcgccctgatcaagcgacccttctctatataaaccgacccgccgtcttcacgcaatatatgcgaaaatcaatctagggtttgcctcctactctgtactgcgccgtcgctcgtagactactccatcccgctcgccggcgtgcaccagcgatcgggagagcaggtctccggaacctctgcctttgacgtcctgcaccgggagaaggcggcaataaggtttttgggaagcgcttcgcgcgactgctccctgttcgttcgcgacggctcgccttcctcttcgctcgcgtgtttcgtgccttcgtagacacctgcgaaaagtttcgaccaagcagccggtcttttcgtcacctcggtacgtgttcaatatgttgcgcatatttgatctgttcatgtttttctacgtagtttacatgtgtagatctaatgatgcgttcatgctagttttcatctgtaatgtcatgatttatttatggaataaattaaatcattatatgcccataatctcaacaatccaaaaaccttattataggcactgtgattttactatggctggttttgccgatgcactgaggccggataaattcaccggtgtgcattttaagagatggcagatcagggtcactctgtggctgacagctatgaaatgcttctgggtgagtactggcaaacctgaaggagttcttactgctgaacagcagaagcaattcgaggaagccactactctctttgtgggatgcattcttagcgttcttggcgatcgtctggtcgaggtgtatatgcatatgaccgacgctaaggagttatgggatgcactgaatactaaattcggtgctactgatgctagcaatgatctgtatatcatggagcagtttcatgactacaaaatggctgacaaccgttctgtagtcgaacaggctcatgagatacaaaccatggctaaggaactcgaactccttaagtgtgtcttacccgacaaatttgtggccgggtgcattattgcaaaactacctccatcttggaggagtttcggtactgcactcaaacacaagagacaggaatactccgttgaggggttgattgcgtctcttgatgttgaggagaaagctcgggaaaaagatgccgcgtctaagggcgatggtgggcagtccagtgccaatgttgtgcacaaggcccagaacaagagcaaggggaaatacaaagctcagcagaccaccaacttcaagaagcagaagaagaacaacaacaatcctaatcaggatgagaggacttgctttgtgtgtggccaagttggtcatctggctaggaagtgtccacaacgcaaggggatgaaggcacctgcagggcagacttctaagtctgctaatgtgaccattggcaacactggagatggaagcgggtatggtaatttacctactgttttttcagttaatcaatctactaattggtgggttgatactggggccaatgtacatgtttgtgctgacatctcattgttttcttcttatcaggtcgcacggggttccaccgtcctaatggggaatgggtcacatgcttctgttcatggtgttggcacggtagatctaaagtttacttcgggaaagatcgtgcagctgaagaacgtgcagcatgtcccttctatcgacaggaatcttgttagtggctcccgtctgactagagacggatttaagttggtttttgagtctaataaagtagtcgtgtctaaacatggatattttattggtaaaggttatgagtgcggaggcctgttccgcttttccctttctgatttctgcaataagtctgtgaaccatatttgtggcagtgtggatgatgaggctaatgtttggcattcacgtttatgtcatattaattttggcttgatgtctcggctttccagcatgtgtttaattcctaagttttccattgtcaaaggttctaagtgccatagttgtgtgcaatcgaagcaacctcgcaagcctcacaaggctgccgaggagagaaacttggcaccactagaactcctacattcagatctttgtgaaatgaatggggtgttgacgaagggtggaaaacgatatttcatgacattgattgatgatgctactagattttgctatgtgtacttgttgaaaacgaaagacgaggctctagactattttaaaatttataaggcagaagttgaaaatcaacttgacagaaagataaaaaggcttaggtctgatcgtggtggagagtttttctcgaacgagtttgacttattctgtgaggaacatggcatcatacatgagaggacgcctccctattctcccgagtctaatgggattgctgaaaggaagaaccgcacactgactgacttggtgaatgccatgttggacaccgcgggactgcctaaggcatggtggggggaggcattgttgacctcaaatcatgtgttaaacagagttcctaacagaaataaggacaaaacaccatatgagatatggattggtagaaaaccatcactttcttatttgcgcacatgggggtgcttggcgaaagtcaatgtaccaataacgaagaagcgcaaacttggacctaagactgtggactgtgtttttctgggatatgctcatcatagcattgcctatagatttttaatagttaaatccgaggtaccggacatgcatgttggtacaattatggagtctcgtgatgctaccttctttgagagctttttcccaatgaaggatacacatagtggttcgaaccaaccctctgaaataattcccagttcaatcacaccaccagaacaaactgaacatacacatgaacttgtctctgaggaggatgtcagtgaagctcctcgaaggagtaagagacaaaggacggctaagtcttttggtgatgatttcactgtgtacctcgtggatgacactcctaagtcaatttcagaagcatatgcatctcctgatgcagactactggaaggaggctgtccgtagtgaaatggattccattatcgctaacgggacttgggaggtgacagagcgaccctatgggtgtaaacctgtggggtgcaagtgggtgttcaagaagaagcttaggcctgacggtactattgaaaagtacaaggctcggcttgttgctaagggctatactcagaaagaaggcgaagatttctttgacacttactcacctgttgctagattgaccacaattcgtgtgctactttccctagcagcctcacatggtcttctcgttcatcaaatggacgttaagacagcttttcttaatggagagctggatgaggagatctatatggatcaacctgatgggtttgtacttgaaggtcaagaaggcaaagtgtgcaaattgttgaagtctttgtatggtctgaaacaagctcctaagcaatggcatgagaaatttgacaaaacattgacatctgcaggctttgcagtcaatgaggcagataaatgtgtgtactatcaccatggtgggggtgagggagttattttgtgcttgtatgttgacgacatactgatatttgggacaaaccttgaggtgataaatgaggttaaatcattcttgtctcaaaattttgatatgaaagatttgggagtagctgatgttattttaaacattaagctaattagaggtgagaatgggattacactcttgcagtctcattatgtggagaagatcttgaatcgctttggctacattgatagtaagccttctccaacaccttatgatcctagcttgtcgcttcgcaagaacaagagaattgctaggaatcaactggaatactcccaaatcattggctcgttgatgtacctggctagtgcaactaggcctgatatctcctttgctgtgagcaagttgagccgatttacctctaatccgggagatgatcactggcgtgcgcttgagcgagtaatgcgctatctgaaaggtactgtggaattggggcttcactatactgggtatcctgcggtactggagggttatagtgattctaactggatctctgatgtggatgagatcaaagccactagtggatatgttttcacactgggtggtggtgctgtttcatggaggtcttgcaaacagacaattttgacgaggtcaaccatggaagcagagctaacggcactggatactgctactgttgaggcagaatggttgcgtgatctattaatggatctgcctgttgttgaaaaaccggtgccggctatccttatgaactgtgacaatcaaacggtaattgtcaaagtgaatagttctaaggataatatgaaatcgtctagacatgtgaaaagacgattgaagtctgtcaggaaattaagaaactccggagttataacgttggattacatccaaacagcgagaaacctggcagatcccttcacgaagggactatcacgaaatgtgatagacaatgcatcgaaggagatgggtttgagacccatgtgagttatactatggtggtaacccagtctatgtgatcggagatcccgtgaattagatcctgggaagaacaaaccattaataaactagaggagagtaccaatatatataccctctctaagtgaagatgcatatactctcgtgagctgcaaggcaggttggctatgccttaatgagttctgttggctttaattagcaaagatgttgtcctgcagagcattcttgaaggaactcacctttgtgagcttgactgttggtcgcagtccatgaagattttgggtgaatcttctaggaagcttactaaagacctaggagtatgacttatacgctccacccgaggggtagtctacagacggtctagtaccagataagactttgagtgaaacttgcttgcacaagacttgcaattcaaggcgtagtccattgttcaagttgtgagtaagtgtagcttggagttctaggtggatgttcaaccttaattggtctccatcgaaccgctggtatataaacagtacattggaaaaggcaaatctcagtgggattttgagatttggtgggggattgttggaattaatgaatgggccttagcccactcgaagattaattctttggaaaatcacaaaagcccacctcataggatggcatgcatgtggagtttagtaccaccttgcttattctaggagagggggacctccttaaaagggaggatgccctcctagccacttgaagcatgtgtggtggagagaagaggggaaacacacgcgcgctcgctcgcctcgcctggcctggcagggcagggcagggggcgcgcgtgcacgacgtacgcgtcgaatggtccgaaaaattggctcctcacccttgcgcagatgcagcctccttttgcagttttgttttgctgcaaattcggattcgtttttgttttggaaacgttccgaaaaatccgatgcgtgcaaacggcgtggagtccggataagttacgcgcgacttatccggttcggttacgcgcagtagagatcgtgcgggcgccctgatcaagcgacccttctctatataaaccgacccgccgtcttcacgcaatatatgcgaaaatcaatctagggtttgcctcctactctgtactgcgccgtcgctcgtagactactccatcccgctcgccggcgtgcaccagcgatcgggagagcaggtctccggaacctctgcctttgacgtcctgcaccgggagaaggcggcaataaggtttttgggaagcgcttcgcgcgactgctccctgttcgttcgcgacggctcgccttcctcttcgctcgcgtgtttcgtgccttcgtagacacctgcgaaaagtttcgaccaagcagccggttttttcgtcacctcggtacgtgttcaatatgttgcgcatatttggtctgttcatgtttttctacgtagtttacatgtgtagatctaatgatgcgttcatgctagttttcatctgtaatgtcatgatttatttatggaataaattaaatcattatatgcccataatctcaacagctagtaggcatatgcatgccctctgcacttgacgtgtatgtatatattatttcagcttttacacattgaataaatacaatgtaactcatttcttgatctttcaaattaaggattagtaaatagtcactctctcagagaagtaggaggccagttacatcacgtttctcccttatataagctgcatcacttccccccttttatagaatctagctagctactaatttgctactaactcacaagtacagatacaggacagtacaagagctgaatgtttgtcttggcattttttgcacacctttaaccactaacgttaataaaaatcttggtcagttagtgtgtcaatatctgtgctacactctctaaataaaacagcactacatcaaaaaccttatataaagaatcttttgtagagacaatttttaaaatgcctctaagttttgaagctctatagtctagagacactttttagaggcactttcaaaatcgtctaaaatatttttactctagagacatttttagtatactttgttaagtttatctcgtagagacacattttcggcactttaaaatttgtctcatatgtaaatgcattttcttaaggcatttaaaacgatgtaaaggcattttttcaaatattaatatatatcaagtaactagatataagtaacacaaatcacatacttacatataattatatgaggttgagatggttagtgcgtgcctctatttgcatagagacatcttataaaatgcctcttagttcgtagaaacaattcaccaaaaggcacttatgagatactcttcaaaatgtcctcttagttcgtagagacaattcacctcttagtttgtagagacaattcaccaaaaggtatttatgagacactcttcaaaatgtctctataacactgtaaaggcattttaaaaatgcgacaattcaccaaaaggcacttatgagacactcttcaaaatgtctctataacattgtaaaggcattttaaaaatgcctctatagtattagaaaaatgaaaatatctctataagatatatttgttatagtgcagtgttatgaattgcattttattgcacggaacagacttgccagccgtcaactaaaagcctcgttatctgttggttagatcgctatacctactaaactgtttttaactttgatttgatgcgatacccgtgaacaagattcagctaagttttggccttctatgaattaagtagatccaaccctccctgttggacgtagctgtctgttcaattctggattgtcgtggcacgagagttttttagataatggatagaaattcggcatctgtagtgttcctattaggatcgttgtttgttagtattgttactacatggaaatcggtgtgattgaggctatatatctttcatcttctgaatctttggggacagcattactggggtgtgatgtgagtgagagtgagagcgtgtcctagttgccgactcaacacacaaagaatttgcaaaagttaactatcgttctctgcatattgcagattttgcagcacgatatcacatcaccaattcactatttgtcggtggcttgtactacgcatttgcaaacaccacatagctagctacatcaagctagataaaacaccaaacctgatcgagttgtgtatcctgaagactagtaatcaatcgacttaattaggatataacgtgaaaatcgatctttggctgccgtttgtgtcaagttaaccaatcattagcttaggtgaatggttttacttttcttttcagaaacgatgctgtcataagctgaaactggggttttgatcgaccgcaactaattttcaaaatataagcaattttagaatagtgtcaagtcaaacatttttaattttaactattaatagtaaaaaaataaaaaaaaatcaatcatgtaaaattgatgttactagacttatcattaacaaactattacaacttttttttatttaaaacatctcacttttatagatattgttgatcaaaataccatctcaaagactatgtcaaagtctaaaaatgtttactccctccgtcccattttaagtacagccatggttttccgcgttcaactttgaccgtccgtcttatttgaatttttttttgaaaaaaattaaaaacataagttacgagtaaaatattattcatgttttatcatcttataataacaaaaatactaattataaaaaaattttaaataagatggacgattaaagttgggcgcggaaacttatagttgttttggaacgaaggaaatactattgatggtgaagtctgaactctgaaatggatggtgaaattaatactgaaattaatatatggaagagtgaatagttagtttacctgacaaccagatgaggtcggcgaggtcgaggcccttgctctggaaggaggagaggaggtcggtgaagttcatggtcggcgccgggatctggtccagcgcctcctgcttgatcgacaccctcccgtcgcgccgccccgtcgccacccgccagaacggcccgccctgctcgctcgccgtcagccagctcgccggccatcgcaaatgcgggagaggaggaggaggaggagcgaggtgctagcttacgatgacggagatggcgtcgcgggtggcgagcgcgaggatgtcggcgcaggagacgacgccggggcactcgctctcgaccacgctcttgatgcggtcgatgaaggcgaacccccgcagcgtcaggttcggcgccgcgtccttctccgcctccgccccgtccgtcccgttcagcaacaccgacgcgtcgcacccctacaattcaaaaccaccacgccatggccgccgtcgccgccgtcagaattccgccgccgcgccacgccgatcgatcgacgagctatacgcgcttaccctgacgaagcagtcgtggaagtgggtgcggatgagggtggcggcgacggagggggcgagggggacgtgctgctccacgtagtgcttcaccagcgcctccgcgcgcgggcagctctgctcgtagaacccctccttgagcacccacccctccacgccgccgccgacgaagacgacggccaccgccgccgccaccaccaccaacgtcagcggcgcggccattgccatagctaagctcaaagctgctttctctgacaatctctgagtggcagtgcactcggctatatatagagagagacagtgagaaatacagtgatgttcagtgtgttgttcagttttggtgtttgtatttgtatttacttggggtttggtttaggcgccattataattaggggagttacgcaactgaaaataatcagacgagtttggtaggtagaggagaacgtactaatactatatacacacacaagtttggtaatggacagcttcgttagcatctagtaggtgatcaagtcaccaatggcatctgagacgatactgccaatcaaagaattacactctgaaaaatagaccatgtactgattcatctgaaaaaaaattacactctgaactagtatgttctaacttttataagcgaaacgatgaatgtattgtgtatccattgtccctcttatacatattattaattataagcgaaacgtcttattaatgattaaaaaataatttatgaataaaacttttatatgcatcatgtatgttcttagcgatttaaatacgaatgatggaaaataaactactctaaaattaagttttaaaattcaaatttgcgcttatacttataagctcgaggctaaacgatggggtactcagtttcagatattatctgaaaaaatgacagtacattcagaatttcatattcacaacaatctggtgctgtaagcctgtaacattggtcaagatggcaatacatgccaagataggccttatcacaacctgcaagcttctttacaacacttcctagctctcctctctgtctgtatctagcatatgatccagctccatccataatccgtattcagtactccaatgtgaagaaaaggggagaagaatggatggtccacatgaacgcagattaaatggccacccaatgtgcaatgcatgaacaactgtgatgaacatgtccatctctgcactttcctttggcacttgctagtactagtacttagtagttgctacaccctccagtacttcagaagttcagattgcagcatcatgtacagctgtacattttgtactgaacaaattgtctcacattcagtataccactccaaacattcagtattggagaagaagcagcaaatcgcagcagatttggtgatcagtaggatattctacctgttacaatttaaaactgaatagcagtagcaacaaggacacaaagctagtataacagtagacgatgcatggctcacattgtatctatcacaattcataatgggtagggcatgcatgcgaggcctagttggaatctgaatatctatctatctgattgggttgcaaggatggacgaaactcaactccagctctaattggtgaaactgtcccagctcaagaagtttcctgctccggtctcttctgttacaatggcagtgtctgtacctaatctatcagtgtgcccatgaaaaaattcaggttaggttaaaggccatgtcattgcttaccacattgctatgttcttgggctcttggttgatgattcttgtcgagcaccgacagccaagtctgattgctaccggttgtcctgagtcctgacaattcagattcctactgtaaccagaggggttgggttagcatcacatttttaaagttttcatgtatgttattgctgataattgaatgaataaatgctaagattaaaagcaaccgagatttcgctttttttagccgacattttggcatcacattattgtcttcacgggcatgatatctatctcctgtgagagataaggttggtaaacaaggctttacagagggaaaagaaagtgaacacatcaaaagcaacttcctatagccttcacatcttttgttggctacctatactgcagcctagctacgaatctcttccaagttcagagaattgaaacaacttttggaataacttgtcaccagcaaaaattacagtgccgagataactatgtattacacgcaatgccaatatgtatggtgtgctcctacttttctctgatgaacaaactagtaggttcagttagtttcagttatttcgatccagttcaggaccactctagaatctacatgttcatctttcttctcaagagagaacagaatcagcaagacatctttatcagtatattagtccatatggaccatgataaagcaatgtgcatgctcaatgtagtgaaagctttaagctgattacattgatgaatgatgatacagccataataccggctggcttgtcattaaggaaggcataattcaggccaagaaatattttgctccaagtctctcattgttatcaatcttgatacaagttggcagcctactgttgtgaaggaacaattatttagatatatttaaattaggcaaaattggttatatagcatcgaaagttcacgtttttggttttatagcacctaaagataccggttcactttaatagcacccaaagtttaccctgttcctatttttagcacttccgtcaatttttccgtccgtcttaatcgttattgacccagctacgcacacgatatgacgtttttacccctcattgacatgcattctacttgtacttgtgaggggtagaaacgtcatatcgtgtgtgtggctggatcaccacccccacaaacgatcgagaattgacggaagtgctaaaaatgggaacagggtgaactttgagtgatattaaagtgaaccggtatctttaggtgctataaaaccaaaaacgtgaactttcgatgctatataaccaatttttcctttaaattatgaactcatggctaagaaacctccaataattaggctttccttttcttctgtcaattcttggggtacaattcaatcctgccctcttgtactcatgttggtgctatatgaaatgagataatttgaaatgttgggtgaagaacagtagactggcttccttactcacatgaagatcatttcctaactcacatgaagacatcatacttcatttaatacattcagtacatcctccttgcatagtctacactcatagtacagtgtatttggtggggtgcacaccaagagttcaatcatatccctctggtccagatgcagaattcaatcagggaggtcaagtggaagtttagtttggatctgcttgacacggcattttaaatgtaaaagaatattagttttatggcattgtattttgaaaatacacaggaaaaatgcatatttctccattggaagagaggaaaaagaaaaggactgaattacatcaaatcataaaaagaaaacaccatcttccaaccactaaactcaagaagggaatggcactggctaagtttgaatctgtatgttcctaactcgtgtctttttttttaagataatggaatgaaacataaaaggagggtaactcatgtctcatgcacggaaaaggagggtaactagacttactagcatatggttaattaattattactttaacaaaatttaaaaacagattaatataatttttaaagcaactcttttacaattatttaaaaaaacacattgttttgttattcaggatacgtgtacatagaaaacgatggagtaaaatttgagaggagaagttgccgaacactggataagaccttgttggagagcttctattaagcccagcttctctcagaatttccaacacttccaaagtctaaacagttcagattagtacaaagattctaagactaattagttacaaaatctagaaaataaactagaaatcagaagatgagtaaaccagttttttttaaaaaaaaatctaacaaaatgattactcatcagctgattctcggaatttttggctcgtagagtaactaagccctaaacaaactcccaccaaaactgcacctatgctttgatcttgttcacaccagtagcttcagcacagttgttttatttctgaaaattcaccatttcacaaacaccaaatggatcgtaacacgaagatcacaatggagaggaactgaggaaggtcttgttggctgtggaggacaacagctcttgaacggcgaaccagtaaccaccaaatgcggaggtattgcttttcaagaccagccatcaaaaaactggaaaccagtctgcctcggaaaccacacattgtacagattgtacactgtacaagttcactcgtcttcacgtatgaaattatggatacggcctggcgaatacgaaatgtaaatgtgtcttattcacctaagaccaagtctaatagtatagcccactattaactccaatttatctatagccaatctaatagacaattcatacaatagttgtttatcatactattaatatatggtcccacctgtcatacacacattgcgtcttagagtccgtgctgcagctggctacatatctgtagctcgctcatcttctctctcatcttttatctcattaaaatatgtttatagctggctaatagcctgctattatacctgctctaattcagctcgtgttcatcacaacttcccagctcatagacgtgacaactgatggactgagatggcctataacctgcccgggtcaaatattttgcttagaggtaaagatcattgcaaattgcagctgtgctcagaactaaattaactatgagtctgaacggaggatgtacacttgagtaattaacaagatccaattaacaattaacaagctgtagacaggctaatttctgaacctggtccttctgcttatctgctcccatcattgaaggctcacttaggtagatttttggaacaatatcactccatatcatattcagatatcatattcagtagagtgtagaccatgtcccttttctgactagtacaagatacctgcggggatcacttgcaaggccgggcaagcaagcaagagaaaagatgcagggacaagcacagcttcagattgacatttcctgcaaaaaaatcagcaatttgtgttactttgcatggcaacggcaagcccttttgtgtgcatgggggaatccttggaaacgaccttcatctttactacatctctttcagaggttggttgtcaattacacctctcactttcagctttatattggatcccctaaaatatagtttgatagatgataacagttaacaaaaatatattccactgtcagagatttgtgctaatcatttagtagctgtaatttaagtagtgaacctaacgattctttacaccacttatagccattccaatcttttaccatttgtttttttgatggatacaactgtaaaggggggaaaaatctcaagaatgcaaggtcacgcttacgagtaggagagcacaacaaagtggaaaagacgttcaaaagggttaagatgaatgctgaagagaccccatccaagcatgatccacccaacagttaaaagaacagcactaacaaagacacacacttttctgatcaagaaacgaacaaaaagggagatgtataaataaaaaaaaacaagtgataatccattaattgttcaaggtgtcaatgataccatctcacgagctgatgagcttagtagttggtatacacccgtgagtgtgtggctgacagctaggagtagagtatatatatgttgggctgaatgatgctgtttgttgaactgtgacagtactagtacaaatatactccctccgtttaagaaaaaactcaatttaaaagataatgtgaccctcttaaaataataaatttgaactactctttatctagattatattaggagggatcatatcttctcctatattaagtttttttttatacggagggagtatacaggagagtaccaatgtaagtggatttggttatgcactagacgtagtacacataagtaggtgtaggagaaagaagataccatttggaatttgttctagaaggttaatttggttttattattggttgcgacgttgccgtccgaggagatcgttttctattgtttagaggtgaagtctacctttttcatgtattcgacacgcgtaatttctttttctacgagatggcatgcaatttttactttaactccctttatcgtgaatatgtggatttaatttaaaatttggtggagtggtacatgatattatactcaggttgtagaccttttcccgtattttctgtattatactccctccgttttaaatatttgacgccgttgactattttaaatatgtttgatcatttgtcttattaaaaaaatttaagtaattattttttttctatcatttgattcattgttaaatatacttatatgtatatatatagttttatatatttcacaaaagtttttgaataagacgaacgatcaaacatgtgctaaaaaatctacggtgttaaatatttagaaacggaaggagtatttgagagccacgaggaggatatgggccaagcatgaaaaaaggccaacttagtcttggctctcagttcagtttgcattccagcttgtagcctgtaggcccaaatatagcccaatgaattattttcgaggtagaataactggctagatgagaccattgcagtgcagtaatattgtcaaatcaactaatcacaaggacaaaattcactaaattattatttattccatggacaaaaaattacatagactctgcacaaatatctatcatgacttaatcacatctcaaaaccctaaactctgagtactatatttatcgaaaactccttagactaaacttaagacgacgacaaccggcacatgcggtgagtggtgacggactaaggtgacacacctgccaagaataaaatcaaaaggacattttagtataacatctcaaatttttaacagatcgcacaaaattcagagagtttcaaattcaaatatgaatttacctgaagatctatgaagatgggggactagcaggcgctggagcagcggaaggcatcaatggcggcactgatggcgctgtcaaatcaaacacgtcaccagattaatcagattaatctcttcaaacaaacaatgcattagaaataataaacatgctttacgatagggtttaattagggtgtaatttgattagcaagaacttactgttgcacatggagaacgtctgaagtgggaccgtggcgccgcaggtgttggggagcgtcatcatcttcatcatgtcgacggggagcgggaggaacttgctcaggtcgccattgatgccgtggcacaggcagatgggcgccgtgctcaccagcgacttgaacccctcgcagcaggtgcccggcggcgtctgcgcgctgctgttcgtcaggtagtccgcgcacgacatcatcgacaacagcggcgtcaagcactcctttggctgcggcggcgatggcggcgccggtgccgccggcgaggcgggtgatgcttgagacggtggcgagaccggcgagctggggaacgggaacgggaacgccgggaagccggacccagacgacggcggagcgcccccctgcnaagcggccccaaggaacagcaaccggaggcggaacggaaaccgtnagccanaaaccaccaaaaggcgacggggcctcctccgcccaaaaaccgccctatgggtatcaccggaacccggaccttagaaacggaaaagacggaaacgcaaagcggtgaatccggcatggtcggcttcttcctcggggcagtttggaatcccggttggaaaggnaggctcgcaccccttttt

SEQ ID NO: 9802 - DNA, 25196 bp, Oryza sativa
cactcgaaagatttttttcttatctctcactcgattttctcactcaaatttacagtgcattttcttgtaagttacagtgtaatttataaaacttacactgtaacttttgtaagttacactgtaatttttgaatttttgcatgtaaattttaaattttgtattggatttggtctttttcttgaggatatggtaatttagtgtccattatggtgtttcttaattgctttttgctttttattatatctatcggattttaatctaaagattaaaaatctgtgtgatacgattataaaaatctttcgaaagatgtataggtactcccaaattttgataggattttttttatagttgccaaattttggcagcaaaccacttatttggcaattttactaaaatttggtaaggttaaaaataacatcaaagtgaacaggcctttgtaaccattttcatccctgcatctggctaccaattatgaggtagagatggagacagcaagcctgcagttttggttccatggcgttgttgtttactagctctggtagttgcgagcaaccatccgatcaacaggaggtgcggctgcctggtctcatctcatcagtttgtttcttctccatggacaaattctatcaatccaagtagcgttttggttacaggtttctcctcattaagttgttattacagcgacgcagctgcactattcctgctgattaacacaggtagaagtagacaggttgggctaaatccgcaccaaccaattactattatcgtgggtagataaaattaacaacagataatctctcgcaacaaccacgaactgacatgacaaaatgacaacccagcatgccaagacttatctggatatagaacaggaggcaaaggcaaagctggtaggtatagttgaagaagtgagaactgagaaagattcaaatcgggagaaggatggcagatagaattcagatagaccatagatcgattcagcttcagcaagctgatgctgttggagttggcaaaaatccagcaccaaattttccatctagacaaggacattctcgatccattttctcaagtgtggtggtgctatgctccaaccatcctgctctcatctggtccttgttactgtagtactgaaaaaataaaagtgactctctgcaacagcgatggatttggcacattggtcacagtgaattgaacaatgcctagtaaagatagcaagttccagccaaccattcttctcctgcatatccatcgatccaatcattgagaacacaaccaaccaccaagaaattagatcgtctgaattcacacttgcgtcaggtggttcagtgatctgccttatcatcacaaattttgtactccgtttcggattggaatgatccatttcggattggatagcatgactgcaaactgaatcagctggaacatgattcgagacaagatttggtttggtgtgaaatgtcgttagataaatgatctcatttccaccaactaaccagctcgaaatgcgcacctctctccaatccaatggcgagaggagagagagacagggactttttataacgacagcaaccacctgcatcatccacaggcatcatcggatttggagccaggtgcttgttcatacgcgtatttaatttaattacaaagagtatatttcctcctctaccttacacttttactccctccgtcccataatataagagattttgagtttttgctcataatatttgatcactcgtcttatttaaaaaatttgtgcaaatataaaaaacgaaaagttgtgcttaaagtactttggataataaagtaagtcacaaagaaaataaataacaattctaaattttttttaataagacgaatggtcaaacagtgcaagcaaaaactcaaaatcccttatattattagacggagggagtaacatttttcagccctttatactcttaatttttgaaacacccttacaaaacacccagtaggggcggagctacataggagaggggtgcttaggaacacggtcaagaatttttttaagctatagttcatctattttcacccatatatgcaccgcctcaattcaaaataaagcattcctattagcgtaaacttaatcgaaagtagagtaaattaagcgagtggtacatctcttattctcttcattttgttctagtgccgcccctgcacaccagttggactaatgtgaaaacaacattggtaagtacgagtggctggaggtggtgtggttagaagctctagattttttttaaataaatatatattatatttgaaaaataaaaatttaaaaggttaaaaatagcaaaaatttctctctaccttatcctctggagctaatgcacgatgataagtgtgtaaaaaaagaggatagtaaaggagagactattatgcaagaggcagcagttgatgagagtgactcgcaagcttatcccggttgccttgtcaccgccgtaaaggcgcctcctctccctatcttctccactgcctcatctcctctcgtcgtcttcaccgccgttcgatgaatgctactctcatcactagtgcatccagtggtctggatagtatgtttcgatgccaattctgtctctcatggcgacgacctttgctgctgcttggtgatgatggagggtttaattgattgattgtggagtcctaatttggacactaatccgatctgggacccacccagatgagctttagtgatcccatggttgatcaaagcgtgctgcatctgctaatctctgatgtgaagcagattggctgaagaagacttagatatcctttcttctttttttcccttgatagtactccctccgtcccttaatataagggattttgagtttttcttacattaaccactcgtcttgtttaaaaaaattgtggaattattatttatttttttacttgcttaattatccaaattactttaagcacaattttttattttttatatttgcacaaatttttttaataaaacgagcggtcaaacaatgtaaacaaaaactcaaaatgccttgtattatgggatcaagggagtatgtattagctggagtaattatattcagtgctgatagagtaataattgtagcttctactaactgccagtcatgattctaaaaaaatagaaatgtagagtagtatatatctgaatcttagcaaaatattattgtatgatcagatcgaccaattaaggcaagcccctcgtatgctgcttgttcgcaggtgaagctgacggtatgctgacagtagatttacttccttcatctataaatataagtatttttaatgttcagaatttggttatagatataagcatttctcaagtactactttttcaattgtcgtatcgctgagtgtgaactttttcaagtaatctctcagtggtattaaagtaatattattttaagtttattttttctaaactctaaaaataattatatttataaacagaaggactaataattaattaagtgaataataaaggttgattaagtagggtggtacttgcacttccctttccgttgctcgacttgctccaaggggagggtgggtcccaggtgacatgcgagtgggtgatggttggttggttggtaaagtgtgcgtgagcgtgtggggccgaggggccccaccatagaacggcgaggtgagccttatccgaaatggggaaaaaagggtgggctctcttgttgaatcggcaaaaaaaaaaaaactcgaaaaacatttttatttttagtttttggtttttgatttgtcaactgagacggagagagacaagttggttgtcacggtttctcttttcggcgaagcttaggccaatgggagcggtggtgtgtgtgggcgtgtgccacccgcaccaacatggaggcacaagtggtccacgggatcatcatgctttccgttgatccttctcttcctcgagtggcaactggcaacatttgttgtcggggatcttttgttaataagaaaatattttaattacatgcgagttatcgtttactctatccgttatagaatacaacaacctaaaatccgttaccgaataaaataagatgaaacgtatctaaaatcatccagattcatattattaggatatgccccatctaattctagattgcaatgtcctgtaatggagagagcatgtatgccatggtatgaattttttttaatgacctttctgatattcgagctacgagtgataagttaagaaacataagccaactaaaaataacttataaataattttttttatatctatgttactagtgatttaaaattcagtgttggaaagtagactacaagagagcgaaataaactttaaaattcagttttaaaatttaatattttattgtgattggtaagctaacggttagcaaagtaagtgtagctcaactgatttggtttattgtagtaaaaccagtcctgtgtttcctaaaataaaaactgatataccttttttcttacgtgaaacaacagaagaggtcctactgtgctatattatattaaagaaaaactgatatacctcacactactaaaaggagcagtagaacaaatgagcagtagaacaaaaaagcatgggctccagacacaagacgagaagttggcccagatccccgcgacggagagcagcggcccgcactagctcatagtactattcttcgttactgtctacaaccaacaggcaacagatatattcatacataaaaggagacccactgagtggcaactgacacgatgagcatcgcagcagtgttgtgcaacatcacaaagcatatagcatgaggatttactccaggtaggctgatcagcaaatagccatatccacttcagttgaaccaaacagttctgcgttcctctcaaacaagaacagaaaagaaacaacacatgctaagagagattatgctttgctgaatcatgatgatcaggtcaggtttctttcggggcgcccttcttcgcggcctcggcggcagccttctctgcttcaatctcagccacgtactcgtcgatctcagcctcctccagctcgcggaggccatccttgtgtgtcatcaccgcaatctcgatgttcttgccaccgctctcgacaacctggagacatcaacccattactcaaatttaagatatttgttgcatataaaatgccaagcatcaaatgatatagctatgatggagaaaccaactcagcaaaaaacactgaataaacaaaggtcaaaggccaatgagttcgtcatgaaaaaaaaaaagcaaagcaagcaggcatctctgtctacagacaagtaaaaaaggatgacatttgttgcactaaaagagctcatcagaaaattctacatgtgcaacagactgacaaaatgcttaattacctatcaaatggcagtagtaatgtcattataaagaaataagtaccatggactcaatagttaatatgcatatgtgataaccatttgaagccaccaatgaatgtataagcagagtaagaaattgatttcggatatcatgaactgtgcatatgtgataaccaatggcattggtggagccagaatattcttaatgaggggttcagaatctgacctaagtggcatgattattagaatatagtgacatttaccagtaaattatcaaattggttcatatatggtatatagattcatgaaagttcaaatctaataaaataagtgactcttcattcccttgaatagctagttttcttatttgagtataaattgtatatgtttatgtatagtgtggttggttagcaaagagtttggggtacacatgtacccccatgtacccatctacctctgccactgaccaatggaaaaaaggtcaatgagtttgtcatatgtggcaactggcaaagcatgaaacaaagtactaacatactactttgtcttccaacaacgaaaaaaagcaagatatttcactaaaagaggtacagacatatacgtatatgacaaaatgtgcaagagacgtgcattttcacggtctgtatgagcaacagattgcaaaaatgatcaactgcttaccattagctagcataaactcaatggtggctgtgcatatgtgttaaccatttgaagccaccaataaacgaatatataaccagatgcaggctaagaacttgatttgaagtatttagctatgaactatgtgtccttgaggaacataaccatttgcagttagagacttacagtaatgaaaaaaggacatttagacttaggccttctttgtttaggcttataagctagcttatgagccaaaaagcctaagcctaaacaaacaagcagcttatttgtttgccctttttaaagccacaagccactcttacactgttaagccaaaagctaggttggagaaaccattttgttggattatatgaagtggaggtatgactcaaccattgaacttaggatttcaaatccaccggtttataaaacatataagccaataagctgacttaaaatctcaagccaataagtctaagcctaaacaaagatgaccttaatttgatatgtatttttgtaatggtgtatatacattttttttacctagacagtaaatacaatgaactaggcatccgtgcctatatctaagcagcaacatactaaagcggcagcagagttgacaaaatacatgcaagttgcagcttctacagtgcaatagaagagaactacaggtgcagattatcaataacagaaaaacaaaagtttatatgccactaatcaaacaactttaataacttttgaagagaaaaatgtactcacataagaatgcctttaaaaacttttgaaaccgtgcttaacacttaaaatatgagatgcagatgacaatcaaaatacacaaatgattaaatagctagagacgatttactacggataaagagttaaagacctatagccaacactacaacaataaaatttgaggtgcagatgaaaaccaatatacaaatgctgaaatagctggagatgatttatgagattacagatccaagccataccaattgctatgatcactccaggcaccaataagtatcatctttaagatggaagcaaacacaataaaaccaatcccatccatcccactctattttaggttcatgactgcatttatagtctcagccgattgtaacaaagattcagggaactattaatctttgcaccaaattgagtcatatggaacttaacgaagataacgatgttcaatcgtaggcgggcatcttacaaattactgaaccagtcaacataagcaacacaaattagtgaattacttttgagtatctgtcttcagaagcacagttactgattcagtggtagtggatcaaagctagaggtagttttaactagtaaaattattcagtgtgaagtgtatatatatacctcaaggagggctcggatggcaagcttgatggtctccttgccggaggtgtccttgtaattcttctcgaggaactcgcgcatggagttggagttgcggccggtggcgttggccttccaggcggagaaggtgccggatgggtcggtctggtagagggcgggcttctcggtgtaggggtcgaagccgacgatgagggtggagaggccgaaggggcgcaccccgccgctctgggtgtacttctgctgcagtccggcgatgtagcgcgtgatgtactcgacggtgacggggtcctcgacggtgaggcggtggctctggcactcgacgcgcgcccggttgatgagcacgcgggcgtccgccttgagccccgcgcaggcaagcgcgatgtgggtgtcgaggctggcgatcttgcgcatggacctggatttgggggggagatcgatccgcgggtgagatccggcgaaggggagggggcgggttgaaggatttacctggagtcctggagcttgggggtggatttcttctcgacgccgaggacgacggtgtcggtgccgcggacgccgacggcggcgttgcccttgcggacggcctcgagggcgtactccacctggaagaggtggccgtcgggggagaagacggtgatcgcgcggtcgtaccgggccatccctgcctgctggtggtggtggtgtcgccgccggcgaggttttcctgctctcgctttgcttttccttgtcggttgcgccgccgcctccgccttttctcgttgctgctcctgctccgccttttctttcttgcaagaaaagaagacgacgacgacgaagacgaagacgaaacggactcccattggcccatgggccggatcgtattccggcatggggctcgcgttatgaagcccactaagaaaaggccagaaagcccatggtttcttgctcacgaaggttactgcaggctgcatcccatgggcccatggttaagagggatcgaaattttattctccgttccccctttgattcgaggaaaaaaaatcgattttggctatatcttactcgaaaattttttttcttatctttcactcgattttctcacttaaacttacagtgcattttcttgtaagttacagtgcattttcttgtaagttacagtgtaatttatgaaacttacattgtaacttttgttttttaagctacaacgtaatttttaaatctttacatgtaagttttgaaatttgtattggatttagtctttttcttgaagatatggtaatttagtgtccattatagtgtttcttagttgctttttgccttttactgtgtctatcgaattttaatccaaagattaaaaattgcgtgatactcataaaaatctttcgaaaaatgcataggtactctaaaaaaataatggtttgtgtgtgtgtatatgcggtttatgtacctatagactacgtgtattgactgcctaggaaaaaaatataacagtatatcaaacaaaatgttttatcaatagttttgctgcatcataagttcataattttggccatgtcaatatatattgcctcacatgggcataaatttaatttgcaggcatcgagcagtcaccaattatccatgtctccccatcaaaatttgccaatgtcaaaactagagtcaaaccaacactggaatactaggagcccttgtctaaaaatgctttaatttctaaacggatggatttgagagaataaaaaaaagtaagcatgaactagctaattgaatttgtcgacatcatcagggcttgcaaacccatttaaaatctgaattgggcctttcatctatctcctcaaaagggaccaaatctgactcaaacttgaaaacttgttggatgcacttgtggcgtagtggagcttccgctatcttccccctcaaaaaatcatacctgcaaatcataggtagtgtttagttcgtgtgccaaatttttttaagtatacggacacacatttaaagtattaaatgtagactaataacaaaataaattacatattccgcctaaactgcgagacgaaactattaagactatttaatccattattagcaaatgtttactgtaacaccacattgtcaaatcatggcgtaattaggctcaaaagatttgtctcacgatttacatgcaaactatataattttttttttcgtccatatttaatgctctatgcatatgtctaaatatttgatgtgacggtaaagttggaagtttgaaaaaaatattttgaatctaaacacggccatagtatgaattaacaaacacatacctgtaaggctcctttgggttatatgattctcatatgaaaaattgcaatccataggaaattttactataaatgccatttggaacaaaggatttgaagtaaagccctgtttagatttcaacgtttttcttcaaactttcaactttcccgtcacatcgaactttcctacacacaaaaaattttaacttttccgtcacatcgttctaatttcttcaaacttttcaattttagtgtggaactaaacacagcctaaataaattcctgtggattgagttcctaacttcctatacaccaattccgtaggaaacaaacaatgagctcaaacttgtctctctactctctctatagaatccaccaaattctcatgttttttttttcctttcaaccatccaaacaatacacatttcatattcctatatgttttgcctgtttctgtatttttagaatcttgcgttccaaagagtaaaactactactgtttagctaattatttgcaaattgatttagatatgtgtaaaacggaagaagcaattattaagtatatacagttagcttaattaccacagcactctgtagacgctgttgaagaatgcaacgtcagatgcgtagagatctctgagtatgaatgagttgccttcctccattgccagcctcgtcaagctcgccgtcatcttcttctcccacctctcctgcctgtagccggccagcacccagacctcgacctcctcgtcgaccaccaccaccaggcacagcttcccctccaccgccgccaccttcttccgcgcccacctcttctcggtggtggcctccggcggcaggccgatgaggcgccacgtctcggtcttcacgtcgaacgcgaagatgtcctcggcgccgccgctcagcctgtcgggccaccggagccagtgcatggcgccgtgcgccctcaccgccggggcggcctccacgagcgactccggccacaccgcgacgtccgccgaccgccgccacgccatcccccgcgagtcgaacacctcgcagcggaggcagttcctgagcgtggggacggagaagcggacgatcttgaagtccgccgcgccaccgccgccgccgccggggcgcgccagcatcgcggtggcggccgtgcggtagcgcaacctcgggttaggcagcgcgcgccactgcctagtcgccggcttgcagacgtagtaggacgacgccggcttgcgcggcgtggcggcgtcggcgtcggcgtcgacgcagcagacgagcccccggtgcggcgagacggcctcgacgcggacgtgcggggaggggaggaagtcgagggacacgaggtcggccggcggcggcgaggggtgcatggaggagacgaaggtggcgtggtagcggttgcgcgcgacggtctggacgaggtagccggagacggcgtcggcgcggcggcagtggagcggcgcgaaggcgggctcgtaggtgaggcggcgccagcgggtggagacctggcggcaggcggcgaggtcgtcgagcgagacgcgtgtgagcatctcgaacacctggtcctccggcaggctgatgacgtcgcactgctccgacgaagacgaagacatcatggagaagagaagagaagacaagttggggcagaggcaggtactaggtgaggatctagctaattcagaactcgatgtgtgctagctgcattgcattgcaggcttgcagggcaagaaatgttggaattaatgaatgggccttagcccactcgaagattaattctttggaaaatcacaaaagcccacctcatgggatggcatgcatgtggagtttagtaccatcttgcttattctaggagagggggacctccttaaaagggaggatgtcctcctagccacttgaagcatgtgtggtggagagaagaggggaaacacacgcgcgcgctcgctcgcctggcctggcaggcggcgcgcgtgcacgacgtacgcgtcgaatggtccgaaaaattggctcctcacccttgcgcagatgcagcctccttttgcagttttgttttgctgcaaattcggattcgtttttgtgttggaaacgttccgaaaaatccggtgcgtgcaaacggcgtggagtccggataagttacgcgcgacttatccggttcggttacgcgcagtagagatcgtgcgggcgccctgatcaagcgacccttctctatataaaccgacccgccgtcttcatgcaatatatacgcaaaatcaatctagggtttgcctcctactctgtactgcgccgtcgctcgtagcctactccatcccgctcgccggcgtgcaccagcgatcgggagagcaggtctccggaacctctgcctttgacgtcctgcaccgggagaaggcggcaataaggtttttgggaagcgcttcgcgcgactgctccctgttcgttcgcgacggctcgccttcctcttcgctcgcgtgtttcgtgccttcgtagacacctgcgaaaagtttcgaccaagcagccggtcttttcgtcacctcggtacgtgttcaatatgttgcgcatatttgatctgttcatgttatactgtgtagtttacatgtgtagatctaatgatgcgttcatgctagttttcatctgtaatgtcatgatttatttatggaatagattaaatcattatatgtctataatctcaacaatccaaaaaccttattataggcactgtgattttactatggctggttttgccgatgcactgaggccggataaattcaccggtgtgcattttaagagatggcagatcagggtcactctgtggctgacagctatgaaatgcttctgggtgagtactggcaaacctgaaggagttcttactgctgaacagcagaagcaattcgaggaagccactactctctttgtgggatgcattcttagtgttcttggcgatcgtctggtcgaggtgtatatgcatatgaccgacgctaaggagttgtgggatgcactgaatactaaattcggtgctactgatgctagcaatgatctgtatatcatggagcagtttcatgactacaaaatggctgacaaccgttctgtagtcgaacaggctcatgagatacaaaccatggctaaggaactcgaactccttaagtgtgtcttacccgacaaatttgtggccgggtgcattattgcaaaactacctccatcttggaggagtttcggtactgcactcaaacacaagagacaggaatactccgttgaggggttgattgcgtctcttgatgttgaggagaaagctcgggaaaaagatgccgcgtctaagggcgatggtgggcagtccagtgccaatgttgtgcacaaggcccagaacaagagcaaggggaaatacaaagctcagcagaccaccaacttcaagaagcagaagaagaacaacaacaatcctaatcaggatgagaggacttgctttgtgtgtggccaagttggtcatctggctaggaagtgtccacagcgcaaggggatgaaggcacctgcagggcagacttctaagtctgctaatgtgaccattggcaacactggagatggaagcgggtatggtaatttacctactgttttttcagttaatcaatctactaattggtgggttgatactggggccaatgtacatgtttgtgctgacatctcattgttttcttcttatcaggtcgcacggggttccaccgtcctaatggggaatgggtcacatgcttctgttcatggtgttggcacggtagatctgaagtttacttcgggaaagatcgtgcagctgaagaacgtgcagcatgtcccttctatcgacaggaatcttgttagtggctcccgtctgactagagacggatttaagttggtttttgagtctaataaagtagtcgtgtctaaacatggatattttattggtaaaggttatgagtgcggaggcctgttccgctttttcctttctgatttctgcaataagtctgtgaaccatatttgtggcagtgtggatgatgaggctaatgtttggcattcacgtttatgtcatattaattttggcttgatgtctcggctttccagcatgtgtttaattcctaagttttccattgtcaaaggttctaagtgctatagttgtgtgcaatcgaagcaacctcgcaagcctcacaaggctgccgaggagagaaacttggcaccactagaactcctacattcagatctttgtgaaatgaatggggtgttgacgaagggtggaaaacgatatttcatgacattgattgatgatgctactagattttgctatgtgtacttgttgaaaacgaaagacgaggctctagactattttaaaatttataaggcagaagttgaaaatcaacttgacagaaagataaaaaggcttaggtctgatcgtggtggagagtttttctcgaacgagtttgacttattctgtgaggaacatggcatcatacatgagaggacgcctccctattctcccgagtctaatgggattgctgaaaggaagaaccgcacactgactgacttggtgaatgccatgttggacaccgcgggactgcctaaggcatggtggggggaggcattgttgacctcaaatcatgtgttaaacagagttcctaacagaaataaggacaaaacaccatatgagatatggattggtagaaaaccatcactttcttatttgcgcacatggggttgcttggcgaaagtcaatgtaccaataacaaagaagcgcaaacttggacctaagactgtggactgtgtttttctgggatatgctcatcatagcattgcctatagatttttaatagttaaatccgaggtaccggacatgcatgttggtacaattatggagtctcgtgatgctaccttctttgagagctttttcccaatgaaggatacacatagtggttcgaaccaaccctctgaaataattcccagttcaatcacaccaccagaacaaactgaacatacacatgaacttgtctctgaggaggatgtcagtgaagctcctcgaaggagtaagagacaaaggacggctaagtcttttggtgatgatttcactgtgtacctcgtggatgacactcctaagtcaatttcagaagcatatgcatctcctgatgcagactactggaaggaggctgtccgtagtgaaatggattccattatcgctaacgggacttgggaggtgacagagcgaccctatgggtgtaaacctgtggggtgcaagtgggtgttcaagaagaagcttaggcctgacggtactattgaaaagtacaaggctcggcttgttgctaagggctatactcagaaagaaggcgaagatttctttgacacttactcacctgttgctagattgaccacaattcgtgtgctactttccctagcagcctcacatggtcttctcgttcatcaaatggacgttaagacagcttttcttaatggagagctggatgaggagatctatatggatcaacctgatgggtttgtagttgaaggtcaagaaggcaaagtgtgcaaattgttgaagtctttgtatggtctgaaacaagctcctaagcaatggcatgagaaatttgacaaaacattgacatctgcaggctttgcagtcaatgaggcagataaatgtgtgtactatcgccatggtgggggtgagggagttattttgtgcttgtatgttgatgacatactgatatttgggacaaaccttgaggtgataaatgaggttaaatcattcttgtctcaaaattttgatatgaaagatttgggagtagctgatgttatcttaaacattaagctaattagaggtgagaatgggattacactcttgcagtcccattatgtggagaagatcttgaatcgctttggctacattgatagtaagccttctccaacaccttatgatcctagcttgttgcttcgcaagaacaagagaattgctaggaatcaactggaatactcccaaatcattggctcgttgatgtacctggctagtgcaactaggcctgatatctcctttgctgtgagcaagttgagccgatttacctctaatccgggagatgatcactggcgtgcgcttgagcgagtaatgcgctatctgaaaggtactgtggaattggggcttcactatactgggtatcctgcggtactggagggttatagtgattctaactggatctctgatgtggatgagatcaaagccactagtggatatgttttcacactgggtggtggtgctgtttcatggaggtcttgcaaacagaccattttgacgaggtcaaccatggaagcagagctaacggcactggatactgctactgttgaggcagaatggctgcgtgatctattaatggatctgcctgttgttgaaaaaccggtgccggctatccttatgaactgtgacaatcaaacggtaattgtcaaagtgaatagttctaaggataatatgaaatcgtctagacatgtgaaaagacgattgaagtctgtcaggaaattaagaaactccggagttataacgttgaattacatccaaacagcgagaaacctggcagatcccttcacgaagggactatcacgaaatgtgataaacaatgcatcgaaggagatgggtttgagacccatgtgagttatactatggtggtaacccagtctatgtgatcggagatcccgtgaattagatcctgggaagaacaaaccattagtaaactagaggagagtatcaatatatataccctctccaagtgaagatgcatgtactctcgtgagctgcaaggcaggttggctatgccttaatgagttctgttggctttaattagcgaagatgttgtcctgcagagcattcttgaaagaactcacctttgtgagcttgactgttggtcgcagtctatgaagattttgggtgaatcttctaggaagcttactaaagacctaggagtatgacctatacgctccacccgaggggtagtctacagacggtctagtaccagataagactttgagtgaaacttgcttgcacaagacttgcaattcaaggcgtagtccattgttcaagttgtgagtaagtgtagcttggagttctaggtggatgttcaaccttaattggtctccatcgaaccgctggtatataaacagtacattggaaaaggcaaatctcagtgggattttgagatttggtgggggattgttggaattaatgaatgggccttagcccactcgaagattaattctttggaaaatcacaaaagcccacctcatgggatggcatgcatgtggagtttagtaccatcttgcttattctaggagagggggacctccttaaaagggaggatgtcctcctagccacttgaagcatgtgtggtggagagaagaggggaaacacacgcgcgcgctcgctcgcctggccgggccgggcagggcaggcggcgcgcgtgcacgacgtacgcgtcgaatggtccgaaaaattggctcctcacccttgcgcagatgcagcctccttttgcagttttgttttgctgcaaattcggattcgtttttgtgttggaaacgttccgaaaaatccggtgcgtgcaaacggcgtggagtccggataagttacgcgcgacttatccggttcggttacgcgcagtagagatcgtgcgggcgccctgatcaagcgacccttctctatataaaccgacccgccgtcttcatgcaatatatacgcaaaatcaatctagggtttgcctcctactctgtactgcgccgtcgctcgtagcctactccatcccgctcgccggcgtgcaccagcgatcgggagagcaggtctccggaacctctgcctttgacgtcctgcaccgggagaaggcggcaataaggtttttgggaagcgcttcgcgcgactgctccctgttcgttcgcgacggctcgccttcctcttcgctcgcgtgtttcgtgccttcgtagacacctgcgaaaagtttcgaccaagcagccggtcttttcgtcacctcggtacgtgttcaatatgttgcgcatatttgatctgttcatgttatactgtgtagtttacatgtgtagatctaatgatgcgttcatgctagttttcatctgtaatgtcatgatttatttatggaatagattaaatcattatatgtctataatctcaacaagaaatccgattaattggatcggcagctagaacagttaataataaggcgagaaaaatcctcgccgcacgcggagagccgaatcgtgaaagaaaaatgcagcgagcacgtaactccatgggttggaaacgataacgaggtgaagaaacgcgtatactatcttctcaacgataacgagatgcaacgatagtcaagcatgtcaggatatcaggactggagctttgggcatgccgcttccgtagcggccaagcctaccagggtgtgtttagttctagggtgtaaaaattcaaaagtatacagacacacatttgaagtattaaacgtagactaaaaacaaaacaaattacagattccgcatgtaaactataatatcattattagccgattggtttctactggattatattgttatttattacgttatcatcagccgaatgtctctagatcattatttacttaagtatcagaatatatatatagccgattgctcaaaaccctatcgacataggctagtattggcatcgtctgaaagtactccatcatcttgtcagctgatcggctctttggtgatcaatatatttatctatcttgtcagttgcaagattaaactgactggcagatccacatctcatcaagttttagatctacactggagctaagcagatcttccagactgttgtgttcgtcgacttagttcgcgcaaacacagttccgacaccatcaaccgagcgcggatttttaatgaaaagatatccccaaaagaagagtctgttcactttgatgccaaaaaaaaccttaccaaaatttggcattgccaaaattttgacaggatttcttatatagttaccaaaatttggcagtaaactaaatgtagctacttttttagcaactttaccaaaatttggtaaggttgaaaatgacatcaaagtgaacaggcccgaagcaagctgtacggcccaatccagcccattgggaggagtagagtagcccagttatttttttcttgacctggcccggcccaaaattgatttgctgtcttctctctccaggtgttagttcatccatgatccatctgtcgttcgttacagccaagaaagaagggatcgaatatttgcttgagtcggcggcatgatgcattgcatgcgactttgagcgcgatatcgtcatgactcatgagttgatgtctgctgatcgatcgagacgccctgaaaccgtgctttccctgacggttcagaattggcttcaggttaacctcagatcggggagtttcatcattactcactgacgatattaattaattcttctagattagatgtggaaatagtagtaggagttattttaatataatgatctttcctctaaaaaaagaaatagtagtaggagtagatcatttccttgaaattttctcatgctagtaaattgacatttttcacaggctgctttagtaaggattctgtcacatcttatctgaatcagcactagtatttcgttactgcttccttcactgaatggttcatctgtcactaagaagaaaataaatcaacaatttgttcagaggtttgaaaaaaagataagcacttgaaagttacaccctctctgaatttaccctcttgtttctttccccttcatagaagatgagatcatctcttgcggggacttgttcttcacgctgtcactgttatgtaagatggggcttcttcctcacctcttgcataaaaatcaaggaactcatgtgatgatggccgttggccgacacaaaatggccacctgaagcataaccatatgaaagcagagatccaggctcataagccctttccctttacagggcattttcttcaggtgtgtgctagcttaacactaaggttatcacataccaaagtaggttcaatattctgcttttcattgtcattgatgagcacaactcacatcttttgcctatgcctcccccttttgccttcaccacattcagaattccttttgcatcttgtttcttcagagttcagacaccctttcattgcagatcagaatgattgattggttggttaattataccaacaaaccctcaaaattcttatcaggtatacatctgagacaaacaggatctgtattactcttcccagtttacctccaaagtgattcttatcctctctataaagacaagagagaatctcagattgtgctacttgctgtgcgtcttgctcaaactttcagaaagaaaaaaaaaaggagcttaccagatcagaatatcagatcatatgctcttctcgtttagattcaaagcagtgcatctggagtccacattgatcaggacccccaaaaaattaagcacagcaaagaatgtaactagaatagcaaggttttctgaaaggcaaataaagcaaagcaaacacttaagctgagcagcaactacaactgccaaacttgaggttgaggacgcctgcattctctatccacaaacaaaaagtcctaaagaatgtgctctccacgtctcccccttttgatcactcctactaccgatcaagaatccttctcacttgctactagctgaataatacgggatgctcctgctgggcaagcaggatcaccactgcaattgccaaggcagattggaaagctaaggatgccggccatgatgccgcagttgcagccatccccgcgccactgctggccttcaagctcgccagccacaccgcatcttcgagctgctcgtggctcggtctccgtgatccgttctttgaattcccactgcaaacataccaaattcatgaaacagttaatcaacctgaaactgatgatgagaatttgctgttgcaagttccttccatgcctactaggaaattgcaactttccagtcaaggccagcttaggtacaatgtgagtgaagtggggacgaatcaaaggagaaaaagattgctcctccttttcttagcctaactctatcacatcctcaatgaacctttactttccccaattcatgttccacatcgaaatccccaattttagcccaaaatctcaatgtgctgcaatcagtccactatacaattctatcatacacataaaaatctcatactggtaatcgaaatctcaatgcaatggattcgctgcgattgatttgaagtgtacaaacctggatggagtggatcgggggcagaaggtgatggtgtaatcggtgtggttgcaggtgaaggtggaggtggcgtcgtcgtaggcgtagctgtaggatttagggcacgccgacttgaagagctgcgagtactgggaagggtggcaggtgtccgggttgccgtaggcgccattgcagcagtactcaggtcggccgaacgcctcgcaggcgctgcggcaagcgcggccatcgtcggcgcggagctcggaggggcagcgctcgttgaggtcgacgaggcagccggtgtcggggcagtcgggggcggaggcctggacgagcatggggaggttgtagccgtcgacgaggctgacgtcgtagaagtccttgccgtcggcgccgttgagggtgaactcggcgagcgtggcgggcggggaggcgcccgcgccgcggcactccacctggccggagccgcagtcccccgtggcgcaggagcccttgccggagtcgtcgaattcgcagccggagcgcgcccagaagcggcccgaccaccccgacggcgcgtagagggagcgcgacccccccggcgagagcgcgaagccggtggtctccagcggcggcgtgccggagcccgacagcacccccggccacaccgtgtccgtgcaccggttggtgaaggtgaaggtgattgcgccgacgccgaccgagcctgcgcgcgcggaggaagaggaatcgaatcccccaaaccccaagaaagaatcaagtcaagctccaaatcgcgagctccagtagatagtaacccagcaatggaagtgactgaccttggaagaaggagaggaggagaacggcgagcgatgtcggggagccgagcagctgcatcagcatcagcagcatccgtgaatccatctcgaaaatcgaatcaagaacgactcacacggttgattgaatgattgagcttgggggatctggtgttcgacaagatttgctcgctcgctcgtttggattgcttaaatcgcggcggcggcggcgatggcgggggagtgggcacgatcgatgcccataaccccgaatccgcggacgcgcagctgagctgaggtcgcgcgttgcgtggtggagtggaagggggaggtggtgctcgtgctcgtgctcgtggccgtgtaaacctctgggcgatggcggctgctggctttataaccagaggaggccgttgcttgctccgcaaattcgcgatgcttttctttcttgcaatcaatcttgcgacttgcgtccgctttgtgtactttttgctcgaatcatctctcaatcagcacgcgagtcaaatgcagcgaccgcgagattagtactccattttacagtgaagaattctgaattggaatccatctggtagcgcactgctaaattggtactccatccgtctcaaaatataatattattcaactttaacataatctttgatgtgctactttaaccaccataattaagatttttaaataaaaagagttgcatattatagtttgttcaatgataaatctactaacatcaattttatatgattgatcatttttattttttttactattaataacaaaagttaaaaatatttgatttagcactactttaaaaatatttatattttgggaagtattgaatacttttatgaacgtaattctagcaccggtcgcctgcttaattccggcttcggtgagccagcagctcgcaaatgcacaccgaactcaaaattcgagccggttcgttttggtaggattcgatgaaatttccagtgatttgcgacggggttcatgttctgaccagtttgaattttgtgaacgttgaggtagtgggacaaaatttttgttgtttgttttgttggtaagcgagtggcttttgttctgtttttttgcttgtcacgttgtgggcacagtgtttggacggtttggatcggcccagcgacgtccatcagacctccgcttttgcggcacaaaacgataggagaaaggggagcatgcaacatgccgtccgaattttcagccccagagaaaccgaaagctcttaataattatcggatccattctgatcaccgatctatacctgacataagattttcttattcagtgaaaaccagcatgttgtcatgttgttccaaggttgatgctcccttttctcccaatgatttcatcaccgtaaacgttgaatggatcacacacgtcttgagtagatgagtggatgacacatttcttgagtatatgaatggatcacgttgaatggatcatatataaatttattataatttctttttaaaaacaagttttcagctttttaatagttaatctgttcgtttatatttttcatcattctattacattcatcacaaaatcattcatctattcatcgttccattctattaaaaaagagcatactcaatcaaactttattcagctcgatcacactgtacctgtgtatacaatacagtactgtgcgtgtaggctaactcatagttcttggcgaattcttcgcacgtaagcaaacaaacgactgatcacgcagcatgcactaccatgcttctggtgtgcaagtgctactctagtactactacactgagtggagtaatcaagagaatcattaggcactaagtcttttaaaaaagagggatattaggcacttgccaggttaccaccgctgcagcctgcagatcactctcagcttcaaccttttctgaattaccactactttttagtactacgtgataacctttctcattcttctttcctaaaaagaagaaaggaatgcagatcagatgaagagatcgctgatcagtagccttagtccacatcgaggactggtttagttcccaactttttcttcaaactttcaactttttcatcgcgtcaaaatttttctatacacatgaactttcaacttttccaacacatcgttccaatttcaatcaaacttttaattttggcgtgaactaaacacaccccgagttaaaatgttgcttttctgaaatctgaatccgaacaaacgaaactattgcaaattaattggttcagatttcagactgttactagtactccagcctagtttagtttccaattttttcttcaaacttttaacttttctatcacattaaaactttcttatacacaaacttttaacttttccgtcatatcgttctaatttcaatcaatcttttaattttggcggtgagcgtgagacaggccagctccatggcgaagtcaagctgtgaaacgcaagcaggagctgtctgtttcagccgacgtgcaatctgacacgctgaagaatcagcatcgatgtgacggccggccatggcctgagggccatctcatattagtagctgcccggttgatcgatcgaccagcctgtaattgatgcaaatgctgttctgtaattgatgcgtactatgctgttgtgctctgcttcagtttccttgtggttatacgtcactgttgagttcggctaatcctcatcgatctgaaagctactgctactgatcatctatctgaatctgatcgagataatttagctctctactcagctagaatatccatctctaaccatccaaccctgacaaaccatggcatctgcctacactgcttttcttgctcatctgataatctttcatgcttattagtagctcaaaagaaagcaaaagatctgtctttttcttttctttttcattcgcaaagcctggctgctaattaacaggtgacatctgctgctgatagctttcagtaaagggaagcccacgtttcatttggctgcatcattagcgtacgactcatagccataggcatcatagctgtagaatccctgtaagatctgaacaggagacagggaaccgatagatcagaatctgaacatggattcctgtggattcagaagaatcttgatccatgataagataggaccatgcaagttgcaacgaggataagatacgccttctgatcttcagatcccgttcatctttcgtcaagttcggtggtcacaggctaggctagtgaatcttgtcaaaatctttacagagatcatatcatctcagcttttttctgcatgagatttagagtctgaagctcaactgatgccagaactgatcgaccacctgtagtcaatcacccttacagaatactcctagctagaagtaatacagtagatgaattaccaagttttgcgagttttcatcttgtcacgttcttgcaatcacggaaagaggggaaaacctttcaaattcaaaccaccaaactcaaaacgaatgcattttaactgggttgattcaaatcacccagcaacgacatgttggg

SEQ ID NO: 9803 - DNA, 27068 bp, Oryza sativa
ttgtggtcagttaatcatgatgctaatactactttaggaatgacagatatgtataggttgcccttttgtgctgatggtagaatagcaatgtgtctaggttcctgaatcgaatttgaatgtagttgaatggacctaatactacgtgattttttttcccatgacttttgacacctttattaattagcttcttctaatcaaactttttatctgttctgaaagggccatatagatgcttttcttcctagatgcatgcattaaaggaggtttatattctgttggccgaaatgcagataaggtcacgggtccgacctgtttcaacatattatatctccatctaatacacacaatttctctgaattttagggatttgaattatttcgtgtaaattacatacaaaaatctggtaaaattcatgtcttttatataggatgtaatcattgtccttcatataggacgtaatcatgtgaacatttcaaaggttggtgaatggtagcaaactaaaccaaatggttattatttatgaatgccttaccattcacgacataggtgctgtaataaaattctcggaaaatcgaagcagaagatcattacaaattataatccagcaaaagtgacattaggacgaaccggaacctaccgatcggccgaaaatggcaggtgcaacaccactgtaatactccactgaataacaaaagtagattaatcaaaattaactagtactccctcgtcccaaaatgtttgacgttgttgacttttttaaaagtatttgaccgtttgtcttattcaaaaaatttaagtaattattaatttttttcttattatttgatttattgttaaatatacttttattatacatatagttttacatattttataaatttttttaaataagacgaatgattaaacatgtttaaaaaagtcaacgacatcgaacatttagtgaaggagggagtaattaattactagtagacaccaactagtggtactccaccttacaacttgggacaaaacaaggcatggccctcttggtctggaaggtgcttgtcgccttgtcatgtcggcaattaatagcaactgcataaacaaatccgccttccggatcgatccatctatgatgatcatctaccagctacctgctcgatgatcttgacagtgtttctgttcttccatctcgtgcttattatactaatatcctgatgaagaattaattaatcatgatacgaatcagttactaataatcagtctgatgtctgtgttaccctgaaaaatttcagaaacagagaatctgagctcatccctgcgtgctgccctgcaaagctgcaatgcacagcagctaattccgcaatctaatgctttttttctgttcatgtgagaaatgaaaggagtccttaattatgatgcatgaatcagttattgagcctgatgtctgttaccctgaaaaattcaattcagaaacagaatctgatctcatccatggagaagggtgcaatgcaaagcggcgcctggagcaagttgaggcagtgcaaggcctctgcttttttggcggcaacagcaacagcaacagcaccatctgaccctgcaacttgagatggaatagtaaaagagtactctctccgtaaaaagaaaaacaatctaaacacgaatatgtcattatatagtataacgaatctagacatatccagattcgttatacaatgtaatattatatccgtgtctaggttgattcttttttaggacagagaaagtatggagggagtattcagagataggcaggggctcacactgttgctgaaaaaaattaacgacggcgacggcagaaaggcagcagcaactttaccgaactagccggaggcactcactttgctcagtctctcatctcatgacctgtctttgtagcggttgatttcctcctcgcgcttttatcagtacactagttgttattggcgccaacccgtttgggacggacacattcatcgggtcctgaagaaaaaggtgaaaccctttcttgatttccttgagttttcggtagtacagtagactgttacaaggcgaccaagtacagtagattagactctttttgctcctaattcagagcaaatctgcatcttcagtacagttctccggtgtctgcactctgaagcagagaattgtcttgaagctgctctgttcatttcagactttagacttggagggatgcaaggaatgtttctgatttacttctttatttctttattgagttactgcatctagtcttgttcgtgaaattagtaacaagaattttcttctcggcaaggcatgacaaataccatagattttcagaccgagaacaaatttacatccaacaacctaaataaccatatcatcaactgaactaagtatgagtggaacagtatttacacaaaatggaggaagtgatcaacaagatcactgatcatctccccaaaggaagtattcctctatctgatcctaattaagaaggactaacactaagcagtaaccaaagctagctaagaaatcaagaacccaaaagagaagagaaagtgtaacgatcatggattggtttgcaggatcatttcatttcatggggaggcttctgaagtcgagcatgccagccctgaggccgaggaagttgttgccggcgccggcgccggcgccgccgccgctgcacttgcactccttctggaggccgaggctgcagccgaagcagaggccgccgcggcggcgctgcagctccggcgccctcacgatcatcgccggcttcgcctcatagtcatcgtcttcttcctggcacgacggcgggctgatgcagaggtccaggttgaggtcggggcacttgggcggcttgctgagtatgagctgctcctccttcgtcgttggcggcggctggggatggaaggagatggtggcggcggcggcgttgacggggcggtgcgtgacggggtcgatccccctgccgagaagcttccggcggatgtgcgtgttccagtagttcttgatctcgttgtccgtcctccccggcagcctcgccgcgatcagagaccacctgacagatgatgaaaatcgatggatggaagagaggcgaggtgaggcagaaggcaagaaaagagaagcgtagttacttgttgccgaggaggctgtggagcttgatgatgaggtcgtcctcgtcggcggtgaagttgccgcgcttgaggtcggggcggaggtagttgatccagcggaggcggcagctcttgccgcagcggaggaggccggcggccttggggagcgagcgccagcagccctcgccgtgggcgcggatgtaggcgacgaggcgctcgtcctcctccttggtccacgcgcccttgttagtgtgctccttctcgcagcacggcgacctccccatcgctgttggtctcggccggcggcgagtcgtcgtcgtcgtgggtggcgcacggcgggtggatgaggaggggattatataggcggggagggaagggaaaggcgccaacttagtttttggttaggttgggttggttggtgttggtctcgcgttggcgttggcgcgcgcgggagaggcggtgggtgccgccacgtcggcgcgcccgtgggatgggaagagaggtggattaggtaggtgcaaagcggaagcgggggcggcggcggcgcgtgcggtggccacacatgtggcggcggcggggcgagcgacctacccgccgccgccgtcgcgctcgctcgccgctgtaataaaatcctgcgcgcctcgcctgacacctagcttagctatgggctactatactactcgtaactgattgtaagagcaagtttaataatatagctaactagtagcttcaaatcttctataactaatgtaataaccaattcatataatagtacttgctatattattaatagctgatcccacctatcatacacatattacgttttggagtttgtgttacagctggctatagatctatagtccactgcttttctctatcttcttttatttctctaaaatatatttatagtgggttacagtctactactgtacatgctctaactagctgctgctgcttaggccctgtttagttaaaaaaaatcacgcggtcacctcgaatgtttagacacacatatggagtattaaatataaaaaaacaattatatagtttgtgtgtaaattacgagatgaatcttttaagcctaattatgccatgatttgacaatatggtgctacagtaaatatttgctaatgacggattatttagacttaataaattcgtctcgtagtttcttggtagaatctgtaatttgttttgttattagattacgtttaatactttaaatatgtctctgtatccaatgtgataatcaaacttaaaaaaatttcctcaactaaaccaggccttagccacgaagagttcgtggaatagtcacaattgcatccggtgattgcaatttcggttctaaatttgggaagacctcaccggcaaatcaatgcatcgaccaaaattttcggattctctcaatttctttttgttgaagttggtcaaagtttatttaactccggtcaaaatctgtcaaaatttcaaaaaaatggtacgagaactgccgacaatcaccgaaatttccatcgaaatcgaaagtgtaaacgttgattgtatctgttttagcagacacgtgttaaattgaatatatgagctttatttgattattggtggaataaagttatatttatggtataggtaaaagtggcgtcaactgtctaacctagtctattgttttaaatacagagagatatcacgttgtaaccatgataatatttactttcctattaagtttataactttatgatctctttccgaacacaacactttcgatttatttggttttcacgctcccttttttatttttatttttttctatggctacttccatttttttcaatagaaccgataagaaactactccctctgtcctataatataagggattttaacattttactctgtttgaccatttatcttattttaaaattttgtgtaaatataaaaaataaaaagttgtgtttaaaatactttggataataaagtaagtcaaaaataataataataatttcaaaaaaaattaaataaaatgaatggtcaaacagtacaatcaaaaaatcgaaataccttaccttacattttggacaaatggagtaactaactattcatagttggtcgaccgtcgtcaataacagcgatatctctgctaaaattgtaagtcgatgtagggtaaaatgacttacatcctgtagtagaggtagttgtatttagtagtatgttaatattagggaaggagcatatacaattagtgttccgaggattgggatcacctacagtatgaacagcgacggcaagttaactactgcatgcaattacatccattcattttggtgatgaatggaccaaatcatcagctacagtgtcaacgcaaaatactgaatattttttgctagtgatctacagtatccgggtgcatgtggaccgttagattcggatctaacaggtggtaatggactgcataagttgcagtcacagtaccaactgcacctgatccaaatccgtgttatgaggattaggatgtgttaaaattctcctgttattaaatattatattttaagtgtcgcgtcaaataatctcgcatggatatctcgtggatcaattctgctcgatgggaagatcatttcgcacaacggggcgatttttatgacaaattcatgtttttcttgcatggaattatgtttgaaattgggatacatgttctcgtgattaaaaaaaatcaaaatcaaacctgctttagttaacccatgttcccgaaggggagagatttgaacacgccgacctataaccatagacttagttgctcgttattgattaaactaaacgatggaaaatgacaggttttaaaatagatttgtactcgtgtatttagcatgcggctaattaatcctcgctggggatctccatttcgtggatagttcgattgatctgtcaaaggcgtaataaacgttgctaaattaatttcagttttggaagtgtgcctgatacattcctcacatagattggtagttcatgttttggtcagcatactggactaaagaaaaaatctcaccgaactcagtcctttttgaattgatttcaccaaacccatgaaatgatgaaattccacacgtgtactctgcgaagtaggatcacaaaaccttgtgcacgccaaattatgatgatccgattcttggtaaatagtcatcaggacatcaacacgactgggaaaaacacacctgttacctactccctcccagtaccatagtgtcaattgttgtactcaatccctgctcttctcaaagaacctcatggttatgatgttttccacctgtattaaaaaacaatctgaactattgatctcatttattaaagagttatgattaaagagttaagatttatttatatttttagtaaaaaaaagtgcggaaaggatataatatttatttagcagtgaatatttgtttttctttttttagcttttaatgtaatatgagcgatgccagcgcaatagatgatcatagatagatttagcaaaaaaaacataaaggataaagtaactctaccattgtattagaaaattacaaatttacccataataatattggtagtataatactaccaatagacaacatcatttcatttctagcagtaaacggctgtgattacatcagcttggcaacaactatagccgttttagcaccggtatgcttgtccaagcacactttagtaacatttgagatagattattcaccgaattattgttatgggttataattaaagcaaaggttctaactcctgttgcactccattcctttctccgagatccattgacacttaattaggtttcgactactgtggaaaagaatctagaagctaaagccctgtcaaagtttgatatgaacaaccatttaagtaggggacaatttcgtttttcccccactttcatctctaatattggttttacccctactttttagggttttcgtttttaccctcacttctttgaactgaaagaggcgtttacccctggattggatggaatttagtgggaccggatttatggaaggaaatatttgaattagtgatttacctttttacccctgtgaaatgttaacaatacagagactcttccttctctcgccgagaccgtaaagacccaggcagcgcaggcggcggcgagtgggcagcggcggcggcgatagaggaaactgggcgtcggccaggggccgctcctcccggcgcgtgtaggagagcggccggggagagggcgccgcggaggcctagcggcgcgcgctaggcagcggcggcggcggctaggggccgctcctccctgcggccggggagagggcggcggccaagcggcgcgctaagtggcggtggggtggaggggctaggcagcgacgttgaggtgctaggcggcggtgggaagaggggtaggcggcggggtggagggggctagtcgagcacggcgtcggcgcgacgcggcgtgccccgtcgagatccccccggtggacgaggtcggcgcacgcgaggacaagcccccccggcttgccgcccaccgcgcgcggcgacaatggcgactgctcggaggccaaggccgcgaccaagtgacggtgagcgttggcggcatccggatgtggcggcgtcggccgggcggcgaccaggcgacggcaggcgtcggctaggcggcggcggcatccggacttggcggcgtcggccgggcggcgaccaggcgacggcgggcgtcgggtaggtggcgacctgcaaggggcttggagatggtgccgagatgttgttgaaattttatcaaaaatttgttcaatttgtcaaaatgctgctgaaattttgtagaaattccatcaaattcagaatctgtgcaaattgttatgttaatgtgggtttatcaaaaatttgttcaatttgtcaaaatgctgctgaaattttgtagaaattccatcaaattcagaatctgtgcaaattgttatgttaacgtgggtcatttaaatatccttttgccaagaatttaaatttccaaagccatgcataaaatgggggcaaaaacacaactaatgaatagagatatgaaagggtataaatatcattttgacaagaatttaacaccgttaacttctccatccaaaacaggggcaaaaaaaaatttgttcggttcaaaaaagtgagggcaaaaacgaaaactctagaaagtaggggtagaatcaatattggatactaaagtgggggtataaacgaaattgccccaagtatatagctgtagctgggtaggaggaactaacaaatccatggcgacacatctgtactgtatgggctaataatctcttttgattaatacttgtgtgctaccgatcgattcgatgggcctctcttattggtgggtgagtacaatggcgatggaccattttgattgctcctgtagtagagtgtaccttcgagaaataaaaaaggcgtacacgtggccggtttataggacggccacgtcacatgtttatctacaccgctgtcctacattctcagtgactcattgtatgcagaaagctccagagcaattactgtgcacgactgtagggtcacctttttaagtacgtgtgtgatgtgtaatgatcaaataccaaacattagtatttaatttttctgattctcccatgcagattagtcttgggtgatcatgtgttaggttaggtagcagtgtacgattgttccagcctcacaggacttgaaaaatcaagtctgctactgctgtagtgctgttgcattccaattgatgaccttgaattctggcttaagaatcttaataccttcgagaactaggacccattgtacatggcttgtctaaagaatcgaaactgaagttgatgagccacatgatattaacaaacagtagacaagaacacatgatattttcttccacatgatgtgctaccatgtcaatctctactctttccttccaatttaattatgtcttcacaaaacagtggctagttccaaatcagttggtgggcgcaaatcctaatcaattggtcaataaattataacaattttgcctgaattcatcgcttgcctgtgacacttcttgcaaaagttgcgattgcttagaagtacaagaatcagtattgaataggtatagccgtcagttagccacggtcgtgtgttgggtcaggttggttcatcagcatgctcgtgaatactataatgaaaaacacacggtatgacattatctttgcacgtgttgttgtaagttgtaacaactactaccaactcctcatgagttgattacaattacaagcatccctctaaaaacgttatcatgtacgaattgttatcagttgccatcatatgactggaactttacgagtaaaaaaaaaaggaccttcagagccacgcttacgtaaaacataactggttggtctccggtataaaatatcccttcaggcaagttaattacttattccacctttggcgtctatcagttcttgaactgctagctagtgagttgaccaaacattcgaaggacacaaaccactgttcttgtagatattagagagcacacagaagacggaataatatatgtccaaagtgcttttaaatagtgaagctatgtcatctccatataattccccatgaaatattgatagggtatatgtagacatgaaggaagtgttcgtatggctggatcatcactagaattctgttatttgaccctgatacttactatgaggccatgctgatgaagaacatagcaatcttacttgctcttcttagaagcctcgtataggtagctcacgataactacagctgcagcaacagctaccccgacagcactctgtgcgagtacagcaccagttgaaagatcagatttcgtagatgcagggccgctgctccgtggagtgaagccaagttcagaaagcttcttgtgcgattcagcgtagtccttgaagaaggtgtcttcatcctgccatatgaacagaagaaatggttctgaatgtaaaacttatattatggagcaccgcaaggcatagtacgtcggcatgaaatattcacagttcttgtagcattttgaaaattattcacttccaattatatagcagtaaaagttgtaaaaatataatgctccgaaatcatatttgacaataaataaatctattaattgcattttcaactaacaaattcaaatactttatagtttgttaatggtcctatagtcctaaaaaatggatgaaagggcatataaaatgggggagttttaagtgcaaggaatagaaaaaaaatatatatataaaagatcctttttaccctggcataaagatccacatagcgtctaaatgaaggatcttccaacaatgccttgtcagttgggagcttcagaagcccctcagattcccccttcagtagctcactgcagttaaataaaatattacactgttatcttctaacctcaaatctagtgcccagaattagtacgtaaatgacccagttttgtattcaacttacagaaagtacgaattgtcaaacttcagaggctcctgagtccatgcgccttcaaatccagacctttcaggatgtgcccttcccttgaagtataaagcgagttgttaaaactgtgcttctcatgaagaatcaggattaccattacacaaattctacattaattagagcatttaccagagtgtgacccccagataaagctactatatctttgtctgataagcccatccggtaaaagatgtccctcaagtgcagtgcacctgctcatgaaacaaagataaaatgcagatatacccccataaaaatagatatatgattacgattatacatatcaaaacaggattctggcaccagttattaaaatactaaaataggaactggcaccttgcatcccagtaaatgtaagaaaggaaaacagacttcggcagaaggaataggaaaacagataaataacataaaacaaattaccagacatacaacagcacctgctggtatgacacctaaatgacaactataccagatatgcaggaatataagataaatgaaagacgaggctcccatctatgaagagatgtatgtgtgtttaagataatgtacatattacggtatgtattgcatgaactgggttgtctcaagcaacactaagtactaaatgccagaacatgagtactagcagacaagtacaggagaaatgcatgggactaaatgtgatacatgtagaatactaacacatattttgactcattgcttcaaacactaggagtcaggaagcatgattataatgacaaaagaaaaggtagaccagttcaaagaatagtttgtggcaattacctttcttagcatcaggaagacgcccttcacgggggcaaactgacgaatcctgattcaggtcaaaagaacttaataagtgtgaatcaataaaagatgcatccattcataaagaaatgttatttcacgtacacgtcttccaggaatgaactcaacagttggacccccagtaacttcaactgcaacaactccagcaagctgtaagaaaaatctagttaggatcttaaaaatttacacagtaatcgataagataaaaaagatcaaatgtgcgacaagaaaaaaaaaagatgtcacagtatcaaggcactcttataataagttggcagcacaagaaccaattcaagcaacgctaatttacctgataaaggtcagcatatgtgatcttagggctcttggctttaataggctctgttacagtaaaagacaattggagaagcataagtaatcattcgatttatttcatcactgaataaagtgacaatataacaataaactagataacgtggaacaggtaaataatgcaattgtacagagaagagtggtgagtactgcaacaccattgagaatagttgcaaaaatatgggagtttcttgttttttagttatttctcccaaaatatttgatccccgaattagagaaaaaaaagagttagtttgtagtccgatcaaggtaaaacccaaaacaatagaaaaagaaaagaattttgagaaactgacaagaaaactcaaattgatttcttaagaggcatcaatcatatagctgatgagtggtttaaagggaactagagccattctgacaatgggggaaaagtgaaagctactttcgtctaatcatctaggaacacattggggacaaacaatacataccgagaagatcaatagcaatctttagaccagcatttgaaccgtgagtgtactcttcctcgtatctaattgaaccatttgcaccaccagtttttgtgttcacgtcataagtgcccgcgtcatgccatctgcaagggagtgcacaggaactaagttttagtccaagagtaatccaagagcacgcagaatatcctccatgataaatgagaaaaactcatagtacattacagaagaacactgtatacaacatataagataaaaaaaatcacaattccatatataaagtactaattaattagcaaatacacgctgcactatctgtaatggtgcgttaaatggtaatgcttcttctgagtccattcgtaattacaatatacatagaacatttgcagcagtagtgcaaacatcccctttttttagataatgaaacatcacttatttgttccagtttgtaacactggtctctcatcagctccacaaatgtaacacgaagctcatggagtggaacacctactatagacagaaataagaaattcgtcttagcttcctgcgatattgccgttatgacggaatatggggagtgattaaaaatgctcgctctcccctgctaggttgctagtttcctgactagtatgagagaaccaacggatcaacagaaaaacgcgtgcactctacatgtgaactagcgaactaaacatcgtccgccgttcctcgttaattccaaaggcgcagtcacacaatcaaaaccaaatctgggagccatccaaagcaggcgcgcacgcactcaaggtgttcgtcgaattgcctcgcccaacagccacgccacggaccagcgcaggtacccgccgcaagcaactaaccaaacccaatcatacagtctcgcaatcgcaagcgacccatctcaccaccaccagcagtaactcatcccaccactcgaggcaagcagagccgagcgggctccaaatccaaacacacgagagctccctccctcgccaccgccgcgcgaatccatcacaaggattaggaactaggggagggttctaggaggagcaggagatggggggtaggccggtaggtacgtacgcgaggcggagcatgatgggcgcgcatcccttggaggagatgagggcgcggaggtggcggcgcgccctgtcgacctggcggaggtactcggcgtccacgaccggggcggccatggcgtggcgtcgcgtcgccggcgaggttggaagccctagagagatcggccgcggcggcggagcggagcggaggcgtgcggcgtcaagccaagcgtgtggtgtgactagtactcactggctactgtgcgtgtgggggagaagagataacgcggggaggcagcgattggttgctccgccccctcgagtcgtcgtctgctgttactgtagttttacacctactgccatgactgtattaaggcgtgtgggccctcattgtcaatttttttttccttcaccttctttatttacttttttgacacgtccccttttattttctctcaaatattattttctctttttgtttgtttgaaataaaaaaatattgttttgttttgttttgttttatgtcttacaccttttcttcttcactttttttagaattacacagtacaacatagacactcacaacacacacactcactcctataaacacacgctgacacgcacgcaaactctacccctatgatcatctttgaagattgggccagcaaattcatcatggagattaatgaagtcactacaggtgtctcgctgtcaacgggtacgtcaaacccaggacctaagatgccactgaggctctggtaaacattaggctacatatcctttcgcttttcttcttcacttttaacaccgaggtatatactctgaataagaggatctctttaaactgatttgatttttgttcgcagatcatttacttgaattgtatcgtcgattcatggttggatttaaatattccatgcaatacttattttggactcaagtgtgcaaaaccaaaaaaaaaatcttatcaatggcaatccaaattactactccctccgtattttaatatatgacgtcgttgactttttaaccaacgtttaaccattcgtcttattcaaattttttatgcaaatacaaaaatacttatgtcatgcttaaagaacatttgatgataaatcaaatcacaaataaaataaataataattacataaattttttgaataagacgaaagatcaaacgtttgttaaaaagttaacggtgtcatacattaaaatacggagggagtacagattactggaccgctgcaatccagcaactgccttacctgttcatcttccaaactgatttggtttgtgctcacaaaccattcatacagattcatagttaaatctaacttgatcatatttgaacgagcactaatttgctgcagttgcatggcatccctgtcagttccttccaaaattaggctcctctcgatcttgcaccaccgcgcgccaaatccgcgtgcgaccgcgcgccgttttgacagcggccatggccgtacggacggatgcccttcgttcccgcgcggccactccttccaccaccacctccttctttaggagtagcagcagcgccaccaccaagcctttggtttctttcacgcgcgctcgccaccgccctccttgctcgtccttccttccttgcatgacatgtccgcggccgcggtgctcgccgtcgtcgccgccgccgtcgcagcgctcgccgcggcggcgtcgggctacgagctgaccaagaacgggaccgtcatcacctacgaccgccggtcgctgatcatcgacggccaccgggagatcttcttctccggctccatccactacccgcggagcccgccggacacgtggcccgacctcatcagcaaggccaaggagggcggcctcaacgtcatcgagagctacgtcttctggaacggccatgagcccgagcagggcgtcgtcagtacctcatcccctcctcacacattgctcaatttgcatttgatttcatccatctaattaaatcgtgtctaaatgaatggctgtttaatttgtttctaagtacaattttgaagggaggtatgatttgatcaagttcttcaagctgatccaggagaaggagatgtacgccattgtcaggatcgggcccttcgtgcaggctgaatggaaccatgggtttgtttgtgtggcttcaccatctcattcagacatgcatgcgtgttcatctctgcattttgcaactcctgtttatatttttgcctcttcttcttcttgttgttgtttttcttcagaggtctgccatattggctccgggagatccctgacattatcttccggacgaacaatgagcctttcaaggtgacaaatctgacaacatcatgatccaattttcttacgcagtatgactgagacaactaattgctccagtttctgaaaacttgtttggtgattgtccgaaatactggccaggtgtatttgaaatgcaggaatgttctaatatgatgattatctccttttttttgaacttcatgtatgcagaagtacatgaagcagtttgtcactctcatagtgaacaagctcaaggaagcaaagctcttcgcatcacaaggaggccccatcattctggcacaggttcatctttcaaattgatccctttcttcctgtttcttagaatctggcaatgtgctaaggaataatgacattctgaatgctgatggtgattcttggttacatgatcataacagattgagaatgagtaccagcacctggaggtggcattcaaagaggctggcaccaagtacatcaactgggcagctaagatggccatcgcaaccaacactggtgtcccgtggatcatgtgcaagcagactaaagctcctggtgaagtggtaacttcattaagatcatacatacattttatagcaagtgcaagtattctcgatggaataaaaacttgatactagactgttcatggccaaagaacaaaagtattacttaatttgttcaaacttttggattgacagtacctttcatgttcaggatttaccacgatttagccattaaatctgaattttattttatccaacagatccctacctgcaatgggaggcactgtggagatacttggccgggtccagctgacaagaagaagcccctcttgtggactgaaaactggactgctcagtaagttactacttactactacttgagtaaaatccaattcatcttgttctgtaagatcattgtcaatgttgtcagtgagagaaaaaaatatatactacttatgcagacttcttagtgattaacatgttctattcctttctggggggtggttcttgatctctacaggtacagagttttcggtgatccaccgtcccaacgttctgcggaggacattgccttctccgtggcgcgcttcttctccgttggcggcacaatggcaaactactacatggtagtactgaacagcaacagtaacctgttcttgacaaagaagagagatgaaatttctgacagaactgacactggtggctttacttgtgtgaataatcaacagtaccatggaggaaccaactttggaaggaacggcgccgcgttcgtgatgccgagatactacgacgaggcccccctcgacgaattcggtatgcaaccctgaacaatccatccacagtacccaagaaatgtgtgtaagatgaagcaccatgagttgtgaagaattcagtttctaacacgcaatgagcaggcctgtacaaggagcctaaatggggccatctcagggacctgcaccacgctctccgtcactgcaagaaggccctcctctggggcaacccctccgttcagcccctcggcaaactctacgaggtaatgccatggcaatggcagtgacggcaagaggaagaagacgtaggacgccattgttgatgatgatgatgatgatgatgatgtgtttccatggtgcaatgcaatgcaggctcgggtgttcgagatgaaggagaagaacgtgtgcgtggcgttcctgtcgaaccacaacaccaaggaggacgggacggtgacgttcagggggcagaagtacttcgtggcgcggcggtcgatcagcatcctcgccgactgcaagacggtggtgttcagcacgcagcacgtcaactcgcagcacaaccagcgcaccttccacttcgccgaccagacggtgcaggacaacgtgtgggagatgtacagtgaggagaagatcccccgctacagcaagacctccatccgcacacagaggccactcgagcagtacaaccagaccaaggacaagaccgactacctctggtacaccaccaggtacgtaggtagtagtcgttgtctttctggatggctctgataccatattgagatttataatacggtcgtctgtttgtctcagcttccggctggagacggacgacctgccgtaccggaaggaggtcaagccggtgctggaggtgagcagccatggacacgccatcgtggcgtttgtcaatgacgctttcgtaggtaactaacttggatgctttcttccatcttcctcttgttgttccattgttgttgttgttgttgctgctgcttgattccatccaccgtgtgcgtttggatgaattgaaatattgcagggtgcgggcacgggacgaagatcaacaaggcgttcacgatggagaaggcgatggatctcaaagtgggcgtcaaccacgtcgccatcctctcctccacgctgggtctcatggtaataaagctttcatccacccaccattttgatgattgttgttcttcttaggatggagcttggtggtgatatgatcagggttttaaatcttccgctatatctgtttgataagagttccagctatttgctctcatgtacaatttagccactatagccctatttagcccaatatagttatcgctatagttgtctgagaaactaatcgctaaatgttttaacccgctatttaaaacattggatatgatgggcaacaacaaccatggtggttgttttttttttgttatttcaggacagtgggtcatacctggagcaccggatggccggggtgtacacggtgacgatccgggggctgaacacggggacgctggacctgacgacgaacgggtgggggcacgtggtggggctcgacggcgagcggcggcgggtgcactcggagcaagggatgggcgcggtggcgtggaagcccgggaaggacaaccagccgctgacgtggtaccggcggcggttcgacccgccgtcggggaccgacccggtggtgatcgacctcacccccatggggaagggcttcctcttcgtcaacggcgagggcctcggccgctactgggtctcctaccaccacgccctcggcaagccgtcgcagtacctctaccacgtcccgaggtcgctgctccgccccaagggcaacacgctcatgttcttcgaggaggaagggggcaagcccgacgccatcatgatcctgacggtgaagcgggacaacatctgcaccttcatgacggagaagaacccggcgcacgtccggtggtcgtgggagagcaaggacagccaacccaaggcggtggccggcgccggcgccggcgccggcggcctcaagccgacggcggtgctgtcgtgcccgaccaagaagaccatccagtccgtggtgttcgccagctacggcaacccgctcggcatctgcggcaactacaccgtcggcagctgccacgcgccgcgcaccaaggaggtggtcgagaaggcctgcatcggccggaagacctgctccctcgtcgtctccagcgaggtctacggcggcgacgtccactgccccggcaccaccggcacgctcgccgtccaggccaagtgctccaagaggcctcctcgttccgccgccaccgcgcaataagctagccagccgccacatctctcttcttgtctctcatcagattctcagatagttaaagctttgacctgctgctgctgccgccgctgctattgtactttgattggttccatccatcatcgatctcactcacttcactggggaattatttaggcaaacaatcaattcatgctcagctccttgtatgcaccatcgtccatggttttatatgtaggtaactgtagattgattaattgttgatgcaaataaatactagtccattccatttggtgaataacaacatataatcatcacaacatcatcctaagtcctatcctatagtgtgcaccatttgctctcacctctagttgctttgcaattaatataccatcattttgatccctgatggaaggtaaaacattccaaatttcagtatgctgtcctcggacagaaacccatacacatcttgcatgacaaatcttacaacaagctctccttggactctttacctatacacatctcacatgaatgacatatcttatgctgcatcagagaatcttacatgtgcttgccatcaccaatggccaatgcacataacctgcttgttgagaccattgcccatcgtattcctcacctcacccattcacaagttacaggttgcaacctcattcattcacatcaatggaccaaccacaccgcgaggtaaatcagagtgcaagataattgccattgaactgtcccaatagcttaaggcactttttcttttcggtttaaaattattataatctagattattgagttattataatctgtagtaaaataagtggttagttgtttctttactagattattagagcctagattattgggtttgcaagtctaaagagggagtggggtagcatggtgggtaatttttcacccaataatctagaaaaagctcacctaaatgagcttatcagattataataagctacttcaataagttgtctgtttttttcagcttactcccaataatctggattataataatcccaagctaaaagaaagagggcctaaatactttaattagtattattacggcacagagggcaataatcttgagaacaccaaaccatcaagtcataaaaaaaaaaggcgataaggatacaatcttaaaacaacaagggctggcccaaggtagaagtagagctagtttacgagcttcaacattgtgatttgtgcatatcaagatgatttcgcttcagcagatttctgctcaacaagcttgtcgatgagtgcagcggcatcttcaaccgttgcaattgactgcgcacttgactcttcgacgctgatgtggaactcctcctcgagacccatcacaatctcaacctgcaccaatccaacaattgagttttactacttgcaattgaacatgtaatcctttactcaaacaaaagaagatacaggcttctaccaacttataactgaattagactaaacatccaaacaaagcacatgtgcctgaacttcatagattaaacatcttgtttgatcattttcacacctgatgcaacagttatcacacttcatgtggcaacttgggaattccaatgcatctgatattctagtcttaaaagtactgaagagatttggaaaacaagacctacatgaagagcgagcctcaccaataatcactatggctgtaaagccattccacatctctaaaaggacatagatgccacttgtaaaacgagagatgctaccaaagcatccctcagatattattttgtgagccaaattgattacaaggatacaactattcaggcccccaaaatatatagaaaatttaggtaaggtgctgcttagttcaaaacaaccatatgcatgacatcactcaaaaaattatgggggagttaccgtgtccagtgaatcagcaccaagatctgagaacttggatgcaccagaaacttcagtgccctcaggaacagcgagttgcttcttaacaatgtcacaaaccttctccactgtctccttttttgcctattgagcggaaattaagaaggggttaggagacactctttagattgtagcaggaaaacacacgacaacacaaaatgcaaaagggaaatagcgcagtcaacagtgccatacatttaaaaacggagtatagggccgttttggattagtgccaaaacggtgccctaccaatattttggtagtttgaacagtgtatatggtggttttggtttgaagccaaaccattggcattgccaatgtctagtttgatattttctatactctactcaaggcttgttctaaattggtctccaaccaaatacaactttaccctaccaaaaaatcaatgatacaagaaacaaaaaggtccttctagaatggaaaggtgaattccaaacagctaaagcattaaaccctccctggtcataaaggaaagggttttggccccaggtgaaaattttcattcatccagaaataacacaactgctagcggatatctcatctctagcatagcaaagcagcgattgatggggaaaaaaaatcatgcatgacaagaaagtatggaactcacggcacagcaaacagcaaatctcataggcactggctgcaggcggagaaatgcatttcccttccttgcgctggtgaaagatatcgaattagtcttgactgcctgcaattcatggaacaagtttatttagacaacagaagtaatgcagaaaaaggaatagcatactatccacaggggaaaagaacatagcatagaaaacagtgttattgtcataattctactgttctagtatcacattagctgtatgtcttgaatttgtctcagtagccagtatggggtgttgaaatgagtaaagatgatttcgatgagaaataatctccaatgcatagttgcaaactcatcagagtttttttttctttactttctgtaagagattttattacaatttccctatataccatgaacataagaattttgcgaagccgtatgacaaaaatccaggctagtaagccggatggtgacggggcgaaacaaaaatcccttttcgtgccaagggaaaacaagatacgcccgttctttattaggtggtagtacaacatatcaatactagaaccaacttttttatggagaacccaaaggaccaatagttttgttaccatccaagtagaatcagtaaatcccagtaacgactaacgaattcatcatcactatgcggaaatctactcgtagcctaacaaggcggaaatttcatacggatacaagtatattgcagccttttcaacctacacaaaaggcagatctgctcggatctgctatacaaaatggatcagtaaacgcacacaaaagcacttgtgccacccacccgaaagcgaaaagggtaaaaaaaaaaagaaagaaaacttttcgccgttctcccatctgaatcgctccaccaaagggcacgaagctaaacccacagatcggccaaagaaacaggcccgagatcaagccgaaagctcaaaaaaaaaaaaagaacccccagcacccagaaaccagtcaggcacacggatcgatgaatcgatggatcgatgtacggcagaacaaggtggcgggtggggggatctgaccttgacgggggtggcgaaggagagggcggatccggcgagggaggaagccatggcggggggtagcacgaaggtggaaggcggcgagcacgaagcgcgtgacagcgactgggaggaggagagaggatggccggctcggcgaggccgcggggtatttatacagctggcgacgccgccgcatcgagtgtatcgacggtggggcccacgtggcggccagctgtccggcgcgggccgacctcgcggatgggccgttttgcttccggcccgaggtgttggtgggctgagtagtaacttgtcagtacgacggtccatttctcttctcttttccggagtgtaagatacgacggtccatttgtcttctccggcccatgctgatttaagggacacagaggaattccctcttcgaaaagaaaataataagataacctgatacgttcatccttcatcgtccttgttataaaagttaatcgatatagcggaacgataactagcattctcgatcgttttatccatcaatcacccaaaacgtgtcagatgataactataatgtagcgtaaatactcagagagataatagagacgaggccatggactcgtagcggttaaatgttagtatgttgattagggaggagcacctataatcagagctccgaagatgtaggctttcactaaacttcattataaatatcgtgtgtttctatatatcatcatcatctgacatgttttaagtaagcaatgattgaacccgatcaagaaaattagtcgtttcgttatatcggctactttgtataacaatcttagtattgtttttcactagtgtgcaatgcttttttttccattttgtttgtgatttttttttttgcgagctaagactgaagaggcatggatgatgttgatagatgtggctcatattgtcggacataccgttttcgtgaggcaggccaagaaaacatgcatgcactttcctgcaagtaatcaactgaagattctattacgcaacatccttcaagcttgctcaaaaagtaaggagctgtttggttgggctgttttcggcccgtatcagataccagcgtgaattgattcccttacatctgtttgttttagatggaccgtaatcggttagcccgcaaacgaatcccagcccaatacaaagttgattacgctccagatcgggcgttacgcgttaccgatacggaggcggagcggagcgaacatgacctagccttgagcgccgccaccttgcagcgcaccgtcgccggcgccgctccccctgcccggcgtgcgtcgtcgacaccgctgccccctgccccgacgccgctgcccctcccctcgcacgctccatgaccgcccggagattgcccgcctcgacaaggccgacaacccactgctctgctaccttcagtccctcctccatctccctcgagttccacatccctgacgactggatctgcgagaaggacaaggctgttgagcatcaagaaggcatggcaaagatcttgaggcacacgaagaaggcaccagccaccaaggaggttcttctgtcgtttccgccgtcgccggtgagaaccctcccctcactgataccaccactctttatgatgatatacttgtgatgctgatgattgatgatctttttcttttcattaacaaatcatgaagtagtttatactagtgaatcatttgtattcttgattggttgcatgtattcctgcctcagttctgtttgctttataagtttacatgagttttgtagaatctgtttttcccgattgcaggaaaaatctggaatagtagttgatggttctttcatatttgttttcgagtgtaggtaagttccgaaattttgtcggaccaactcattttactctctagattttgagaattttgattttcattactgccaggtgatatattattttgcagagtgtgagattggaaaaaaaaggtttgtcgtgcattgccttttcgacagaattgtcatcttgcacatatataatcaatttacttatgtttcgcagcatggactgttccaaaccaatctactcgctgaatctgagtctactaatctagtagtttcactcatgtcaattgttcatccatatatttcctcagtactttatttagacagatcacaatgtatcctcttgttgtttagttcattgaacttctgaagttctcactcccagcatgggtcttatatttactcttgagtattcggaagctacatctacaagatcttgttcagagatcttccaggatgatgctaggctgatattagatacaaattcaagaaactagctgctttcaaatatttgcatgtcaaaatggatccgatatttactcttgagtattccgaaccaaacaccaccctagcttgagatcgttggatcgagattgaactgttggagttccactgctctcatcgtgatccttccacaaggattcaagtgccaattattgcttacctcatgactgctgcgaaaattagtctcgcggtgcagctatttacttgttggttaactgcctatatatctggtatgtgcataactgtcccatgggcaatttatttctttacttgttatattccaaaaactttgttagcaaatattttttttgcagctgctgttgacattgttcaacaaatatttgctctactttctgattagcatttaattttctcttgtccaggaagttgacttcagatggccctgctttccattttcttttaaaattcactttgcagaagcaaatggagggtaaatttgcaggtgagctaacttatatttcatgaaaagtgtatgattggaaaccatagaaactattccacttgttaccaattgcataagtggaacacatatttttgggtttcgtgctctcctttaaactcacagtggcatcttttatttcttttaatgtagaagtaacattataaattggattccttgcatctttgtttgagcatgagaacatatttacatgcatgtgtgcttcttaactttggagtcaatgccctttttagaatgaagcgaggacctgcccgattattcactttcagtagtttctggatgcatgttgtccaattatatcacttgaattctaaagccacatgaacttttcttgaattattcctatacatgccctagctagagtgctatcaggtattaaaaaatacacatttcccttcttttctttattttgggccaggaagcatgtcacaaaatttaggagtttgccctatatgagagctactattgcatatcttaatcactgcatttttagattgttgttggatcacttttgaagactgtttgtgctagactcctttaaggtgtttttagacttttttttaaattattgcatataactgttcggtcactaatttctgaattatttcattattaccacagatgaagcaatgaagaataaccgatgtattagctcagtcacaatatttggagcttgttcattgttatatgaccactatccataatttatacttgagattattaaactgatgttcacattttcaagactgtatacacttcccaatgtgtgatagtatcaaacagttgcatgttataaaattgtgaatatttttacatagctttgatgtgctacacgtgtttgagaacactgctgctatgtagcttgtaatgtgccttagctttgagctgcgtcacgttctaagcgctccctgcttcggaagcagccgttacctgttaccatgttccatccaaacaatgtaatgcaaacatgagacgttacagcggccaaccaaacaaaacctgtaaagtgatacattttcttcccttaccgctgtagctgatcccatttacgtttgcatttcctgacctcaaccaaacaccacctaagatgtgactggtaagcaggcggcaggcggccaacaaacttcgaagaaattagggtgtgtttagtttcacgtcaaaattaaaagtttgactaaaattgaaagtttgaaggaaaaaagttgaaagtttatgtgtagaaaatttatgatgtgattaaaaaattgaaagtttgaagaaaaagtttgaaactaaataaaggcttaaggacaatacgggacactaatttcagctcagatctgtagcatatactcctaggcctggtttagttgccaaccttttctttaaactttcgacttttctatcacattaaaaattttctacatatacaaacttttaacttttccgtcacatcgttccaatttcaattaaacttttaattttgacgtgaactaaacacacctgtagaatcgatcagatttagcaatgcaccgacggaaagtctcaaaccttaat

SEQ ID NO: 9804 - DNA, 62275 bp, Oryza sativa
gaggaagtcgtgcagcgcggcggcggcgtcccgcagcgaggcggcgtaggcgcggtgggcgtcggcgagcgcgtagcggtggcggatggcgtcggccagcagcgcggcgcggtcccggcacagcgccacagccgcgccgcccccgcccccgcccccgtcagtcttggactggccgcaccccatggtcggcgcgcggcgggcgcagcagcagcggtagaaagttttaacggcgcggcggcgacactggacgcatgcagtgcagtgcagatgagagatcttaagcaagggagcagcacgtacagtggcgatgggcgatgggcgatggcgacgcgagaatcttcgcgcttttcggcttcgtcctcgagtcgagcgggccggcgcacggtgaaaacgtcacggactggacagcgcgggttggcggttgccggcggcgagcggagatgagcaaaagcgggggggacagccgtacgtgggcggcggtgaaaaaggctgcgttaggccctgttgagttcacgtacaaaaattttacacctatcatttgaacaaagtattaaatatataaaaaaaaactaattacatgattaatttgcaagacgaatcttttaatcttaattgctccataatttaacaatgtgctaattaggcttaataaattcatctcacgattttttccacgaacgtgcaaaaggattgcacgtcaatatattagaaaaaaattcatctcacggtttactatcggattctataattagtttttttagtgcctgaacacccatatgataacttatataatatgctacgtgatacgctaaaactttataccctgcattaaaacaccccccttattcggctttgctttgctccggtggtggggacgacgtcacgacgcgacgcgacgcggcctctgcgactccacctcatgttgtgtgcatgcttcgtcacgcgggcggcgcacgggaggcaggccatgcatatgcatgcatgcatggtctggctcgctcgacccccactggacttgaaaagggtaggacatggggttgcacatgtgacgtgtgtggggtacgtgacgaccacaatcgcaccagaaagaaacaaagcttgtagtagctggctgggctaagcttggcactatgccggtggcaggtgtttttgttcttgctggtatccattattgcttccacccataactctagtttttttaaaaaaatatcccataactatagtttggctttctattgttcgttcaacctttttctttcatcatcttcttcttgctatactactcgttgtagtcaagattacattcgtcattgaattgatggagctaccaactttctcgccgtttcactagcagcaacggcactctcagcagatgaggaatggcgttataaatggctctcaccaaccaacttttaatattagataagagtagattttgttatttacatgttattcaaataattatgaaaaaaatataagaaagaattaagaagatacataaatatatgtgatatataacatttcacaaatatataagttaaaataatttaacttatacaagtttcaacgaaaaaaaaattaaactatatacttagttaacgtaaatttacattttatttaaacgtgtataaattaaatttgatcatgtatatttgaggaatgatctatcgtatattaatatatcttattgattttttatagaaatttgaatagtatgtaaataaagagggatgtcctctcaagggtttagaattgtttccatcttaagtgaatatgattatatattacctccctatttaatatagggaattgcttaaagattagtcaccagttttttttaaaaaaaacttcaaataatattattggcttatccattattaaagctctgacttgttagtagctctcaagatatttagtttaaaaatataaaaatcatattgttaggtatttctttgaaagtaattttaaaatattataattttgtttaatagtattgttattatatttttaatagaaaaaatagttgtaaaagtcgcacgttaaaggtagatagtgtcatatatttatatttatattctactggttaagttgtgcacaatgatctggtagcaatttcatcttaaaatttgagacggtgcaaaccaaagtggaggcggcgaacccagccaaggatggtggagatgccaccacacgtcgccaaggatcgatggtgcaatgcaacgtcccgctctcgaagtcccggacgccgaggtccagctgcgcttgaacagcgggtggatcagctggtcgctgtcgtcgtcggctcgtggtctcctcccacgccgccggcgagataacatgcatggccggacgtgaagcatccggagctgaactccgtcgtgctcacgtcgtcgtatacgtagaccctctctcctccggcacgacgacggttgggtcgttggagagatgagatgctcgtcgtcgccgtcttgcgccacatcttctccacgaatatgcattttgatcatgactaccggagacgcagacgcgccaccgaggtcgacgactctatataatcaatccaactacgcgcgcgacgataagaaacgtgaatctgaattcgcctacagtttaacaaacgtcgcgtagcaaatgcactggcagccaatgtgcccaattggccactgcatgccgaccaagaaaatcaaaccttgtatgattgtccatgcagaacacgttcttgattcggactttggtcccgtactcgatctggtgaggaaaaaagattattcagagagattcagagaggcgcaattcgagatttcgaaatctggatagactggtgtcccactgcatcatgatcatgatcagctctagatgactttgtggcgactgctgagattgctcgtactgctgctatctttctcgtctttccatggactgagtccagtccaaggacaaaggccgagacagacaccaatgtgctttgccaggagtagagtatatggtgatttgactggtttcttcctttcatggcgatgcacaaaggaaaagctcacgcctatttgcatcgagctgctttgctgttattagccttttggagataataacaactcctgtaaataaaagtttagggcccctttgaatcaaaggatttatgtaggaatttcataggattcaaatcctataggaaattttcctatttggccctttgattcaaaggattgaaactttccaaatcctatgaaattcctatggaatgacacattgtatgtagattttggaggaaatttagcaagagctccaacctcttggaaaatttcctttgagtctatctctctcatccgattcctgcgtttttcctgcgctccaatcaaacgaccatttttgtgtttttcctgtgttttgcaatcctctgttttacacttcaattcctgtcagaatcctatgtttttcctattcctccgttttttctaccctgcgattcaaaggggcccttaggggttagccagagctaagctagtgtaggagtactaattaaccactatacaggagtactgtcttttcttttctttagttgtttaaaggttgtcacctcatgtggagtaattatttgtatgtatcgctacctcctagcaaagctaataatacaggcaactgcttactgtataaatcattatagcttatctcagctgactcatatagtggttagctcttcactataaatatatggtccacttatccgtcttacagatttttttttcctatgcctaagccgactgtaagtttacatcttacttttcatctctcatccacctcagcattaagcgttcttacagcccactattatattttctctcgtgacatcagtaatccgtagtcctatcgtctatcgacactaccatattcatcgtacacgctgtttctagcaacagaatcatgagttacagaaacaagctttattcaaagagaaccttttgcttaaaatctgaaaatttccacaacatataggtagcaaccataactatacagtaacaaagttgcagagattaacttcctcttaggggaaaaaaagaaatccttctaattaatctctgcacagagtattcagataagtgaccatgctgagatatccaaatgacaagttgccttttgaaaaaaaaaatcagaaaagaaacctcaacttcaatacggctcatttagacattcaggcccaacaagcgggctccggcctctgggcctgatctgagctgtatttgggccttacaaatgagctgttaactcggatgggcctaggcccacaccgtgtgggctgcttgcagagaaaccagaagcagaagcagacacagacctcgtcgcctccagatcgacggcgactacggcggcggcggcgggtgccaccgccaacgccgaggcagagagcggcaatggcgatgagccgcgcccacccgtctgcatggggaaggaggcggtcaggcggcggaggagggggaggagatccgcatccgctccagcttgaccaggcaagctttcctcgacgccctcccctcccatcccctccgccgccatgcgtgtcggatcgaactgcttctccgtgagatttacagaggaacgccattttctggaggatgcatgtgagatgctgcagtgcagatggattggaccacaaggtacattggcgataagaatttgtcgaggaagttgttcaaatcgaagccaaccaaccaacaccttcctaaccctaatcaaatttgatgtgggcgaaaagatctgcggctagcctatcacccatcgatctcttcctacgccattgaagttaacaagcaagctaggaagctacatgctgtcctcgtgtcgatctctttattatccacagtacggtacggaccagtatacagttgcatcacttgcatgatcattgatcaaacagctcacaacctcactcctttcccttgcaggattggtctttttttatggattgctttgcaattgtaattgacaagaaaacacagcgaggtatagcaaagaactcttcagtgtagttcttggaacaactctttacagaagtgcaacctgcagcacattgcgagttcagaaaccagaaatgcgcaagagttcagaaaggcatgtaaaatggagaacatatggatgccacatctgatgatatcacatcatcgtagaaatatggagcacataccatatgcaagttgcttgtaatgctagtcaagtcttcctcaaccaacccctaatgatcagataaggaaggacacacgaagcatcctaagaaatctcacttgatgtggctctccatctgatgtttcggtgtgtttcttgtgttgacagatgctggagcttgaagtaaatgcctctgcatatgcttctatcctacactgaaccactgctgctgtacgtacccaatcatctgaaaccagttcagtactatggtctccacaagaggaccccaatgcaccaactgttgcctccattgtagccaacattgcactaccagattcatgaccctgctgctcgcaccaactagtgtcattgatgagtgcgtgcatgtcatggaccaatttgttgctcatctattcaaagcactaatggatatcctctggaaagtgaaaagttgatatattttcttttaaagatggccatgatccaaatcagatccaaggaacacatgcaacgacttgacttggaggcagcttcagtccgtacgtagaaataaagctctctctctctttttgaatgaacagtgttgacgaaaaaaatcgaatacaccggcctgggagatctgcttaactcctgtgcaggtctaaagattaatgagatgcgggcgtgccagtcagtttgatcctgcaattgaaaagatatgcaaatagtgtcacaccccaatccggcaccgccgcacaacggcacctgatagggggcatgtcgtaggaaaaacggcgcaaaccgcttcctacgaaaccgcgatctcggtaccagtcccaggacatagtgctggtacccacggtgacaaatatgaatcattgcaaatccttaaaataaatagaggacttatttaccttaacttaggttgcagctcagacagcccgagaatacaaccgacgacacggacgaggcgaacaccaacaacaacagcagcagcggaaccaacggtctaacacccaacaccacaggcgacggctgggaaccaggacgaaaccctaatcttcacttcacctcatcttcaacttcagggcggaggaactatatatatttatatagagcaagggtgagtactttcgtactcagcaagtcacgggaatttaggtgtttaatgcaagcttggaagagaggcaatgttgttttgcaaatcttttatttgaagacattttgaaatcactaagtgatttatttctttctaagtttgggccgaaaagagacttgcgtctcgattcgactttcagagatgtttttcaacagctcatttggtaatgtaccgacctcccgggtcagatcattacttctcggctcccagagccattccacttgattaatcggctcccagagcctttttcattttctcggactcccagagtccagctgcccagcagcacaacaatccgcttccactcgggaagcctagactatgatgcccatagacatcccgaatcacacagattcgtttcttgaccactcaggtcatccatctgccacataggctgattctggttacgattcccacaccacaacaacttttcacaaagcacatgcaaacaaatctacgcaacgagaaccacctcacatccgcccatgaccatgggcacggctgttcgaacagttagttaatcctctgcagaggggtacactttacccacaagatacgaacttattccgaacacccgtcggtatcggaggttcgcaacaaagcctttcccaagccgacccagggatacctcatgccacatagaaggatcaaatcctcacataaatataggccattttaggcgttcacaaatcaaactccaaccacctcgatcggtaattcagcaagcttctcgttcttgcattaccaggaacccggtttgtccgaccccgccccggcgttcccaactattggcatgcgaggtttccctgaaccgactagttacttagccagggtgtcccattccaccttgtggttgcactttgattatgttcgatgagtttcccacaggaatcggtccttatatgcgaatacgggacagtgccacacaggcacaacccccgcatcgcgagttttcacaattcattttattttcaaacacaccgacaccacatgtcgggttttgaaggcttcacaaacctatttcccaagttttcgacaaacaacggtgtatgtgggatatttggtatacgcgctcagagggcacgattaccgaggtaccacaagggtggagcgacaaggaatcagggtagtatgacctacggaaattagtgcgactactgggtaggtccgtcggtttggcacgcaaaccgaggccaagcaagttaagtgtgtgattctaataatgcaagttgcaaacaaaataataatgacttttcaattataggggcaattgatcaaagggtgacttgccttgctcaaggtcttcacgaagcttcacgaatcttcgagaaaacccgcgatcgacgaaaatccgataaccgcaactatacgcaaacaatcgaaaacctaaacaaaggaccaaaataaagatcctatttagactaattagtagtgccattaaatagatctcaattttacggaattactggaagtggaacggaggcgatcggagctacggatcgagggatatgaattttggaggtctaaatggattttctggacaaggaaatgttttgtcgaaatttatggaaataatattctcaagaatattattgacagtcactgacgtgcggggccaagggtgtactgtacatggggggggattaagtggacttttgttcatgtgtgtgggcactgggcttggacagagggagtaaaagtagacttttcattttcccctaggccgagaaggggggatggttgacgggccaagcccacgagcggggagagggaggaggggggctgactgggcgccggcttgactcggtcaagctggcccggggttgaggtggcgtccacgtggaagccacgtcggatggggaggcagaggaggccgggcaggctgatccgatggctagcgatgagcgacgcgaaccggcgaacggcggcgaggtggattggggggttagcaccggaagagagaggaggccaaggggaatcgattcaacggagcggattagccgggggaagaacgacggcggccgacggcggtggccaatctcgccgacacgccgatgtggccgcgcgtggaaagagcgaagggcgcgcggtctcagggtcagctgtcgtggaaaaggggttgcgacgcgcacacggtgacgcgggacccgaaggtcaccggcgacgcacaggcggcggcgctaagcggtggcggaaggggcggcacggcgcgagagcgagaggggaggccggcggccatgaggcaacaagggggagatcaaggggatccccgagagcgtggtggcaagagggattgacaagaggggagccgacggcggcggatttcgacggcgatcgtcggcggcgagcaaagggggaaaacttcaccggggcaacgggggttcgattcgttgaagttggagcatctacgcgaggtcgcgagctcattccaccggtcgagagggcacgggcgacgccgagagaggccggcgacggcgagcgacgaccaggacagagcaagggcgcgcggcgagatgtgacgaacggtggcgggcgcggcgcggcgtgcgacaagggaaaaggggttcagtggggagctcaccgacgagagaaacggtgtcgacggcgcggatggagtcgcggcgaggcggtcgcgtcggcggggtggcgcggcaccgagagggcgcggccggggaagaagagatggagaggtgcaaggatggggcggcgcggagctccttgtcgactcctcgtgctcgctagctccccgacacgcacgacggcagaggagggcgagaacgacgacgaacggcgagacggcagtggtgtgatggaggagaggaagcgggaggtatgggagggggtgtgggttttgtaggtggcgatgtcggtttgagagaaccgaccttggggcggtcaaggagatgaggcgggtggcgcgagcggtcaagcgacacagaggtggtgacgccggcggtggtcggggaaaaggaaaaagaagggggggaaaggaggttggtcctttgccatattgaggagaggggaagcagctgcttctcccattcttggacgatgtggcgtggagtggcgggggccatggatgacgtcggcaatgacggtggtggtcggtttggcatggagcgggggcaaggcggcagcgcgtggcgtcggcggtgcaagggctgatggcggcggcgaccgggcggcgagcgcgcgcgcgggaagggcgaccggcgaattcaaacggcggcggcgggaatcggcgccgaggagaggagttcgacgagagagagagagagagagaggaaggagacaagagaggcgctgcttctctcgctcggcgcgtgcagcgcacgtgtggggaggaggaggagcggccgagaggagaagatgggccggaaaagggaaaaacggcccaacgaccaagagggaggtgaaacggctgagggagggaggtgggctaaggggaaaacggcccacaatacccgagggaggtaaaatagacttttgcagagaagactgatttggagtggattcgaattgaggttttggatttgaattcaaatttgacattcgaactcgatggtttaggttggaatcaagggagactcgaggagaagtcaagaaagagattcaaaacgaaaacttggatatttttttttagtcggagcgaatattcggcaaggattcaaaggaagggattgactttcggaatttgatttcggagacttgaattttggataggaaatcttgaggtggaggatttttgatttcgatgagggggaacaacgggatttgaaatgagatcttggcacgacttagactcgcacacaaagaacgaaaattttcgcaattaggattttgccgagttagtttttaacgactcatgaaaagcggagcgttacaaatagtagatcaaaacagccgatcggctgacaagccgatggagtagttccagccgatatccaataatagccgatgccgatactagctgatagcgatagggtttaagcaatcggctatatgtccaatgtagatgatgatataaaggcaatcggctgatgatgatgtaataaaataacaatatagtccagtataaaccaatcggcaaataatgatatgataaataagcatcgatccgaaggttgaagcacacatcggctggaggtccgatgtcatgaaatccacaagattagattaaacagcgaaacatttgttgtcatcggctaaatccaacttatatgtatatgcaatccttatgagccgatgcaacgtccagataactcaccggctgaaaccccgatgaaacccttattggcaatcaagaagcaggctagagattatggttctaagcacgacttagtagatcaaacttaactgatgcaacactaagtatgaaaaaaaacataatatctagacaatcaagccgttgactgagttttcagggtggtagatgtctaagctaatctaatctagcaacgcgatttagccgataccgacagaaaccctaaaacgagaagcagccgatagagctaaattgatatgctaagactagattaacagagacatgataaataggtaggcaaatatatcatctaaaccagagcaatccaagaggttgaatgtactgatgcagccttgaacgacgccgacataaacgatacaactacctaggccagtggaacattggacttaccccttagccagagatcgaacaccgatgcagccccgcgtcaggtgccaagtcccgccggacgataaaaataaagtagaaaaggtaaaaggtggcgatgcgccgaattgtattgattgtgaagatagattacatagaccccgggtgtacatatttatacccatgggttgatacaagtccttgttggaccaaaaagaaactttcataaagataaaaggaaaagataaagtctttataggacactaaacacactttcctaaagataaaaggaaactaacaaactattcctaattaatagataacttgccatgccgcattctctttgaactcggtctcttctggataagcttcctttagtatatcaatttccttaaccgaatatagcaagaatccgacaactgacgacttgacaactctcatcagctaatctcaagacttcgaagccgatgactactccgggcttaccaaatttcactgttaacaaaaagcagcatatcatgatcataatgtttagcagaatttgaacttatacgctaactacgttcaaggaggttttaaatgtcttccatttgtcaaatttctcttagtgagttagtggtaggatttagcgtcggaaaccatgaaagatgtacttcttttcctttgtgttgtgaaacatgtacatgttcttttcctttgtgttgttttttatgtgtgaacctctttgatctcaatgcaataatgatacacattcccaaaaaataagccatgaaacctataatcttcataaaactacacttttttttttgcgaggaactacactatttcttttagaaccactctaatactatctgagataataagccagtagttgggttcaatgtatgtcagatctggcaaatgaaatatggctccaccatgggagaaacaatgatcgtgggcattgaaatcctgtaacacggattgcaacatctcaccatgggagttcatggccttgtcccttgccagctagctacttcgtgtttggtactactgaaaaatctgaaactaagttgcatatctccctatcacatatctcccctgtaaatacattgccattgacacaaaccatcaccaattcaccaaaaacaacctgacatttcctctctttttttccctgatcacttccttggaaagcaaagcaaaattaagcaatcatgatcagctccaagaagctagttcagctttccaagaagtggcagggaatgggtgccatcgggaggaagagggtgacggcatcggagaaggagatcatccaccactcatcctgcagctcatccgtcgccgggaagggcaactgcgtcgtctactcgtgcgacgggaggcggttcgagatcccgctggcgtacctccgcacgccggtgttcgtggagctcctgaggatgtcacaggaggagtttgggttcagcagcgatggtaggatcacactgccgtgcgacgccgcggtgatggagtatgtcatgtgtttgctcgggagagaggcctcggaggaggttgagaaggctctcctcagttccattgtgatgccctgcagccaccacccaagcaggatggcgcagcaccagcattttgctgtatgcagcatctgaagtctgaagaatcacacagcatctgaagtctgaagaagagctccagggatattcagcttgttcttcctctttttttccatcttttttcccaaatgtacctttggagcacagtttttttgtgcaatgtttttccaaggtactgcgggtgtacagatggagcatgtaaaaataatcacagcattgtgattagaaaagaggatcaggctaaatttccatgcagtggaataataatggagttgtgttgtgttaagatctttgcttttccagactaaaacacgcagcttttaatataccttccctatttatggttatttgtcagtaaggtttagcttatgtcgtgttttaaaagtctttagccaaatgagtataattgtttcgggagtgacatgtttatggagggatgaacacctatgtttatggagtgacatatcagtatatcacatgttaatctatcttacttttctattaaaaaaatgatattttaagcgacatgtaaacacgatagaacatctccttgagagatgaatggactttccctatatgaaacaatactaagtctgtgttcgtttggtgtgttgggaacaaatatcttttgcacgaaaaacgcaatagtctattagtatgtaattaataaagtatttattatttttttaaaaaaggatcaatataattttttagagcaactttcgcatagaattgttttgcaaaaagcgcatcgtttaacagtttaaaaaatatgtgcacggaaaacgagggatgtgagttaggaaagttggggaaagaactcagccaagatgttaacatttgttgatagtcaaatttagcactagatcaaatttggacttaaaaaatcttggagatgtccacatatggtaagaaaaaaaaagttagctctaagaaattctagtcgcagaaatctaaatatacacaagctgttgtgtcatgtgtgtaataacctattaataatcttacaacaataattcttatgacgtctgcgtgtcattgcttgatcactaccgtgtgctgctgcatgacgagcaccgagcccatctccagcgagtcgttggacgcgaggatctccgccgcggggcccatctcgccgccggcgtccgcccaccgttccagcccggccaagagctccggcggctgcctccctccccggccgacgatgaccagcgagaacatcccggccatcccggccagcgtctcctccacgtcggcgggcctctccacgaccttctccacgtacatggccatctccgtcgccgcgtaccttttttcacgaacacacaaaatgattgtacgtcaatatactaaaagaatagagtttttgttacacgacgtcctcagccagaccggccctcgccgcgtacctctcgtagaacctccacaggaagcgctcgtcgacgtccccctcctggaacgccatgtccagctcgtcgaccttggcggaggtgacgctgtcgtacgtgctgcgcttcacgaagcggaacaccgtgaggccgatggacgggtgctcggcgaggcgggaggcgagcgacacggcctcgcggtcgtcggcgccgccgaagaacacggcggcgacgacgtgcgtcaccgccctgtcgctgcacgggtggaggagcgtcctgccgccgccgctcgtggccgccgcctccgccgccacgctgctgggcacgttgaagctggtgccgctgttccggtaggggcggtcgacgaggagccccacggtgcacggcgcccgcgacagcacgccgtggttcagctcccgccgcccgccgaggcggcaccacatcttgccgtcgtagcgctgctccttgtggcagggggcgaggaggaggcgggcgtggacgccctccgccgcgcggcagacggcgccggcgtcgtccagggccgcgccgccgcggcacaccacgtcgatctggcggaaccagatgcccgtggcgcgggagaagaggtcgacgatcgtgttcatccgcgtgacggcgtcgcggccgccgccgcgttcgtctcgtcctccgccgtcgtcgtcgtcacggattcgctggtggtacgggatccggacgacgcgctcttcgccgacgtcgaacaggtggaggacatggacggcgggctgctcctgcggctcgctcaccaggagctccaccaagctgagcatgcccggcgcggcgtgcgcgctgtgcacgcaggcgagcatgtggagctcctgctccgcgcccaacgactccatggcctggtgcctcgtcctgtacgcctcctcctccttccgccgcaccaccgccaccaccggaccggcgacgagggtgctgatcaagttgccgatgatcatcgcgtacagcgcttgctccgcccacacctgcgccgcgcaaacaaataatccggaattccgatgagttgctccattgccgacgttgtcatggcgcatcaagtgttcgaccggttacctaccccttctgatttggcgaacttcatgttcatggtgtcgacgtggcccttgatgttgaggaggacgctgaagcggagcgcgtcggagagcggcatgctgaggtaggaggcgacggcggcggcgccaatggccttgccgaaaaggccgagcagcgtaatgagcacgccgggcacgatgatggcgcccgacatggagttgaagttcatcctcatgccgatcgtcgcgaagtagaagggcagcatgatgcccttcaccggcggcgcgagcgcgtcggcgacggacctcgccgcggcgccttcccgcgggaacgccagccccagcgcgaagctcgtcggcatgccgtcgaagccgaggaactgcgggatgttgccgacgaaccagatggccaggagcatgaccgccaggtcgcggacgccgacgtggtgctggccgacgttgcgcttgttgatccgcgtcacggcggggcgcaccatccacaccgcgccggcggccacggcgagcgccaggaagcctttcctgatctggtgctcgccgcgggcgacgccctcgatcttgcccttggcgcgggtggtggacgacaggacgccgtcgccgaggatgcagatgaggttggtggcgatcccggcggcgacgacgaggcggccgttctcggtgacggtgagcttgagctcggcggcgatccgcgcgacggctatggaggaggtgttggtgagcgccagcatgagggtggcggcgagcagctcgggcgtcttgaccggggagtgcatcatgctgccgtacatgccgctggagacgacggcggcgaggagcaggctggcggcgacggtggcgtaggtgaaggcgacgcagcggtgcgtggcgtgacgcagcgcggcgatgtccatgtcgaggccgacgaggaacatgtacaggatgcgcgccgcggagatgtagccaccgtacatgtcctccacgttgtccacgtcgacgtgcacgatggcgctgcggagccccatgccgccgaccacaacgccggcctggacacacacgatccgatcgattatgaattcaagaaatgtactaggaggatcaatgagccgagagagtattacgtacgaggatctgggagatgacgctgggctggttgtagcggcggaggaagaggtggaagaacttggagacgaggatgacggcgagggcctggatggcgacgaggaagagcgtgtcgagggcgatgccggggatgggggagagagcgagggggtcgatatgggagcaaatgtagtaggatcttgccatcttgcttgcatatatgccccggccgatcggcagccggccgcaccgccgccgaggaagaaggctacggcgatcgccggctcgccgtttgatcgctcggcaaacttagttccggcctcctgcaggtgtgtgcagtgtgtttacgtgctagctagctagctgcgccggccgcgtgttcatgcatgcacgatagatgcatcatgcaaaaggtagaaattggagggacggccatgagtctcgtggtggcggtggccggggagacgatgcctcgccccggaataggcaggtggctttcgcatcatgctccgcctggctccatccgcgcgcgactgttgtctgttgcattgcaatgagccatcttcttggagttgggctgagcagtgagctagtgaccaaggtgaaaactccattcatccctcaaggttatcccctcatttttacatgccacttaaaaaatcatcaaatttttttaaaaaaatttagtaagatagatcaatatgagatatgttgctttcacaaacatgtaaattcaaattcaacttatacaagtagaaaaaaaacaataaatttgactatgaatagaacgcgtaattcacggtcaaatttatttttttccaattgtataagtcgaattttaactcgcatgtttgcaataagatatattatatattaatctatcttgataaatttttaaaattttttgatagctttttaatgacaggcacaaaatgagaggatgtcccctcgagggacaaaaatccacttcccagccaagcgtaaattaaggagaagatgatgaaccgcgagacataggcacatccattcatcctctttgagacaagattaccaatggggaattggggatactactcatcgcccaccgcggcggcaccgtagcatggacgagggcgcggagctcttctccgattctcctggcgagaaatttaggattataccatcgtaaaagagtggtttcgctggattgccatcgcttcaaactgattcattgtaatgtcacactaaattgagatgtgtttaccaaaatgccattttagttcttttttgtgaatagaaagtttttgctcaattttatttttttcccgaccaaaatacccctgacgtgggcccatccgtcatgctctctcccacctctccctctctcccgagacctctcctctcaaggacgccgtcggctcgcgggcgtggcgggcagtggccggtggcggcggcgggcgtggcggggaggtgggcgtctagccgtctagcggcggcggcggctgcggctgcggcatgcccctcgcaggcggcgatgtgcaattgtgcatcgccgtgcggccgtcggagtcgcggaagttggggtctgctccgccgcaccggcgacgatgctcgctcgccgtggccctggcggatgcagatgaggggaacccgttgcctcgcgggtgtaagtacgtgtccccctcctccatcccccctcccttcctcattcgcgttcccagggctcacaccctctttcatccaaccagtccgggggtcataggtcttactcggagctaggagagagagattcctcgatctatgacttgtgtgctagcaatgccagccagggagtagtttactgaatctgagccccatcgagtcccagtcgatccatcgcacaaatttcattctgattttacatgtcatatttaggcaatgggagttctcaactatgatggtgtgattgagatttttatcatactttgctatgaattgtcggcttcggctaatatagttagaaaacagtttgaccctatgaggagcgaatgaattttcctaaaaatccattattctggggctcatgatttttgtggactttactatgatggtgtgattgagatttttatcatactttgctatgaattgtcggcttcggctaatatagttcgaaaacagtttgaccctatgaggagcgaatgtattttcctaaaaatccattattctcgggctcatgatttttgtggactttagattgactctaatcttgggctaaaagctgagttcaggaatggaatgatccttttgtttcttagagtaagtcactttggtgcatttttctcagctgattgcttagtcatgactcgagttctgtaggttgtccactaagttatagataaatcccacagattctacttgaattgatccattacttgagaatgatttgtgcggtattattcaataattttttgttcatttcactatttttatttgttccaaactttgcaacagtgctatttttccatgatttgtctcacaacatgtaagaagtgatttgtacatcatgtctcacatcacatgtttgttaatatatgttcttttgttaataaaaaagagtaagacttggggtgatttttcacactctatgtcaagtatgtccaacaagttctttatgctgtgttttttcatgaaacaagaaaaaaaaatcaataactcaataagtacctagcatattcctcccttatgttaagttggattatcatttttcaactgtagtttgctttgcatgtattattcttcccttcacatggagatgttatccaacttaaaattttctgaagttcagttggctgatgacaaacttgtctatgctgctggttttgctatgctgttagtcatcaagaattagtgaagccaacatctgatagagtaacattgttccatgtgttgttaacttgttattaatgctactggtttctgtttcatatggagattttcaacaacagcataccaggtcccatctttttgcacttctatctatctatttaggccttgttcggttacacaaggattcgttccgggctgggaatgataggtataacaagaaatttataataggtacaacaagagaccgggatttattccgggtcgggaaccaatttactcatattaggtacaacaaaacatctggattagttccacacctcttgactagtggattgattcccggtctcttattgtccctatcatgagtaaattggttcccggctcggaataaatcccggtctctcgttgtatctatcataaatttcttactatacttgtcattcccagcccagattgaatccttgtgtaaccgaacaaggccttagggagaatttttggttcagattcacacagatgagtctacaggcgggagtaacactattcctacaacatccaatttggggtctgttgtgggtgtggatacgctggtgcttggacaggagggtgaggcctgcagcctcgccgccctggagcctggtgagacaaacagagaagggggagaccagagataggtttaactttctttcttgattgattccaatttactgccatgcctctccttatatagagcaggctcctaacaaccctatctaacaaagcctaacaaactaactgaatgcatgagatgggctgagttgtgcccataacagtggccactatgctgtttgttgagcttattgtacagttgttatattagcagtctaaggtcaatctgttgaggagttaatcatatttccacgagcaaggcctaggatgctgcaatgtattccagatagttaaattaatgttgttaggaaggtggcaaaatatccacacttaagctttaactatgacataagtactaaattaagctactctaacatgtgtgcatctgtgatgtgacgatatatacaatgaagaattcatttccccctacctttctgtttgatttaaatatttacctctggctgagcatctatgtagcttgccacttactagggaatggaggcaatctttccaagttttttttggttaagagatatcctaactggtaatgggttaatgacacattggtaatgcatggatgtgattccagaacaattaataccatataatagataattaaggtgaatgcgcatggataacttacaaagagatagggttcatatggagaatgctatattgcattcacattattcaaaacaagattaaattaagaactttgacatctgaacaagtcattgttcaagtaatgaacaatactgcaccactgggaaggaataataaacatgcagagtagacaacatggactggtatggctggtccgctggtgtataggtgaccttattatgtgaaaatagggaagtagatagcagtacggcagagatggtgaaagaaaatgagctgatgaagcattttacgggttgcttgatgagccacgcctctgtgactcaggaagattaccttcattgccatcaaatgaagtgggttcagttgagccatctggtttgctgttatttctgttgcttttcatttgctcagtattagaggagatccgcccttcatcagacttttgtaaggcttctcctgtagttcctctgattttctcatcagcatttgcaaggaggtcccttttcttaggctgctcatttccagatccctgcagtgcagcttgagacccttgcttcacattgtcttcttgtgatatactggagtagctggacttgtcaccttgcggttgctgcactctcatgctcttatcaggaatagaaggtagcatttctctggacgttgctgagctgccatagcttactgtttctttgccatctttagatgatataggcttgttcagcccggattgcagttgctgcttggatgtttcttcagttgatgttggttgaactcttccagtgctactttgatttggatttgccaacaaatcatccttttgggccttgccaatttcattgattagtgctgcatcagctccttgctcttccttggcttctcttggctgagacctatactgatcatttggcaactgctgtgtggatggtccatcgttgtatgcttcattcatgttcttctgtgatttcacgactgaaggtcctgcaacctgtggtccagcatctttgggaactcccggacctggcagcccatcaggtgctactgtgttggtttgaccagcttcagaaataccattctccttgttccttgtactgaaggaagacggaagtggagcttgggatggcatttgatctgtgttatgtcatcaaatcaataagccatgatcaacccacacattaaacatacagttcaaaagaatatataggattttctttccttaggacagggactcataatcctaataggcaatagcacattgtgactaaatttagaggatgaaccaaatatccaaatcgacattgagctaagcattccaacaaaatgcaaatatgagaaatgattttttcagtgttgaaaatgctggagtgccaatataaatgcagcattttgctataagattttgggattttcaaactcatctagaaatttggaaactactatctttttgcagaaggtattgctgcctgttttgtggtgatgtttagtcgttccaccgtattccttgacctgctgctgagcatgcatatacatggaactctacttgattgaattgagcaaattttcttttagtgggggttactttacctgctgcgcgacgacgttgagtgtcaggagttggttcttgtcttcttggtgaagtaggcacgcctgttggagaagtgactgatggagttggttcttgtcttcttgatgaagtaggcatacctgttggagaagtgactgatggtttgactgctgtattttccccacgagcatcaggtgtgcctccttggagagctgtagaagcactctgtctgttggatgctggtgcttgcgcctttgaaggtggcgtttgtctttcattagctcttgatgtcttggccaagtcatcatcagtactgccatatgaggtaggagttcctcctctaattggttcaattgtctgttgggaacttgaaactggcttctgcttgtttgctgttgccttttcatcagcaggaagtttcatctctctgtcagcataactagtaccacgaacatcaggggttgctccttgaactgttgtttgctttggtatggctggagtgttgctttgatcagcacttgatgtttttccaaacatatcatcactagcgccacgggcaccactaattctttcttggattgatgctgaagcacgctgagtgacagaaggtgctgcttgccttggtgtcatttgtggtgctctttcatcgatggaattcttgtcatattgttcattaccaactccacgatcagctccttgccctgttgctaaaacatttctatcattccttggggtttcctttgttgtgcttggctgtgtcctcttgtcaacaccttctgttttggccaacccaacatttctaggagcatcaggagctgctagtttggttggaggaggtgcagaggtttgtctccattgattgatggtggatacttgagccaagccatcatcaggggaaacttcctttaatgattcggaagctttccctgaactggctggtggcgcttggcttggcactactggaattttttcttgctcattgatggatggtgatttttgtggtttagtggcaccacgatcatcatatggcattccttcttttggttgtgaagcaactcttctttcagcagcacttgttggatagtcaggagctcgtgtgccagctgacggagatctaccactttttctatcatccaaaatggttctgtcttgcacatctgagggattcttatagatagatggtgtttcctcctttgaaggtcgaaaatctgtaggctgtgatttaacttcttgtgcttccttttcactttcctccatcatcttccggagcctcttggtagagaatctttcatcttcactcatgatgttatgagtgtcttcttgagactctggttgcattgttgacaagtcaggtattttcagaattggtggtgctataaattgcttatggacattttgctcacctgatggttgttgacgtggtgatgcagctatcctgttttgatcagcctgtctagcatccttggtgaattgctggatgccacggggttgagctggttgtgcagtttcagaacctctctgatcagatgaggttttcttcacttgctcagcacgtccctgtgcataaggagactgaacaccacctcccagatcagaagatgttttgtctgcctcagtgccaggagaagtgcctagatctctctgtgcagaaggccttccagaagaagtttgtggtatgtttgtggtaggcttggtatatggagctggcttgtcaaagcggggatcaacactggcacgttcatcaatttcatggggagctttggttgatattggactattaggaccgactgcctcactgatatcacgtgttttgggtatcttggtagaagttttcgagtcttcttgtggactatgttttgtaggagttgctgtttcatcggtatggctcctagccttaaaaaagccagagagatgggatttatcatgagcttctttcgatgttgtttcactaggtttggtttggtatggggcatctttggagctggatatatcagtatctgttctctgaggaattttgggggtggtagatggggtgaagaaggtactgctaggctgtttctgagttgtaggagctctagaccttggggttgatggagttttctctgtggtagtaaagaagttgctttcttttctaggtgagggtttatcttggcggattgtttcagagggcagaggttgctctctttgtgatgaaaatgaggttgagatcataccagcactgggaggtgggactagtactgtccgtgactcagtgctagtcgtctgccgagggtctaagcgaatggtgtggccaacagatgtttggggaagctctgtctgccactgctcctcctgctgctctagttccatttggtattcctcctccactctgttcatatccttcagcacctgcttccaagattggcggttggagattgtatcccaccacctctgcacattcttccttgagtcatacaggtaggcaaattcagatgtcacaaggtggtgggtgtttggcaagtgaacaaggtcagcaagggtgaacttgttcccagcaaggaactcactctcaccaagcctttgttcatagacttcaaggacttcttccagttttcttttctctgtgttgatatcatcatcgtcgtcatcctgcacaggaaaggccaggtggcaaaacaatgcccggctcggaggatcaaacgcatgctcctcatgacggagccattgttcaatggaagccctctccagaacatcctttcccagcaggaaaggatacccacgctgttcataggtttctgctatgtagcggcaaattgctcttgattctgcaggtaagaagggtcagtaccatattctgattgaagactgaagatgcaccattactatatttctggtttctgtggacagtgtatgtcctacataacctcagttgagaaaattgagatagttttagatagtgtgatttcagttgccaattcacatgattaatacatgctaagaagcatttgtttattttggcaccatgaatcctgctagtacaaccatgatatacttgctagaatgtgaaatgtacctctctttccacttgagtgcttcatgaggtttttattttcgaaccagtttttagacatacattcagcatttcatttcatgttcaaaccgtaatcatgaaacaaattgccgctaatgatgaatgcacgacatggtacacagtggttgcacaatggcactacattttgatgaacagggtctgccaactatttccactttaaatggaattttgaaatgaaaggggacatgatatggtgtagcacctaagtttctgaaaaccagaatgctgagaatcattctttctttgtttcattttaagtctactgttatattaattattttcatcctgaaataatgaataatgtcaatcttctgagatcacatggctattgattgacatgtcaatttcatttcatctacaggtttaaaattcctgcaccaatcatttgcagggtggatgcacaagacataaattgaattcaacttatttgattcggttcaaaaatgtctcatctacaaggcacgcatgctgatacaggtaacaagcatctcattctaggatttgtgattaaccaaaaaaaaagctatgttcctttagccatgcaagcttacctaaaccatggatacatcacacaccttgccaaattaagacaggctagattgtgcaacaaacattgttaccttgtagaaatgtgggtccatcgtagaatggaactggaacactcctcgatgcctacagtcacagaacaaaataaaaactcgaaatgagatataaatatataaacccaagaaactgcttctattgttgtacattctgggtgttgccgaaaacggaaagtaacacataaatgtggcagcaaagtacctggagcctgaggatgtccttgtaagaatccttgacagtctcaaactcgatgtttttctcatacaggcatgcaagcactctggacacatcaggcatgatcatggatttctcatggtataacttcacaactggagcacctgctccggtgctaagccctgccatgacagcaagagctcaggtttgctggttgaagagttgaatgatatggcatgcaagtaagtatggtaactccaccctacaattttttaatataagaagcttatctgcctccaacgagaagcaaagagaagatgcttaaagtgagaacctagaaaaaagttgtgacaccgtgacatgatgtagtaagaaataaaatggaattaaagaaaaggaaaaggtaaagagaacaaaggggagggaaaaaagcaaaaggtaaagcaaataaaatatggagatttgaacagtgatgatgttctttagttattccaacccttgctgcgatatctatttccagcacgttgtgattttaaagagcaaaggtaaaataataaaaagctacttcttggacactacctaggtacaaacattattatgctgccaactgaacgggaggatagatcgtatcagatgtactcccctattagctaacatcgctttattcatccgttgcccctttaaccaaaggagatgcaaggtgctctggtgcgtaaattcacatgttttgtcacagaaggcaagtataaaatcagagactagcagcagtccagcacaagcctctagcagcagcagacaaatgggatgatgatgggcaccgagggtgcctttgtaccaggctaccaggttacccatacctgctagtggtaggtttgaaaccttccaatagaggccaatagaggcctgatttagttcccaattttttcttcaaactttcaatttttccatcacatcaaaactttcgtatacacataaacttttaactttttcatcatatcgttccaatttcaatcaaacttctaattttggcgtgaactaaacacacccaaagtatactccctctatccataaatataaacgttacaagggtttaaaatttgtccataaatataaaaaattacattcaagtttcttctcatcttacatttaactatctttccacttccaaccatctcacatttaacgaggaatattgttgttggtggggggggggggatttgtgacttttctcttgccccggtttcgagtgcttcttcttaattaaagtactttaaggggttttaatttcctcttgtggctgacctttttttaaacaacctataaatgcttttatgtaccaagctagcagcagaagccttgcataatactatctcatcccaaaataagtttattttttcctgtcccacacataccaatacaaaactaagaaaactacaacgactctactttattaaatcctaatgcaattattaatcaatttatctattccaaatacaattatttcctactttcacaaactttgatataatgattattctaaaaataaatatattttagaacaaataggaaaagctaaaaatattttggcataatagcagacaaacaggataaacgatggttgtactacaaggtagcagtagatgcctggcatggtactagtagcagacaaacatgataaacgtacatgcctttgtaccacggcttcccaggcttgtaccagcctaccaggcctacccatgctgaaacctttataataggatctccatattagtagtaggccgttaaccattttgtacggagcactgttatgtttttaggggttctttatctagagcagcatataaatactcatcacaaaagttcatatagcacgctgcattgtactacctccgtcccaaaataagtgcagtcgttgaaatccgtgtccaacgtttgaccgtccgtcttatttgaaaaatttatgaaaattttaaaaaaaattagtcacacataaagtactattcatgttttatcatctaataacaataaaaatagtaatcataaaaaattttcaaataagacgaacggtcaaaactgcgcttattttgggacagaggtagtactaggttaaatcgagataaagtattgggtgtggaacacatttttagtaaattaagtgtcaccggaaggactagcatggtacgggcatttggaccaaatttacaacattatggcgaaatggcatgtggcttagtggttacacgagcctaagtagcaccttaggttctaggtttgactttccatggaagcgattttttcaggatttaacagctttgtgctttcagtggtaagcgacgtacccgttgatagcgaggcgcatgtggtgatttcaatctccaggatggatcctgtggtgacttcgtcaatctccaggatagattggccggtcgagtcttcgaaaatgctcataggagtgagtgtgcgtgagttgagtgtctgcgttatactgtataattctcaaaatttataacattaagtaatgttctagtgtttagaaatgaagtaaattattttcatttgtgaatggttgcaaattatatgcacagtttataggctccatgttttctgaattcaactcatgtagcctattgactgattccacatggtattgagtattgactctttctgaggactatattgtgaaccattggatctaaaatgtgcgtcccggatctcctcgttacattttataaaacgtctccctcaccaaccaatgcacaaaaattttcctcctaatcccagctatagcaaggtaccaaactagataaaccttgggacaacttgataatttgcatatcaacttgatatatgttaaactgagtatttatctagtttgacaccttgctatagctaagattgggaggagagaataacttagattacggcagcggttggagaaacaatcggtgaattgagtcagccgtcgatagacggcctcacatcaaaagagcaacatagttggcagtattattttctgccagtgttgtttatctgttgcaatcgttgtccaatggtgtaaatttgatggcaagagaaaatgtgcgactctcatgtcaagattttagctcagctttactgaagatatagaacaatatgttattcatataaaatcggaaaatttatgttctttctgagaaaaaaggttgggaaaattccatcctgtctgtagcaaaagctatgtaagctccccccttcctttccttcttgaaagattaaacaactcttccttacagccgagctagcttatggtatcccgacggtaagcgcaataaccacggtgactgtcacaagctatgaaaaaccggaaaaagaaataatcaagaaattcaaaactgtttaaaattgtttaaatttggtgggattatcacgcggttagcattaaccggcgcccggcggcattgtcaatcctgttgaagccaacttctgtttttgccgatacaaggcatccacagttccataccattgtgtttctcccttgcacacgtctctgtcatggtgtcattcacccaaccacccgaaaaccatttgcccattcaggtcttgcgtggaacattgacaccatatattagagtagagatgccttcaccgtgaatccttcacctgcatatgttgctcatgctgaagaaagaaaaggtcagacaaattgcgatcgagacgcagctcgcaatcgccgtagaaaaacctgtggcacacctcccctgttggtggtaatcgcctaatcaatgttccgttgaaacaattgctcgctgcagctagcagaaattgactcctccctacacgtcccgctgcacccgtcgcccgggcatcataggagaagtttctgaattcgctttcactcgcctcatgtcatgaggggctctctctccatttctgcacttgtgtttggtcttgtttagctggggaaaatttctatgtttgtttgtcgcatcggatatacggacacacatttgaagtattaaacatagtataataataaaacaaaaaacaaattacagattcccagcaggcagcataggagaagtttctgacttcgctttcacttgcctcgggtgtgtttagtttacgctaaaattggaagtttggttgaaattggaacgatgtgatggaaaagttgaaagtttgtgtgtgtagtaaagttttgatgtaatggaaaagttggaagtttaaaggaatagtttggaactaaactcggccctcatgtcatgagctgctctctctctctctatttctgcacttgtgcttgtgtgtagctgagagcatcagacagagacacaggaagaagagggatgtagaagaagcttagccgttaagagagagagcgaggcaaggaaagaattaaggaagagagaaaggagaggagaaatgctggaggcgtacgtagctagccccaaccactctggccgcgcgttgccatcaacgctcccgcgtggtcacccgtttctgcagcggcacgtctgaccttatggctttaagctcacgggggtgccggtggctgtggatggactcgttcctccaaccacctggtgcgccaccccgatagagggactgtgttagtactccctctccattaagcaaacgtagtacatggcgtgatatattaagtatctggacaagagcacatcccgtattagattcgtttattttaaggtgaagaaagtaggcccttcaaagtgccttttggcttacgggttaagggcccatttgaatcgtaggaatgaaaaaaaaacagagaaataagaaaaatacaggattctgataggaatacaattgtaaaacagagaattgcaaaacacaggaaaaatacaggaatggccgttttgattggaccacaggaaaaaagcaggaatcagatgaaagagatagactcagaggaaatgttccaagaggttagacctcttgctaactttcctccaaaatgtgcataggattacccattccatacgaattttaaaggaacgaattttaaaggattggatatgattcaatcctttgtttcaaaggccttcataggatttttttttctataggattgaaatcctccaaaaatcctatatttttcctacaaatcaaaggagccctaaatgctgaagagatgatagattatctgattttatgatagtatatttgagagtgtaaacgaatgaattaactgttacgaagttgaaagttatttatttttttaaaaaaaaccattctaacaaatttatgcagagaacttttgtagaaaccgtactgtttagaatattggggagactgtctgtcagtctgtgatactaatatgcaaggaaaaagaagtgcccgtacggttttttcattaaaaaaattcttaacatttttaagaaaagtagtaagatcagtgtttaaggctttaagcttgcgtggcagcctgtcaggcaagcggtgcatggctgagctggcaagccaagtgcatatgcttcatatcatatcatctcatgcgtaccctttccctcggctaatccttgtgaattatacacgcgcttgattcattaattcatatgtgtcgtgtactactaatcaccattcaccaagcaagcatatttatatgctaacaagattttttttagagacgtacccaacatccacaaagctagctagctagatcctcctcttctctgcactctgctagagcaagctcgatcgatcgatcagtgatatttccccttatccaaatccagcacaaaccaacaatatccatggaggccgtagcagtgcacgccagcttctcgtcctactcccctccggtggtcgccggcggccgcgacgacgccggcagcagcagcagcagcaggagcatgtcccgcctgccggctcgcgtcgccggcgccgtagctcgcggcatcgtcaccttcgtcttcgccacaggtaggtggtggtggtttcttgcttctttttgtttgcctcgattaattcgagctcgatctgtttcatggaagtaattaacttgagtaattgatcgattggttgacagtgggcacgatcctgggggcgatcaccggcgggctgatcgggctggcgacggagagcggcatggtgcggggcaccgggatcggggccatctccggcgcggtggtcgccatggaggtcgtcgactcctccgtcgccatgtggtgctcccacgactccgggatctggagcgttctctacgtcgtacgtttactaatctcctgccaaaatctgcatcccctactgcaattacagttccatctcgcagctgagacgatgaatttgcattcattcttattactaatccaacttatcgtaccaattagcaatccaattaagtttatttgctgtactaaaaaaagatatgattaagctttccttgttctactaattgatagtaccaatttgcaagctaattaagctttttgcttgcttgctctaccaaatttgggagctaattaagtttggttgtgtttgtgtgttcagcttgacgtgatctggagcctcctgacggggcggctggtgcgggagaaggtggatccggcggtgcagaacgcggtggacagccagatgaacgccgccgacgcgcccttcagggagagcgcgccgacgctggcggagatgttcgacaccggcatccccggcgtcgccgccgccgccacgggcatgccggcggacgccatcgccgcgctcccggtcaccacgttcgccgccgccgccggcggcgacgaccgcgccggctgctccgtgtgcctccaggacttggaggacggcgagcgggcgcggaggctgccggagtgcggccacacgttccacctccgctgcatcgacagctggctgctcaggcacgcgtcgtgccccctgtgccggcgcacggtggtcgccgccgccgtcgccgtcgacgacgtcgtcgtcggctgagctggcgcgagctcgcatctggttggctcgttcgtggttaattaggcttaagctagaagattagtgagaagggcgtgcagtgcacggcacgccgccggcgacggcgtgaggatcacgactgacgtgcgtgtgtgtacctactacctcaccttcttttgataccttgattcgttttggcgtagtacatatgtgtagcggatacttgcattatactagtatatacacacacacttgtatgtattgtagatttatatacttgtacatggagaccttgtgattaacataatagagagatccagattttgtctctatcttagttattaatttcatcactaattttgggcctattcagattactaccaaaatcaacctccaaaatttggcaatgctgaattttttataaatttatagaattgccaatttttgataggatggaacaaatatgttgtgccaaaattttctttacaaatatttggtaaaattaaatgcaaccatatatttgtcaactttaccaaaacaatgatatagttaaaatgacaccaatctaaacacacgcttgttcttatgcaagatgcatattgtggtttgctatttgttttaagacaagtcataatcgatcattgaagacagttcagaagaataataatccttagtgcaatgctaaacagagtaactggaagcactgaaccatccttttccaaatgaaaggctaagggaactaagggagtgtttgaggagaaggggattgaggagattgggaagatacgcaaaacgaggtgagccattagctcataattaattgagtattaactattttaaattccaaaaatggattaatatgattttttaaagcaactttcctattgaaattttttgcaaaaaacgcaccgtttagtagtttgaaaagcgtgcgcgcggaaaacgagagccaatctcccctatcacccctaaacgaacgatgcctaaggaaataaacctaacagcagaaaagaggcatatagacagggtaatctctatacttaaaacacgacgaccgcgtccatgagcctattttgatgtacactgcctacatggaaatatcgtagttcaaaggtttattgttgagttacagattttggtgtgaacttcattgaactcaaaggatttttaagagttcttctgcgagatatgtgttgtggtttgctcgctggagtacttttttaaagacaagtctcaatcacaaaatctcaatttactagagtacttattgtaagaagacagagtttagaagaataatcttagtagctgaaagtattgaaccactttttttcaaaagaaaagcttaactgaactaggaaaatatacttcctaatgaaatctaacaatagaaaaaaaagaatatcgatagggagctgcggcgttgtcacaataataacatctgtaagtctattttaatgcgcacactgcttcacaaactagtgatcgctttcgtctgcctctataaaaatagcataattcaaaggtttgttgttgagttcattattgaatctgagaagcactaactacaatcctaccaactagagctacagaggtgatatgtgctcaacccaaacggcgaacggtttaagttcgaaagccctcctcctcaagaggataccggtttcctgattcctatgaggtcacctacataaagggccatagttgaaagcccatcaattgatttcagcgttaggcccactcacatcgccgggtggtgggccgtgtaccatatgatccgcaggcttctctgggggcttcttctttctggcttaattgacttggttgggctaattgatgggcctcaattccatcccatttatgtacatgggctgagatttcttttagcttaatttcttgctcacaagagcagagattaaaatccatccgactccaaaagaaaaaaaaaaactgggagagatcggctgtagtgatagatgatcagctagcagctatagctcttgattgatatcaccaccatgatggaatgcttctaaccacaagctgtactaaaataactttcaagagaaatgtcatttgcatgtcgcagttggttggttggtcggtcggttgatcgtgtgagaacgcagtcatgatcgactgctgctactgtttggcttggggacgcacagtcaatgctgcatgaagcacgtgatgtgacgctgacactcatcagtcatcactcatccaaccttccgccagtctgtcccttctcttcactgttaacgttgtctaatgactcctggctccttttgttttaaatatagtaatctaatattatcatttcgtttttaatataatccgggtaaacatcagatttaatttcaataaaattaggattaattgtgatactgttatctcttcctcacatgaaacatatgcatggaaataaagacattaagggcttggcaatttggtaatattgtcaaaattttgataggatttcggatattctgatgtaattaaactaaatggatgtatatatttgacaactctaacaaaaaaaaatggtatggtttgaaatgacatcaatctgaacaagccctaaacctccaaaggtgaagatttccccatatatcttataagtgaaaacgctcctcacaagtttaaggaaaaccaagtaaaaaccaataactttttatccgtataaataccatctaaaaatcccctaaaagaacaagctactcccattgatttttacagacggtctcggtggttttgtaaacattagaggatctccaaatcaccaaatgtacgtaccagctgctgcgtgcatcggtccaccgaggtggtcacgtcgccgtcgtcgttcgtcgtcaaatttttgtggtagtgtcgtagtagctgccacacgagaaccatgtcgtgattaaacaataaatactgacagtccttgctatatctagctacttctctaattaattaatcagcctgcgccgatattgttcttttcaaaattcgattttaaattcagtcatcaacagcgctccagctggttttaatttcaagtaggtgaagttgtacttgacgtgttgtatataatactctcgtttggtaatcgaacagtacgtacatagcaaacgtgatatctgacaatgacagtcgcaactatataattaacgattactcctcgatcgaattattcacaaattaaatcgatcaacgcaatattgataagagatcgcgacgaccgtggcaactggcaagtggcaacccacttatatattgaccgtgtgctagatacgcactattaacgatcacactattgtgatgcgaccagagtttatagaaccatataattatcacgtagttatatttacgataaccttctcggttttaaaattatggtatacctcataataatcgcatatttttcacggtaaccaccaaatcgtgaggtgataaacatgtttttttttcttattaagttatttttagataattaatggataaaatctgacattggcttcaacaaaagctacaactactcgttacaaaattgtcgctcatcatgaccaataacaaaagaaagtggagtacgtagctaacaaagggtaaagagaagacaaatataaatccatattggtcacagttcagcaatcctcctagctaatgaatctctatccaaaataatatattaattcatattagtcataactaataactttgccttacacgtgtgcaatataactagtatgtgtatgaagtggtcatatacatcgatcttctaatgaaaaagaaatgtagattaatttgcattatttaaaaaaaataattatgaaaaatgaatcgggcaagatgcaatggtccattgtatgtattaagtttgagagttattgcaccagtgtcttctagacccagttgctatatagtaggagccaactcatatcgatcgtcgcgtcaaacctctccatcggtcgattcagagagagatcgagatcagcgtgagagagagagagagaatgagcagtacgagtggatctgcatgggatcacagcaacaatggaggcggcgggtcgccggagttgagggaggcgctgctgctgggtgacggcgggtcgtcgccggagtcgagggagattaaggggattgctgtgaagaagcaggatgacctggaggagatccggagcgtgggggagctgatgcggctggcggcggaggagaaccggcggctgtggtacctggccggtccggccatcttcacgtcgctggcgcagtactcgctcggcgccgtcacgcaggtgttcgccggacacctcaccacgctcgagctcgacgccgtctccaccgagaacatggtcatcgccggcctcgccttcgggatcatggttagtcactcactagctagtactccctccgtttcataatataagacacaactatattttttatatgttacataatataaggtatgcatgcatgcatacaattaattagaacctcttctccattaaactattatttttttaaattctccatcctcaatatctctaattctattggatacatgcattatatttattagagtgattcaaactaggagataataataattatttcttggtctttgggttaagagcggttatgccttatattttaaaacggagggagtagggagtagctggctggctacttccttaatagttactccagttacttccattcatctattcctacttacctaccacctccgtcaaaaaaaaatattaaatatgatacattctaatacttttatatatatatatatatatatattaaatttatagtactaagatgtaccaaatttaatattgattaattttttagatagagcgaagtgaggggagtataatataattaccctcgttcaccgatcgatcgtgtgtattactatctccatctcaaaagtactgtcctttttttaatttgtgtaaaaatttactgtctttttaactatcaacttgactacagtacacttttcgagagaccttggaagtacagtagttaattttgcttgattagcttcccaattttttcttcattatgtctaaactttatcttaatcacaggattgagttgtacatttttgcgcttatgtcagttatttggatccaaagttttattaaatcttagtctaacttccttgtaattagttaaaacttgttttcttaagacaaattttaattttcttcatccaaattaacaatcactgcaaatattttttatacgaaagttatttttaaaaaatcatattaacccatttaaaaaaatagcatatatttaattaattacacgctaatgaatcactccatttatgtgcgcgagagattggatcccaaacttcaacatacgaacttaggggtgaaaacggtacggaaacggacggaaacaaactttatcgttttcgttttcatatttttttcggaatcggaatcggaaacaaaaacggaaacgaatagtatcgaaaccgaaaacggagcgaaaacgaaccagcgcggatacggtaacaaaaatttatcggaatacaataacccctcaaactgagcttcaaacttttgtcaagtccaattcgcaagtctcaacagtcaacaattcatcataaaacacaattatatcaagtctaattgtttagtctcaacagcaaaaatatattcttctataacttcatataatttgcataacaaatattctaaaagaatacagcaaaacagaatggtataagtctataaggtatacacaattcaggtgctatactgctatcagcctatcactccaggaaatgggtttgagaacaacaacagaacatcagtccatcaacacttagttcatcaatcatcacagaacagcaatagttcatcaatcatcacagaacagcaatagttcatcaatcatcacagaacagcaacgcacatcagtccatcagtgtttcagtacttagttcaatcacaaaacacatcaccctataaatacatagttcatcacaaaacatagttcaatcacaaaacacatcagtacatggttcaaacatatctcatccacttgtgcagcaggagtacactaatttgaaatggaaacttgaaattagatgtaacttgaaaattaaattgaccaacattttcttcaaacatccattggcgcaatgccatcctcattagaacattccgcttctactgtctctgtctcttgttccgttccattagccttcaaaaaaaatgatagagcattagtaaaagtgcaaagtcaatcactatatacacctgctgctgctggttgctcagatgctgccgctgggctgctggctgctgcgaggcgaggagccgtcggcgttggtggcggtgaggaagagactgcagtggtggtgtcgtcgtcgcctcgtcggtgtggtggttgttccgtcgtcggcggcggtggtggcgatggtgaaacggcgagacgcggtgggacggcgccttgagatggcggggaccgagcaggccggcggaggtgcgagatggtggcggcggccggcggcgaaacaacgaagagcaagggcggcgcgaggacggcgggggccagccagccaggcgaccagcggtaggcgcgagggcgcgccggcgccgtgcgagatggtggcggcggccggcggcgaaacgacgaagagcaagggcggcgcgagatggtgggggcgaggacggcgggggccagccggccaggcgaccagcatagggcggtggggggccggcgccacgggcggtgggcgtgagggcacgctggcgccgcgatgccgcgatctggacgccgcagccgccgctccgcctccaactcgcgagtcgcgtctgagttctgagtctgacggtctctctcctatagggttagccggttagggtagatgccgccgcgatttgggttgggctgggaagctagggatgaattatggactattgaatctatgggctttttaacttcggaaattccgacaatttttctggaatgtttccgatcgtttccgggttccgacggaaactgctattatcatattcgattccgtttccgagaaaatatttccgttttcgattccgattccgagaaattccgaaaaaattccgactggccgattcggtttccgaaaacatgaccggaatccggaaaattccgtactgttttcacccctaatacgaacacagcgatagttgcagtagagagttaagtgcacatgtcttttttattaattccttgttttctccatcacctgcgcaacatttttttattacatggacgcgtatgcacacactactgtacacacaacaccatatgcacacactcgcacatgatttatatatgtttatgtatcacttttgacccttctagtagtatgtcttttttatttataaatcatgtgcctactacccagattaggaggatcgaattcaacttaagaacgaatggaaggctatgtaactttaattttggacatatttaaattagttttaactaaaatttcaaaagtatgttagaagattttttttgggaaatcttgcttgaatttctgacctccacttgaagattcccgcaacacgtgttacccgttctctaagagccagattattataagtcggattataataagccgatatagaataagttgttagatgtttatttctctaaattgttagctgtttgttagttgttagccaccaaataatctaaaaaagcacctttcgaatggattatcagactatagtaatatggtttataaattgtaataatctatcataataatctatctgtttgttttagcttactcctaaaaatgtgttgtgtgtgtatgaatgtgtgcggtgcagtacgggatggggagcgcgctggagacgctatgcgggcaagcttttggcgcgaagcagcatcacatgctgggcatctacttgcagcgctcatgggtgatcctcaccgccatgagcgtcatcctcctccccatctacctcttcgccaccccgatcctccgcttcttccaccaggacgacgagatcgccgtcctcgccagccgcttctccctctacatgatcccccagctcttcgcctacgccctcaacttccccatccagaagttcctccaggcccagagcaaggtcatggccatggcggccgtctccgcggcggtgctgctgttccacgtcgcgctcacgtggcttctcctcgtgccgctccggatgggcctcgtcggcctcgccgtcgcgctcaacgtgtcgtggtggctcgtcgtgctcggccagctcgcctacatcgtcatgggctactgccctggagcttggaacgggttcgactggctcgcgttcaccgacctcctcagcttcgcccgcctctccctcggctccgccatcatgatctgcctcgagttctggttctacatgttcctcatcgtcattgtcggtaacctccccaatgcccaggtcgccgtcgccgccgtctccatctggttagtgaaaactcaaatcatcccttagagggatatctctttatttttgtgtcactaaaaagtcataaaaaaattgaaaaaaatagtaggatatatcaacatgtgatatatcaattcacaaatatgcaaattcaaattcaatttatacaagtagaaacaaaaataacaaatttgactataaagtgaacgtgtaattcacagttaaatttattatttttgtttcgaattgtataagtcgaattttaactcgcatgtttgtgaaagatatatcatatattgatctatcttgataatttttaaataattttttgataattttttgaacggcatgcacaaaatgagagaataaccccttagggacaaaaacccacactaatcagtaatcactcatcgtcttcactgttttatgctcggatcgtagctgatgtcgatctcgatctgtttgcattttgcagcacgaacctgtttgggtggcagatcatggtgttcttcgggttcaacgcggcgatcagcgtgagggtgtcgaacgagctgggcgcggggcggccgcgggcggcgaggctcgcgatcgcggtggtgctcgtgtcctcggtcgccatcggcgtcgccttcttcgcggcggtgctgctgctccgcgacgtgtacggcgcgccgttcacgggcagcccggaggtggtgcgcgcggtggcgagcctgggcgtggtgttcgccttctcgctcctcctcaacagcgtccagccggtgctctccggcgtggccgtcggcgccgggtggcagtggctggtggcgtacatcaacctgggctgctactactgcgtcggcatccccgtcggctacgccatcgcgttcccgctccgccgcggcgtgcaggggatgtggggcgggatgctcactggcgtcgggctgcagacggcgatcctggtggcgatcacggcgcgcaccaactggaacaaggaggccagcgaggcgcacgccaggatccagcactggggtggcacggccaagctcgccgtcgacgaccccatctagttaagcgacagcgagcttcatcatccatccatggcgtaagaatttgtaatgtacctgcacaatgcaagtacatgtacatcctgttgtcggatttggtttgagattcgtgcgcgtagcatggattgcaataagaaaatgcagatgtgttgatatgtcgtggttttgtgtatccgagaatgtcaatccacgatgcaattatgcagtgtatgtgcaccttgttgtttgtttggatttgattggagattcgtgcgcgtgtagaatagataaatatcatgaataaagcatgatattatatactagtatctccatttcatacaatttttttctaaatcaagtttatagaaaaacataacaatattttcaacataaaacaaataatgttataagtgttactgtttttttaaaaataatggtcaaacatttaaaaattgactttaaaaaagttaaaacgaattataatattaaacggagtgggtaaaaagaaatgcagttgcgttgatattgtggttctgtgttttggcagtttggtctcagattctgtttgtcaatggcaatggaacttgggcaatggatgtgtatgatgtaacgcaagcaacattcgttctccagtgacttactcacggaaaattttttttgacagaattggcttttggtgctactatataaataaaactaaaataagtaaagatatttccgtgctataagaccatttttttttccattggattttgatgaaataagacaaaatgacacttgcatgaagaggtaggagagcaaactgaggcccctatcgtttagccaagtacggataatagcaaaataataatatttataggtaagatttttatttatacgttcttagtgatttagatgccaatactgaaaaataaactttaaataaaagattttaaattttggcaacgagcgatgctgtatggaggaagcgatgggcctgaatcctaagccgtctaggatgaacaagcccagtttaaaaccaacacggccctcacacagacggcccagctcagcccagcaaaatataaaacaaagaaaatacaggaaacacaacgaaaagcagaggagaggtagcccaagctcggaagggaaggggagcgaccttcttgaggcagaagtcacgaaccaaccagcgccgccgccgcgatgacggacgtgcagatgagcgactccgagccgcaggcggcgcctcccgcggcgccggcggcctccgccctccaccgtaagcggtcctcccccatcccccagaaaccctcgggtggaattcctcagatttgtttctgatgtggttgcgcgctgttcgtcccagatctgaaggagatcgcctcggtgatcgaggccggctcgctgtccaaggaggtgcgccggatctcccgcgccgtccgcctcaccgtcgccctccgccgccgcctcgccgcccgcgacgtctccgccttcctcgccttcgcgctcccgccttcctccgaggcctacacccgcctcacctccctcgtccccaaggtgaattacttctcatgcgttcttcttctgttactagtataactcagcgtaagagcaacttaatattccatgtgatgcaactaaactatcagtgtttagatatagttgttggcatggataaacttactagacatgcttgcatgatgtgtgtgattctggaaagtttcccgttggtaagtaggtacctctgacaaaatttccagcactgagatatttgcattgagttggtttaatttaacatagtgatcagtaattctgtgtggatctgggttttctatggcaaaactggaatttccaaaccttggtacctgtgatgctaactgtggatatttgatttatcatcactgcattatcaaccgctctgtagttattttggaattctttctttaaataagctaatcatatggttaaaattttaaattaactggtaaacaggaattttgggtgggtgtggtcttatttttgttgttatcaaaactggaattattccattggtactactgatgtaattcatagatgcttgttatttgatttatcactgtggtgtttgactttctcatggctgttttggatcgcctgtgtctgtcattccatgattagcaacctaaatcgctgaacatatagcatgggtcattttctttcatctcttgataggaagcacttgcaaatagaggttaagtgagctccttcactgcgcacttcgactttcaaaaagatcatattttcatgtatcgtatatttgcaacgttgttcattatcgttatgttatttctgcatgtttatgctgaaatctatttttagaacatattagaaagctattcctagaagtctagagctgtaacgttaagccttatttagcagtatctctatgatacccaagaaattgattaccagtatgagatactgcactctacttgtttttttttttttcatttgtgatgactctgttatatgaagaacataatatgctgttgcactatggtcggcgtagtttctgtttttgctacttgttttgtaatttagggctcaggacctggaagcctaactttgttgtttcattgtgtatacaatgatataataaggagagtaaggtaaaacatactgttatcatatgcacggtgtctgatgtccttatttgttgctttttaggaagatgacactgagatggacattgacatggcagctccagcaactcagatttcgatcaagcatggcctccctgagattgaaatatattgctatttgcttgtcctgatttttcttattgaccagaagaaatacgacgatgtacgtctaagactactgattttatcttctgctctcagtgagacattctaatttaaagttctcacctgtctctaggctaaagcatgtgcaaatgcaagcattgctcgtctgaaaaacttgaacaggagaactgttgatgttctggcatctagactgtacttctattactcatatgtgcatgaactcaccaacagccttgctgaaatccgtgggtacgtcaaggtcttatttaatgcttagttgctcactattcagtgtcttactaccatgtttatcgacttttcctgcatttactctcttttcaggaatctgctagccttacacagaatggcaactcttcaccgcgatgaacttggccaggtagttttggtttctatatcctcattgatttattaacctttaagtcatctaattcttgtaatctgtgtaaatatacctgttttcttgattgcaggaaactttgctcaacctgcttcttcgcaattacctccattataatttgtatgatcaagcagagaaacttaggtcaaaagctcctcgttttgaagcccactccaatcaacaagtatatatctgcttgcaccatttattactctacagcttgtgaatttattgtgttttggatgttgctcatgcgaagtttcatactccacttaaatttgtttctacatgttgttgttaagacaccttcattttagttaatgctttatgattattgaagtatgagatcatccttcagccaactgaattcacaggacagactcttgggcatatgctaataagtgccttttattgcagttctgtcgatacctgttctacttgggtaaaatcaggacaattcagttggagtacactgatgctaaggaaagccttctgcaagctgctcggaaggcacccattacagctcgtggctttcgtattcagtgcaacaaatgggctattatagtgagactacttctcggagagattccagagaggactgtgttcatgcagaagggaatgaaggaagcactgacaccctacttcgagcttacaaatgtaagtaactagactttcctgaaatactgtgttgcataggtggaaaactcagactgacttatttgtggtctctaggctgtcaggatcggtgatcttgaattgtttagggctgtcgccgacaaatttgtgagcacttttagtgctgacaggactcgcaatttgattgtgagattgcgccacaatgttattcgaaccggactgcgcaatattagcatttcatactcacggatctcccttgctgatattgccaagaagctaaggctcgactctgataatcctgttgctgatgcggagagcattgtagccaaggcaataagggatggcgcaattgatgccaccatagatcatgccaacggctggatggtgtcgaaagaaactggcgatgtctactcgacaaatgaaccacagattgcattcaactctcggattgcattttgcctcaacatgcacaatgaagctgtgaaagcaatgcggttccccccgaactctcacaaggaaaaggaaagtgcggagaagcgccgtgagaggctccaacaggaggaggagctggcaaaacacatggctgaggaagatgacgatgatttttagactggctggccacttctttggcactttgggctgccaaattgcaatgttgagttggttgatctgagagaccgtaacacacctatacatgccactcacaaatgatatttgagtcatgcaaaaaccctttgcttcatctgccggaaatttatgtcgatgagaaatttatgactccaaatgtgtctagttggataacttacttttaccttcaccttgtatcatggattcgagaatttcttttgtaccatgcgaaattcggctgcttcattcatgtattgtggttcatgtgtgcgcgtgcgctttatgcatcctgtacttatgtagtagtggtagtagtaattttgtcatgtttgatcgtgcgcgtctcttggtttttcttccaggaagtgacccaagaacgttaattttagttgaaacctaaaagctatattaaggagaagtcatgatggagtagaatattttgtgttgcccaaatctgtgaattgccgtggctgtaatgaatggttgagcaggtcactcaagcagatgttaattactgtgttctgtttagctgaatccatgcatggttatcaaagatacgttccaaaaaaaaaaagggtttatgcaaagaagtactctctccgttacactggagcaggtggcggcgcgagtttatttatgggccggggagaatagctcaccgcctcacccaaaggtggtggtaagctcgcgtatattgggatcgatacaagctagcagatggccggaattggagacgaggaagtatggagaagcatctagaagtggctagaatacgatcgaacgccagtgtggttggactttttctttctattgctgcgtagaagtattattaattcttccccacccagccagcctctgcaccgtagagatcgatagctagataattcccgacctcagtcgatcgatcacaacatgttgttggcttcaaattctgcagatactttagtcaaaaaataataataattctgcagatacctagcttgctgtaaagtttttctggtcgctaataactaattaatgatgatctcctccttccttgtagtctcctcctccatagttctgtgtatatatactccctacagttttatatattgtgcggtcactgcatggatgcatgcgtgggtcgtcattggactggacacgatacatgacagtatctataggatttaacatgtatatatagctaagctagtatatatatataggagtatatttatatactcatgatttattaattaattacattccgacagtatatgaatgtgtatgcatgtaggagtactaattaacaccttgtaattagctagccaaattaaagcgccgatccaggcgacacagcgagatcacgcgcatactacgtatttcgatctatatatgcaattatatatgcatcggaattagctagctgctagctacagtacactctataatcgtcctcacgtacgttcacaaaaaaatcacgtacgataaacaccaccgaagaagctgaagctcccaggggcgtcgatagatagatcatatcgcgcggtgtgtagctagatctcggtctcgatcatatcgatgcattcatccattatatattttcctttccttttgtttcccagcctgaccccatccatcgatcacttaatttggatcaacaaaattaagcaatgaactcaaatatggatcgatcaatcgctgtttcacatttgccctccatgccgaccgaattaaagtctttcaaagatttgcacacagtacgtgcttaattatatgcgtgcggtttgattattaaaagctagctagctatcatcagaatggatagatgcaaacccttgcatgatgttatcgtccaggggatcgcattgatcaacgtgttagatcattgatcgattaatttatttgtcctatacaaattacatatataggataagatcgatgatgaacaaaaaagttattatatataggtttttcattcctcttgtaaagaaaacaaacatgataatatttatagtaggacgattgattgattaaactcaaaacctctagtagtagtaacataatttacaactaagctacgctagcaattaatctaatcacgcccttaaatattacttactcaacaagctagtccctgcaaataacttatatttacaaacaagtccctccccggccggctactactactctacgccggcggccttggccttggccttccttccgccgccgatcggcgccgtggcggcgtagatctcggcgatcgggcggagcctccggttcctccgcggcctcccgcccacctcctgctcgtcgtcctcgtcgtccgcctcgcccaggccacccccacgccgcggcgcgttgctcacggagcgcggcgacgaggcggaggcggaggcggaggtgaaggagaaggacgacgaccgcggggacgagctgctctcgctcaggtggatcagctgctccgccgccgccagctccagcgccgtgaaccgctgctgctgcttcggcgacgacgacagagacatcaccaggctctccccgtccgcctccgcctccgcctccgccgccggcggcggtagcttccggcgccgggctagggatccctccatggctgattggatcgaggcggcggggcgtggatgggttggccgccggttaatttcgtgtgctctctctctctctctctaatttcttcctcgattttttttggttggtttattagtattattttttatttttgtgtgtgggtgtgggttaagatggaagaagaagggagttaatcggtcatgtggttgctgcgtgcggcgtgactcggcggaaaccgacttcgcctaggcgtgtaaaacagaaaaagtacggggggttttgtgaaaaatgtgattcttggttgggaacaaaagctgatgggaaattgcgtggccgtgatgagtctgcctgcgctggactcgatttttcctctcaggggggtatgtgagaaaatggctaggagtactaggttaacggagtgaaggagttgtgtgtaatttcggttttgtgcgggggagattagagtaatttgacggaggaggagaaagagttaaaaggtgggcatgagacacgtcatcacggcgcacctcacgtggctcctagttgccgccggttaattcatagaaaagtcaaagttgcagggcttagctagactgcatgcacgtaccagcttagctttgctttatactccgtagtatccagccatccaggtagggggtgtgttatgttaataatcacacggctaaattaaatcacaacaagtcgagagaaatgtaaattaaagtctgtacatggtcggtacgcgtgtagtgttcctgtactgtgttggcctctcgcgacctttaatttcagacctttaatttcaggcagctaatgcgtgcgtagctgcgtgttgtatgtatcatatatatgtaggtgattggatggatcagtacacaagccagtttgtatatctctgtcctaatataattaccgttaaaaactaatatttagaagaactattatagcgttctttatcaaattatgtatttaggggtgggatggaaaaaaggcacaattccaaagtaacaagcattttgaaacaaattttaaattctaaaataacatctattttcgaacgaaaagagtatatcacggtctcatgtattctcaatcatccaccctctaccttagcttagacatgatgacattcacccagccccatctctcaagattatttggagtgttggggagagattgatgtggctatacgatcgcggcagctaatattgctttactatatatacaacccatctactgctgcagccggctgcaaagcagcattacagcccattatgttccaaagatattattgaaaagctacatatttaactatatattctagaactacaaatatagtataaactttagcataaaattatgtatttaagcagacaattgcagaactacatatttacaactctatcagaacaatagtgctaagattttaatatccaaacttaaattttgggatagttttggtgaatgatacatcgtcttaaatctgttgtaataatttcaatagtttgactagagtatttttttagttttgtgatttactttcttttccatgatccaaatataattatagatatattgaaagttttgcaggcttgttcttttatctctactgtgaattagacagttcggatcaaacttttttcgatcgatccaaccaatggtgtacacagagaaccgaactagaacggaggctgacgatctagtcttgttcaacctgagtattattatgtaactgtggttagttcttacatctgtagcgacgatggcgtttgttctcctttttgtcggtcagagtacattttattttagctgtatgcgtgcgtttgaccgatcaacgcagctagctaaatcagttagttacgtacatgaagcttgattggtcattaagtaatcgatctgaaacatgtaacccttctgtcccaaaatccgaacataactaaagagggtaaagctaattgagaaatatttctgattggctaaaagtgaaattaaataagacatgataatagtaattagttgtgatcgataaataaattaaagtaaataaagttgctatactattttatatgagattttgaaagctaattaaattttgttaccgggacacgatatgatcgagcgatctctacacatatacgtgtcttaatttggtgcgaataacagcgtatgtttttgcgcgccgaccaagctttgccatgcttggttgcaggctgccgaaacgatggcgtcacccgttaggctagctatagcctagccacctctggaatcttccagaagcaagcaaccaaagcattcaattcgaaaaaataaacaaaaattcgatacatttcacaggcagcgtgtacaaaaaacctcttgcaagccgaccgatcgctgcgtgtcatcgattgtttgaaaaccaaaactcaaactttgtacaaattcttctttttctcggtccattccacgcgcaggtggcaaaaggagaaaactaaattaaccaaaaaaagtgaaagcaaacaccctacgagaagaaaatatttacagataggtccgtccatccatccgtgcgttcccgattcctctagcgcggctgcggctgcggctgcggctgcggctgcttcttcttccccatgtcctcctctctcttcttccgcttgccgccgccgtggttctccttcaccggcagcgtggcggcgtagagctccgacaggtggcggtacctcttcctgaccctcctatccagccccatgtcgtcgtcgtcgtccatcgccgccgacgcctcggcgttgttcaccgactgcagcgtggtggacgaggaggagtcgtagccatcgtcctcgcacccgccgccgctgacgctgagctgcacgagctggtccgccgccgccagatcggcctccgtgaagaagccgtcgcccaccgtcgtcccaccggcgccggccggcttcatctcctccacctccatctgatcaatatctgatgcgtcttcgcctcgatccagccgcgagctgatcgatcgatcgatggaacgatctctccgccgcgcgtatgggtgatggatgatgatgcggttggtgttgggaagaaaggaagaagatggaagcggaaaacagtagagctgcggggttgatttgcaaaaatatctccggattagccaaggccgaggtttatatagcgccttcgaggcggacccgcgaggaaaccgacttgggccgcacggtgccacgcctcgctgacgcgtgggcccggacgcccgtgacgtggagcccacatgtcggcctgcgagcgttggtgggccaacgggaggcggacgcgtgggtgggtggcgttggtgtcacgcgcgcggaggatggccgtcgcaaactcgcaagtcgaggatcgcgggacggtggggatcttctgcggacgaaatgtggctcctcggcttcgggccgggccgggctgcgctctcgataatgggccggagaggcctgtcatggcccaacactacttgtgctcacacgtcggcacggcccggccccatggagataggccactgtcagaaagcccgcatgttgtctcgatgtgatttgacgctagttcctttgactaaatgtctaataaattaaaattcgattcatatgatccttctagaatgatcgatccttcgaagacagtgctggggcacaaatgcatgcacgagcgtaccaccaacagccacacgccattgttaagctatgcgtgacttgagacttaattaaccacgactgttattattattatttttagtctaaggagagagaagctttattaatatctgaacaatggattacatttatgatctaacaagtctaaaatttttacgggagcacaaaacctccactctccataaatctagtactcattaccattttaaccacgactattattatgactctagcaaggtgataaatagcattcgtagcggctgctatagcggtaacgaacctctactgctaccgctacaaggtagtggactttatctagcgtattgaaacttagtgtctgctatagcgcttcacgaccttaatagcaacccattattaactttgttgaatcactatatataatgctaaacagtgttattcacatatggataaaataatttagcactgtgtgccttctttttcttatatatttatatgctatttcataatatttatgttattaaatgtagaagtaattaagcatgcagtttacattttaatttttaagtgaaacttgatgctaatattgatatacaatataaatttatggttatttttcttaatttcgttattggaacttaggtccacaataatacctactaacctgctatacgctatttattagatttcaccttgcactctagctactctcgctcgatcgggtgtagatgcgatgccgtactgtagaagcgcacggtaacgactgtctttaagtatatatatatactacatgatggagtagtatatggcggtcttaattactctggtaagcacacgtatattgggtagggactgtttcgcacacatgagtactactagtatgatttaagccactgaaggccattttggtttgatgccaaaacgtgccctaccaaattattggcattttgaatagtagtttggctagtgtttaatttgctaccaaaatataccaataagacacataagttgtcaaagtatttggtactaccaaaatttacctatgatttggcattgtcaatattttggtatggtaagggggtgttcccctctctcccaaacacccctaacaaaccaaacaagccactgaattttgattggaccgctccgatctaaccctgatgatgctgacaactctctgggcatgtctggctagcttgttgttaccttcaaccatagcgatccaaagtttcaaacattataccatctcaatcacatagtactaatctttttcacatgaatacatgatcactccgtacaaaaaattcggtagtaagatataaaatcaaacagcatatatgcctacactacatatacctctacggctctaccaaactgttttatatcaaacattgtcaaattaactttttggtgttggatggcattcccgctctcagcaaatgcacgtatcattgctgtctctctcttttttttctttggtcctcttttctcctatattggatggtacaatgcataacattgcgaacattgtcaggtagcgcggtttggttgttttggcttgactatagctaagctggaccctttttcgagaaaaagcgatggatcgtagggtaatatttttaattcaggccttatttagatccaaaaaattttggccaaaaacatcacatcaaatgtttggacatatgtatggggcattaaatgcgagaaaaaaaccaattgtatagtttgcatgtaaattgcgagacaaatcttttgagcctaattacgccatgatttgacaatgtgatgctatagtaactatttgctaatgacaaattaattaggcttagtaaattcgtctcgcagtttacaggcagaatctataatttattttgttattagtctacgtttcaaatgtatgtccgtatacttcaaaaactttacatccaaaaactaaacacatcctcagatgatcgatctagctctggccatttgcagtacggagttttctgcaacaattcaaggtataagtaaggccgtgtttagttttctcccttattcccgactttccatcatatcatatcaaatcaaaaattttcctacacacataaacttttaactttttttttcaaactcctaactttcttcaaatttctaacttttttcagaaactaaacgcaacctgtgtttagatggtgaaaaagttaggaagttagaagaaaaatggtagtttggagaaaaaaagatagtttatatgtgtaggaaagttttcaatgtgatgtgatgtgatagaaaattgggaatttgggagaactaaacacggcctaagaaagaaaaagaaaaaatcaggttgatgtcgtcacgttcgatggaacagaatacatgcatgatgcatgtgcagatgtgagatgtgctgaagtgctcgtccagtatatacaggatagattgcaagttgcgagaaaacaaacaacgaatctcagcaaaagtgatctgaaaacgttctcagtgaacatgaataaagctggccaaaactctctgttatgatcgatctccattgtctagagctttcacgttcacggatggatcgagttttgatgacgttcacggcacgaacaatatactccctccttcccgttttattggacgtttccgaccagttcaacaggattaaggaagcaatgaagttacgattttgcccttctttgttcatatctagtattccctttttaaaacatgtttgaccattcgtcttattcaaaaatttttgtgaaatgtgtaaaactatatgtatacataaaagtatatttaaaagtatatttaataataaattaaatgataggaaaaaaattaataattatttaaattttttgaataagacgaacggtcaaacattttttaaaaagtcaacggcgtcaaatattttggaatggagggagtacatactgctgctccgccggctcggcgacgaggcggccgtctgcctcgccgccttgatgccgcacgaggcctccagctcgtcgtctcgattttgtctttcatgtcgtctccccacgccgtcgccgccacacaagagcaggaacccatagcattgctgttgttgctgatccgaaatggtgctcgtgctgctgttgctgcgttctgatctgaacttgatgctgctgggtgctggtctgaaatattcagaaatcagcttctcctaatcttgaaaaaagtcggtcctcacatgaaaatgtgaaccataaaccattggcagggtagagataaaaaacccacaactacaaccaatgactgtattccaattacggctcagaaatcgaaatccacaactgcaaccaaggattgaattccaattacggctcagaaatcgattcttttgattcctcaaacacaaattcatcaatagaattaacactcaatctgagttgcttacctctctcgtgcatatcgtattctacacaagcaccatatggtgttcgtcgtcgggcaccggcctcgacgtccgccatgccgccgccggcggcggcgacgacttacggcaccgaggcagaggacgaggccatcgtcggcgagcagcgacatcatcacctcttcgatagcaagcagtagccggaggggacggcatgagggagttgtggatgcagccgtagggaagcgcatcccagctccatgctcgatctcccacggtgttggaggacaggggcaaagacggaatgcttcaattgatttggcttacggcgtcaaacattgtgacactaatttttttttgacttgcggcgtcaaataaaatgggaaggagggagtatataaccccctgtcacgttaaggcatgtacaaacaaagccatttctagagtaccttcactaattaaggatactttttggggcactcatctcccaatgaaagctacactaggtgaactcttcaaaatatgaggtaattgggtcaagatacttaaacccacaatggatgttccaaccaaaaagcccacggtgggtattttcctatactaccctcctccacccctagctcaccgacgtgtcgccaatctctccctatctctcgcgcgtcgccgatctcctcgccctcccaagccaccaccgccgcctccctcctcgccctccccaatcaccgccaccgcctccctcctcgccctccccagccaccgtcgtcgcctccctcctcgtcctccccagccaccgccgccgccgctaccagagctttgtcggcgagggcgatgaggagggctgtcgcaccaccgtcgactccgcctctctcctttcgcctgtcgttcgttgccgtcgactccacccctctcccttcgcccgtcgttcgtcgccgtcgctgctcgcccctcctctctctctctctctctctcttcctctccctcggcggcgagcgcaaggcgagggcagcggcggcgaggtgtcgtcttactcgggcggcggcggcggctcctccgccttgcaccgccaccggccggaggcgacagattcagcatcgtcctgggcggatctggcccccacacggccagatccggtttgagcggcgccggtcgcgccgcattgaggaggagatggtggcagtgacgggcgcgacgccggctgcggagacgtaggtactcgggcagcaatggcctctctctctttctctcgtcgtcgcctctctctctctctctctggcagccggcgagggtaagggggaaaacagggggagagagcggtgtccacaggctcctcccctagccacggccgacccagtgcggcttcttgcttggtcccccagccgaggagctcgtagagccacgtcccttgcagaggggtcgcggccctctgctgggagatggcttcgatggcaaaccccgacggcgtgagcagggacacgggctaggggtacgcattgaacatgcccttaatggaacacttttactaccgtaatcgtagatgtatgacagttttaataggattcattaattgtgttggtgcttgttaggttgtttgtttttattttaagatagtgtgtttttttgactctttatgtgtaaatgctaataagcgaatttgtataatactaattggctgtaactcgtttagtaaaggctaaaaatatattccattatctaaaaatttactaacggttttcataacaattaaaattaattgttctctacgcacataaataaaactgggaactacaacagcagttttaattagttccttacccaaaatatgatgtgcttgtgggaggcctttttttcaggcaggcaggcacactcccctccgcgcaaggataatagcaagtaagcttaatataaacttacggaaggagagagagaaaaaaaaaagcagggtgttggtttttatataagagctagctttatacgtccttcaaaacaaatatatatattaaatgcataagtgagagagagatgagaagaaaaattaattcaaaacaaatatattaaatgcataagtgagagagagtggagaagaaaaattaaagccaacattataactaatctattactacctccgtacatatatgtctgacgttggctagtataaatctgaactagccaacgtcatataaaaaaactagagagagtatatatattggctttaaaatggactagtagttctagtccttgctctcatattctccatgctgaggtagctagctagctagctaaacctacctacgagttctaatattcttgcagattaatctacgagtggagtaaatttcactccatagcccggccgacaacccccaacaaacttgcatgctgacaccgatcagaacgtcgccgacgacgtcggcttcttcgccgccgccgccgctgccgccgcctccgcctccgcctccgccgcggcggccttcagctgcacatctcatcaacacgtcgatctatgagcacacagagtctgacgacgaaggaaggaaggagacgatagggtagtacgtacctggtggcactggtggcgcagggcggcgttctcggcgcggaggaggcggacctcctgctcgagctcctgcaggtacgcctgcttccgcgcgcgcgaccgctccgccgactcgcggttcttcatcgcgcgcctcttccgccgctctacgccgccgccgccgcccagctgttgctggtgcagctccgcgcggtacagcagctcccgctccagcgacgccgacgccgccgctgcgctaccgccgccgatgcaggaggggtaggagcgggacgacggaagcccgtcctgaaacgacgccggcggcagcacgagctcgtcatcgtcgccgccgctaccagtaccagccgctcgctccatgctcgctggaagtggcaggtagcaagttggcaaaaatggcagatagcaagttgggctctctctcgctttgtattggccgcgcgttgctcgcgtgactttgaattggcctgtttcacactagctagctaccacatgcaagctgctttggaacatagcaatcacaagctaggtcgtgtggtcctttatatggtactccccgtcccattggaaagcaatctaatcattgtaaagcaatctaatagcggaaaaaatatatgcttgtactataaatctgaagggtagatatatttagattcgtgttacatctaatactagattcatatcacgttcgatcatagatctcaacgccaacaggactgacatggtgcttaagggccatatatttcaacggcaccaaaaggcctagcgttgatatcgggtgacgggtggttagctagcgtgcgcccaccacgttggctagctagccaactcgaacaatccgattaggtggcagctatcttagggcatttacaatatgagctacttctaaagtgttcttactaactgaggatacttgtaagggaactcagctcacaatggaggccacagctaagtgggttcttccaaactcgaagcaactgaatgaaaacactctatcccacagtgggtatcccaaccaaaaagccacatatattaatttcctctcctacccctgtcggcaacgcggctctcactcctccctctttcttgtcgcctttctctctgctctctcactccctcaacttgctctctgctctatccctctctctctctctctctctctcagcaaagcggacggcgagggcgcgcatgtcgcggcggtcgaggcagcggacagcgagcgtcgcgcgggtcgcgcgacgaggaggaccgccgccgctgccggagcttcgtcggtgagggcgacaaggagagccgcctactccactgcggatccgtcgcctccgccgcggatccatcgacgccgccgctcgccgctctctctctcttgtgggtccgcctcggcgccgtcccggtcccggtggtcgcgacgaagctcctctctccctcttcatcgtcgacgtccggcagagactctacctctgccaaggggtggaataggaatacgagctggggaaccgatgtccacaggagcccatcgcccccgccccccctccccccaatgcgtctcttggctacgttgcttggctaaaaagcggcaagagacgcgtccatcagccaggggacgcgctccatcgtagggagcagacgcggacggaaaagcgaacgcccgtcggtgaggggacgacctaggggttacccattgtagatggccttactcacgctaattaagatgatgaacatcaatgttattggggttggcattaagattaaatattcatataataagcggttttgatttctatagtcaaatatttttaagtttgatcaaatttacaaaatatatatatatataatttaataaaactaatttggtgttgtaaatgttgttaaatttttctacaaacttgatcaaataaaagaatttttattaggagaaaatgacttataatacggaatggagggagtgttaacttttgctaaggttcattttttttaagggttaatgtgtcaaaattttgggataggagtagtaatggctttcacaatgcgacagctcagttttccacatcaaagattccacgccatatcagcttctcccgttgccaactgaagaatctggagcctatttgagactcgcgttttttaatagctgaatttggtagtgctcttttccaaactttaattactcgtttattttaacaaaaaaaaactacaaatatttggaaagatatcaacaaagccgcgcaagtgcacttaggcgtaactaacagatcagattccgatcttcctcgatggaagtttagggtgtctgtttgagagaggtagaaagtagaaattgagaagatatgtacaatgagttgagctattaaccatgattgattaagtaataattagttcatacttaaattttgaattactatattttttaaaaacaactttctatagaactttttctaaaaaacacacactgtatagcggtttgaacaacgtacgtgcgaaaacaaggttttttttcctctttttgttgtaggaacaaaaacaaccttaatttaccatcaccttaaaaacatatctttctatgattgtctttgcatcttggattttttttaaaacacattataaatgcggacgcttacaacatgcttatactcttccctataaactcacatacttatatatacattacccatatgagcatctttggaaaattgtgctgatatatcttaagaccgacaaagttaacacgagtgcgtcgctatcgacgaatatgtcacctatcattgaaaaaataactagatgcaaatgcgaacacccatatcaaagtctaagatttcaatctaggtgagcagatttacacgataagaatcttaaccagtttatctcgcttactccgatgtgcattttggattcttggtacctaatcgatcgtcgatgtgatggtcatttggaataattaataattaattgtcagcgttacggataaggtatacctcatatcatacgacttatggaatatacgggtatggtatacctcctattctacgatttatggaatatacggatatggcatacctcccgtgaacgctgttggaatctgttacaaattatggaaaatatctccacgagtcaagtgatttcgaaagtcctgctcggtggggatagagtttccgttatatcgtataatatctgatgtctctgagtcttacttggatatcaagatgatccacggtataaaagggacccccagggaggggtgcaaggcatcgaatctcatcgccaacacacccaccatagtttacaaacccggagtatgcagagccaagtagccgggagatctcgtcgggtacatcgactatgatcttgtcggtatcgtcagtttcgtctacttcccttgtaatctgtggttcttccatatcaatcttatataaactgaactatggctattacctgatatggtggcctgaaccagtataatcactgccttttgtttgcttgatgtcgaattacgtagatcatcgttccaacgtaccccaataccctaatcatccggtctacgagtatcactcgtcaacattaataatctttgttttaaaatataaaaatctagcactgatccaatgtttagatttataatgctaggtagtttttttaatgtaagtattag

SEQ ID NO: 9805 - DNA, 3877 bp, Oryza sativa
aaaagagacatctgtgctaggatctgaaggacttaaaaattacttgtaatgttaatcaggagaaaacaagtactattgtattacagcaactgttgattgtgatacatccatattatgggctatggcagtgtagatcgtattaacagtaagtacaagaattgcatagcatagggcaaatcttttgaaataagatatgtagctataactgtgtaagaaattaaaattctatagaatcaggttttacaaattccatattatacatgagaacatgatcaatatgtggtagtcagccaaggctgaaaattaatacagtataacatcaattgagttataaacatttccattttgttggtttgttatgcagtacacgtgcattcaggattcagcagcaaaagagtgaaccaacatgcgccttgtaccacgctccagcaaagctaagacaggaacagaataaagatgatggtatacaacatcacagaaaagttttaacaagtttcgtataaacatacattgcatttccacaggtattgattcttcgtgaccatctgcctttgttatgttaggtctcatgaactcgacaatgtaagggccggagaccaccaactgtccatcacctacaatattcccctgtttttgtggggttcacctagcatacaaactctaggatagcgttctttgagacctgaaatttgaaattgctatatacttttgtacttaatttgctcccatggtgaaatattttttttcaagataaagaaagtttttattgatcttagacgattacataaaggtgatagaatcatattgagaacacttcacctctgtataactaagatgcgcaaaccaacatggtcaataattggttgcaaatataacgtattctgacataattaagcaagctggagaatttctataagtatatatgcacacatgatgcgtttattgagaacacttcacctctgtataactaagatgcgcaaaccaacatggtcaataattggttgtaaatataacgtattctgacataattaagcaagctggagaatttctataaatatatatgcacacatgatgcgtttaaatggaacagaaacattacaagttactgaccggcatgttaaatctataaatgatatgcttcatcaaattggcaacttatcaaatgtgcaaagcaaatgattccagaaagaaacaaatatattttaccatcactttaatgatcaatgccactacttctccccttgctacgatgctaagacgatgcgatcaggccataaagaggagacaaatcaatgtcactcgttgagccaataagcacattcaaattattcttatcaccttatactagtggtaataaagaagtagcaagcaggaataaaaaatatatttcatcataatatactagtggtaataaagcgatagcaagcaggaataaaaagatatttcattataagctagcctagctactcataaactaattgaggcagaaatttatttaaaacttattttcacctctcacctttcactagtgtgctctctacatgggaagagttgtaatttgactacgtataaatcttttttccattaaatactttttacgtccgaaattctagcattatgcagtccttgtctgcaggtgatgcaccctaattaaacctaatacatgagtgatcccgatttgtctgtgaatgatatgtccgtccacaattaagcctgcacatgatatgataaccctgaaagctcaatatatcataatcttaagcgtacgcgtctctcctgatgcaattatacttaactaactccctaatagctggctaggcttgatcacaattctctctttagtgagctatatagctggcaagcctggcatcacagcccaatctgcaggtgtgcctaccctttcaaaatgaaacgacagatgctattaaattcaggcgaataatctgtctcttatatgcatggattgtgcagcacagtagtgcattatcataaaagtgacagctcctgacgattttgcatttgttcgccacaatctttctgatgcgacataaaaatgtactaatttgctctcccaaacaaacagataaaactttcttgagacaacttattccatctgaataccactcctccatccatgaatcatagtgctagggtatatccaattctatactatattgctatattttagaaagtgctaggtatatccaattctatactatattgctatattttagaaccaagggagtacttcttttgttggctaaacctggttgcagctgcactgtaactgcagagacactactgtgtggtgtacactgtacagtgcacccgtggttcagtcactgaagttcagtggagcacccaacaactaacagtggctaaatctgtggatgatacaggtatagtgcaatagtaccatgttaaatctgcttagaaagttccaaaaggatttttttgggaccttttccactgaaatgttatcttactacgcggactaggctattagcctattagcactatctattttgaattcttgcgcccacaaaagttcgttaggaatttattcttctgagagtccaaaatcatatactccttccgtttctaaatatttgacaccgttgactttttagcacatgtttgaccgttcgtcttattcaaaacttttgtgaaatacgtaaaactatgtgtatacatataagtatattaaacaatgaatcaaatgatagaaaataataattacttaaattttttgaataagacgaacggccagacatatttaaaaaaatcaacggcgtcaaatatttagaaacggagggagtatatatatatatatatattgacaataatatttacggaactcaaaactatatgttctgtctggttcctgatttcacatttggctttctcccaaaagccgggtcaatagtaatgttgatctgcctctaaaaaaaaatgttttgtctagctactgccaaaattttgactgtcttttttatatcaggttgaaagtgaggttccgctcaaactgagtactcactacctgagtcttttatatcagcagctgcctgatattctccatcagatatcggagaaacccaagaagcgaggaaaacacaaaacgcaaaatcctgcacccaagtccggtggataatttgaaatccatacctgatgctcagattggatgaagaggcgatcatgcatacattcatccgcgccaccttgtgcagcctacagcaagcagatctttctatggcttcaaggtccggacagccaatgagcagccatggcgagcgtatgctgcctctgaacccagcacagtatctgcagcgcctgggccattcgatcgagctttccgctgctatgccgcggcttaccggcgaggccccccggagaaggacggagatttcccggagacttgggccggccaccggcgtggcaatccctcgaacaccttgggtgcgtgcagccgttgctgttgggaattgggactcagacgacgacacgccagtagggaatacagcggcggcgggctactgactactagtagtgtctccggctagcgcggcggccggcgggcccggcgccgacgacacctcgccggcggccggccggccaacgcccagggcgcatgcgcgagagagaagcaatttctttaatattttccttttttttatttttttttttgcacgcagcttgcattcccgtttatgggcttcctcggcccacataatgtgaggcccatgttcaatgaggtcgtcatgttgtggacctcatctcggcccatctcaaccacttactacccaagctactcgttagagacgaactggattggaaaaggtgtcttcgaagaatattggaaggaaccatgccagatttg

SEQ ID NO: 9806 - DNA, 8664 bp, Oryza sativa
tgataaccatataagacgaaactcaaaattcatggtaacttacagcatatagatctccacccgtgataatatctccaacacctgcagcataatgataataggagatgattttagagtgccttgcactgcatgctaaatgaaaaaggataacaaaaggtaacccccccccctcccccctgaagtatacaaaatactttacctagtttttctggcttaaaatgccacaaagcatctttgtcaagggcaggaactgagacaccacgcggaatgtacacatctccagatttaatagcaatagttttcagagggcgctgcaaacacgataggaaaaaggacatgacaagagttaacagacaaggagtgcaaggagcttaaaaaataaatgaaattactccacattcacaacttgaagtacctggatcccatcaaaaatgttcccaagaataccaggtcccaactcaaccgacaggggctgtgcaggcataacctttatgtgttaaaaacaagcaaaaacaagtacgcttgacagatcagtttaataaatgacaaaaaagcacctttcgtgttctcaaaacagggtcgttaaccatcagtccagcagtttcctcataaactgtgatacacaaataacaacatttctgatgttagatattgactatggtttcaacaggcatataattgctatcagaactcgtgtctgtatgctgttaaagatagaaactaaagagctgttccacaccttgaattgtagctgaatccccctcaagaccaataatttctccaataagattatcgtgcccaacacggaccagttcatacatggcagcacctcccattccatcagccacaaccacaggtccagagacctaaaacaacccattcgatcaataatgttcatcaacacaatgaaattaagagctaaacatgccatcatacaaaagaaaaagggcaattactagtgcgcatataactaggaagcagatcttagcataagatgacatctaaatattctaccagacagatacgatagcactgagttcataataggatctacgattccaacacataagtatgagaaaactcagtttagcattaacaaacactaaatctagcataaacctatctagaaatacatgagtgacgcaattcattgttgagtggcacggtcagttgaactatggcatttttggaatgatgtgtattgtttctaaatagatactccatccatcccaaaatataacaccgagtactgcgattctagacagatctcctactaggtgatgccaaatcttgtactaggttgttatattttagaacaaggggagtagcaaattcgatgaaattaagcagagagtgagagtgcacactattcgtccagggttcatcattcaatccataatccgggagaggaatagaagccagtgtatcttctagtggttcttaaattacaacaaacgaacaactttatttttacatccaaccacgctaatagcaatgccatccatcagtcaaattgtcaaaacacatctgagcaccgctctagtcacgagttcacagtaaaacctaaactattagcgatacccctgcaacaaaagatcatatcattatatgatggcgtggtacggactggcgatcagaacaccacaccacatgcgaatctcaagcagagccgcgcagcaacacggactctccgcaaaaccccacccgaccaagcgagctagccaccaatgccagactggatccgaaggccctatctagccacccgcccgcgacagatccccaaagcaatccgcgccatcaccaccaccaccccatcccatcctaaccaaatctcggcgccaattcagccccgatccgaccacgcccccgccgccacagagcccgcgccccgtcgggatcgcgcggaacgagcacggtgggatctacattggaagcaatgcgagcagaggagtatagcggagagggggggaggagggggggtgacggaccttgcggacgtagccgtactcgctctccttctcggagtcctcgaaggtggtgatgcggtcgccgaacgccatggccgccggcggcgaggacgagggcggcggcggtggtggtcgtcgtcgccgaccttcggatcggcggtggcggtgtcgcgatctggtcggggagggaaggggagggagcgatttgggcggggcgggggtgaggtggatcctgccttaaatagatgtcgtcgtgtttttttttgtttttctttttgtttcggatctgattatattttggtgctgctagtaattgggttcgtctcgagctctgattggaggacgcctcttcttttctgatacggttgcgagcgctgcgtctcgtgttggtttaggacgctgacatgtgggccggtgggtcatagaatctgtggccttttttaagtgcacagcattgtggcctttcgagatgtgaaaagacatctaagaacatctccagcagtaacccctactttagagctcctaaagatcaaatgggggctgccaccaattctttatgactctaaaaatagcattaactctagcagtagccccctatattttagcccctatttctttttctcttttattttagtataaattgtatgtttgtgtctaccttaacaccataataatttaaacataaataattctagcgcatgaaattcaaccatattgaaatttacaattttaaacaccatgattcaaatttgaattcaaattttttaacatgagaatgacatgtcctacaagaaaatattgaacacgacccatagttgacaaaaaatgcaacgaaacaaactatcgagcaccatgaagcgcccacaaatgttccataagaaaatttaatttccactatctcaaataacaaactagacaattatattcataataatcaaagcctataaaaagaagtgctacatactaaccgataactctactgatccatagcaacgacagttcagtgcagtgctactagtacaagcacagtgtttgagattcttctctaccaccgaagaagtctactactcctacagttctaaaaaatatataaaacaaatcaatatccagcacaaaaagtggtcaagtataatactactacttctctgctagtagtactcctaccacacagattagatcaatccagaaaactctagggggcaaagggcggcgagcagagggcggcgtgtgggctggcttggagtagtggccctccggcagtgcgcaggcggcggccctccatccggtgggccaatggggcagcgtgggggcgggcagccgttggctctcctgccggcgagcggatagcggcatacgggtggacagcggtagggacgatggctctgcagcgggaggaccatggctgtgcggggtggtgtgtggatagcaacgtgcagaccgacggcgggaggtcgtgcgacaccatgtggacggcggactcgtgagggcggcggccggagacccttgcggatgatgggcgacagaggtaggggaaattctcacctttttgtgccaatcttgccggaggtgcaggggaatcgatggccgccggcgctggagcccagatgagatccagcgtcgcggtgccgcgcaggaatgtgatgagagcacgaaagtgaattgtcgtttgggaccagaaaaatgtcaatgggggctgtgctcggagccccaggactaggggcttgggggtggatctgagggcctcctcattttgggggctgggtttagggtctctgctggatctagtttttttatgttaaccctcaaaatttgtttagggactgggtttaaggtccctgctggagatgctcataagagcttgtaatcttgatttacaataacagtgatactattagatgagtttttacatgtcaggttagtaagtagtagcggttttttcctgtataatattgtgtgaagcaattttttaaaataaattgaattgaatttgatatacaactctgaagttgtcatagacacatagttgtaagtattcagaatataatctgttgtgatgtccaaatgttagtttctgttccgtaaatacatttgtaattagcatacaatatgttcattaaaagtattgctaaatatgatatatataaatcttatagtttatatttccataaatataaaacatgttagggtcaaatactaaaatgtctgaagaaacctgaagcgaatctggttaaaggcaaacatgtggtttgtgcgaaggtgaagaaagtgcataggacagtcaatccccaagatgatgttctgcacggatggaagccgccagatcagggactgatgaagttgaacattgatggttcttttcaacctgatacagggaaaggcggcctgggtgtggtgctccgaaatagactaggagaagtcatctttgcagcttgtggttacatccaacggtgcacaggtgctctagaagcggaactgatggcgtgtcgggagggattacttatggctctccaatggacactgctaccgatcatcatagaaactgattggcaggagatgctgaatgtgctccagtccaaggagttggtccgatcggagttgatgtttttagtcaaggaggtgcacgacctcatgatgggaaacagggttgttagtcttgctaaggtgcataggaatcaaaaccgtattagtcatgttttagctaataaaggccgagtggaggaacttactcacttctggccagacaatagctgtaatgctatcgcacaactagtttgtgtcgatgctttgattgaataaagtgatccctgtttcctcgcaaaaaaaaaactaaaatgtcaaattttaccaatcaatatacgttctaattacaattgatgaaaaaatattcatgccttcccctatatagtatttagggagtgtctagatttattaaccgcccggaatttaaaattttccgtttgcttttcataggtatcacatctctccgctgttacctaaccccttgaacaaagcccattctttcaaagataaatggttgaacaatgaattgttctaacctaaacaggacaaactcacaattcatgcaaaattagaaaatccatgtaaaactattcaaatttgtacaaaaaaataaaaccatatatgacaacaaaaatgcagttaaatccacttttctcctttagaggggattgaatttcaggtggagatataagtttcggcagctaacgtggatttggtatttcagatttggcattaggtgcattatattccaccatgcatcttttgtacacacaactttttttattcaaactgatgctttaaattcagataacttgttgtttgttagtcaatatgctaccggcccgtttgatttagattatttatacggattatctatttgattatagggataaattaatttttttaaaaaaatgttaatatttttaaaaagaagttatgtaaataataaagaagaaaagaattttgagcaaccatatttttaaagtgtggagcaaataatctatttcaataatccgatgaataaattaagaagggcagcataaactatcaagtttattcagtcgtcgcaaattaccttgttcaaacgaacatttaaactcaaccttttagcagcgtcggagctagctcccgagctggtcgggtagtcgtccgagctccgcggttggcattttcgttatattctaacattaataccacacataaaatattattgattgctagctactccatctatttcaggttataagtcattttaactctgattaaagtcaaactaatttaagtttgacaaaatttatagactaatatagtaatatttacaatactaaattagttttatcaaatcagttatcgaatatattttcatataaatttgtcttaggttaaaaatgttactatttttttctacaaacttaaccaaacttaaagcagacttataacctaaaacggaacggcggaacgagtaatactcttcgtagttcaggcatcagagtaaatacttgcaagttcgattacctgcacaaacattcagcctaaatggtaaatgcctcagtatgaattgttttttatttttaattgagttaaagtgggtcaatggtagactctcctccatgcatcgagacctttttacctgtctcggtcgtatccatttcttccttgtgcaagatcctttgcgaacttcaatttcattagtttttccctaacttacaacagaagttcagaataatatgaatcaccactgcctttgttcatcttgcaaagccacaaaaggatcccttggtataagcaagcaccttcagttacctcatccaagaaattaaatgttctttccttgcagagaccacacacacacacacacacacacagatatatatatatatatatatatatatatatatatatatatatcccctatctgattcgtgttcatcacacatatggataaaaagcaccccggttcatctgaatttcgaagatcaaattaaaaatggggtgctcgtcgtcgaagaaggtggaggaggaggcggccgtgaagacgtgccatgaccggaggagcttcgtgaagaaggcgatcgcgcagaggaacctgctcgcctcctcccatgtcgcctacgcccactccctccgccgcgtctcgctcgccctcttctactgcctcgccgaggacgagcacctctacttcctccaggacacggcggcgtcgtcggcggcgccgtgccggcaccggccgtgctcgccggagaggaaggttcttgtcatgaactggctgagaccagacgccggcggcgtcggcggcggcgcgccggtgcacccggtggtggaggtggagcagcggtgggaggagaatgatgttgccgccgagaccgtcacggtggacgggttcttcggcgcggatcccggccagctcttccacccttcgtcgtacgctccggtgaatgccatgccggcctcgccgccgccgccgcagccgacaacgacatgggacttcgtctcttgggaccctttctcctcgctccatcacgatcaccaacaatacgtgagctatggcgttgaagatgacgaagagaggaggaggagaagcgatgacgaagatgacgagcagatgccggagctggaagaagaaagcgacgacgccgccgacgacgacgacggcgacggcgatgtcaagctgcaggcggaagcttcgccggcggctgtggagcggccgatggcggaggaggaggaggaagagaagacggtggatcgcgtgaagaacgaactgagggttgtggcgagcgaggagatcgagcagcagagcacgccggggttcaccgtgtacgtggaccggccaccggcgagcatggcggaggccatgagggacatccagggccacttcgtgaagatcgtcgacaccgccaaccacgtctccgtcctcctcgaggtcgtcccctaccagaggaaaggtacacgcacgccattacagcctcttgtagttaatctctcgcaaacaatgtcttcctcttcaggaaggtttttaagtactcgatgaacaatgtctcgcatctaaactaaatagttatagaataattctaaaaattttaacaaaatagattgatgtattacactttacaaatatacaagttaaaattcaacttttacgagttataacaaaaataacaaattaaactgcaaatatagttatatataaatagagaaatatcaagtgaaaaccatcaaataaatgaaaacctgtgaaaaccatatctaaatttttgtaaattcatgaaaaaattactagagatagggacatgcatgaattacattcataccaaatatcacaaatttcgggtgaatactgttatgttactattcacacgaaatttgtcttttttttctctcaaatgaagttgagtttggacttaagatttggtatgaatgtatttcattcctgtaccaatctctagtaattttttcatgaatttataaaacttttaaatatggtttccacgggttttacttatttgatagttttgaccgaatatgtcccctatataaatataggtatactcaatttgttatttttttataacttgtaaaagttaaatttaagcttatataagtgatatattacatataaatatattttgttatttttttaaaaaataaccatttaattaacagagaagaaatattagaatccattccttcctcttcttcttctccatcattgatcattgatgtcttgtagacagtccgaccagctgctccgagcgacggtgatgacgaggaaggcggcggcgaggtctcgccggagccattcgagctcttcaagagccacaaggagagcctcgataggctctacgagtgggagaagaggctctacgaggaagtcaaggtagagaccccgatatcttccaaactctgacgtcatcgtcttcgtgtagctccgagcttttcatttcgttttccatggcggtggtggtgaaggcaggggagcgggtgaggctgtcgtacgagaggaagtgcgcgctgctgcggagccaggaccccaatggcgccgagccgtccgccatcgagaggaccagggcccccatgagagacctcccgaccaagctcgacatctccatcacctccgtcgaccccgtctccaagcggatcgccgccgtccgcgacgacgagctcctcccccagctcgccc

SEQ ID NO: 9807 - DNA, 64164 bp, Oryza sativa
  unsure (1)..(64164): unsure at all n locations
cgaggggggtaatttgtccggtttgtatagttgagggtgaagaatgcccggttttgtggttcgggggggtaattcagacgaccgcgatagtttaggggggtaattcgtactttttcctttagaataaatgttagaggctagaagttgttatattttgggacgaagggagtattactacttagcaaagaagaagcagtaatatggtacgtatctataattctctgcatgatatggtatggtaatacaacatatatatgtccgataatgttaatattgattatatccattatagataccaagcattaagggtgttgcacctaagactaattttagaagacatgaaaattatgagcatggtaattgattaggtggctagtccgggaaaaattgaaagtgatcctggaaatgatatataaacgctatctaatcttatatgaaacttcttggttcgtatcctagcttatctctcaagttctttttgacaggggcatctagaagtataaaatacaagacctctcagaagaaattaagacatcataatctcaatatgatatggtataataatttgtatgagtcataagccgcattgaatcaacttctgaaagatcctcaagagctagctgagctaggcctcgaccatatcgtctagatctagtgtcactgacgacatatagcttagggttttcaccttataccatatactcgttcctgtactcgcctagattcatatgtccacaacatacaaacagctagttttgcaaaattaattaatttactcagattaacagttttttcttctgtttgatccacacaatattaattgtctagtgtgaccacactgcctactgcctccgatgagatcattagaggatcgagcagcagggaaatctgcagctagctcgatctgcaatatcaactggtagctatctgggagtatatcgttggcgcatatgcatcacgcatgcttatcaagccgcatgcaccgcgtgcgtgaaccaggggagaatgatcatgtctcccacctgtatgtttctctccttacatcgtgtgcaaaacttcatttaaaaaaagtactccatccgtcccaaaatataaaaacctagagtcggatgagacattttctagtgttacgaatctggacataccacatgtctagattcatacctgcggtcctgttcttttctccaacaagagttggatgaagattaagattttcgtggcacgtttttcgaactgctaaaggtacgtttcgtgcgaaaactttctatatgaaagttgctctaaaatatcatattaatctatttttcaagtttgtaataattaaaactcaatcaattatacgttaatattacgtcgttttgcgtaaaaaacttaatcttcatcttcatcttcattttcaggagaaatgaacacgagtattaccaccatttgtcaataaaagttatcgtatttgcttagcattaggtgatcaaaatctttatcacacgtaacttatcaagtctgagagaatctttccacacttttttttaagtcatgacgcgtgaaacctagctaatttattggaaggaaatctctccacaactacgtctgaaccaagtaactcttaagttgatcaagcttatctaacccataagcatgacaaactgtaacaaaatgtggctaccagccagacaactcctaaatataaatatttctagtttggttagcaaagattaatgataaggagaaccagtcacctcattaatattagtccctcctaacacttgattggctgaaaataattcgatttcatgcaatgtacttatatagtgtgtatataatttaaataatagaaatgcttgtatttgggagtggagggaggtacatagttggaaatattttgatgatatgcaatgtgcagcaagtgcagtacaaacatcacatgcaatggcattactgttcactggagagtatcctaaattccagagggggaaagatttgacagcacaaagagggtatttaagtgtgggcaggcaattactgcctaaccaatttactgttacatgcgtagtatgcatgtcgacgggaggagaggacagaggattgtggtagagctgctgctcactattatatggctgtgtgtttagatataaagtttggatctaaacttcagttatttttcatcacatcaatctgtcatacacacacaacttttcggtcacatcatttctaatttcaaccaaaatccaaactttgcgttgaactaaacacagcctatgtgtagtattcacaagtgctattcctatacctagctattactccatgtagctagctagggagcttgagtaggagtatgaagtaaggaacccacataataattaatagccgtttgtggtttttaaaattaattaatgctactaattaattgaacttgtttcagtcgtaacagtaatctccaccaaaacaatccttttattattttcaagtaaagagtgttttgatatatacatatttcccaatttcaattttgcattgtgcattctagaaattaaaacagaggtttaaagtgagaacaataatgaaaaccgtatcaacttattgggcacgaaagctcttttttctccaccgagaaaactaagtattcttcacttaaaatcgtgttctgcactgtaatttctaaatgtttttccataaactaatttatttttaataaataaataaaaatttagtggtgtagaattcgtggaatgctcagatcacttatgctacaactcgatcctaccccctcatgtcttaagcgttgaataaaagtgtttacaactttttatttaattgaacctaagacaagatttaaattcgagacatttggttctgatacctattaaatcgcctacatttatataagggttaattgaatttataccattataaatttgccatttttaataaatgtcattactatattcatcgatgtgtatccatgcctcctaaatatgtacaaaattagaacataccatcacatcatattttctgtcatcatatagaccaaaatatctctagatgtgggaccgacatgtcagttcaattttcttccttcatcgtcccctctcctctcttccccatctcgttgagctagatgcggtgggcggcgagaagggcactgatgagggaggcgaatggggaggtggcagccagcgcggtggcgcaagtgctggctccaattcacacgtagaacatctacgccgtccagctgccaacacgtggccatctcggtgcagtacagggagtgggagccagctcctgcaccgacttcacggcgacggggacaaccaccacacgaccgactccctatgtaggcaatgacggggcgatggcgtaggcatactactgctatggccggccttcccgtgtccccacgcctcacggtcaccggcgtgtggggcggcgatagcgtcagcgccgctgctgtggccggcctccccgcgtcctcacgcctcaccatcaccgacgtgtggggtggcaatggcgttagcccgctgctatggcctatggccggctagcaggagggaagggagagagggaggaggagaagaagaaattggggatgaggacggaaaatatgatggtgatgatgatcgtaatcctattctaatgacatggatataaatagataaataataatggcatttatctaaaatgacatatttagcatagattcaatttaatcctttatataattaagcaccaatgagtttaatcaaaagcttaatacgatgaactaaaagttgaagaggtaatgacagacgattcacttgctctgacgctctcgatcgatcgttctttttcttatttatttttcaaattaaagaggactacatagctagaagcaagtatgcaacagctaactaaatatcgtgcacattacgtggatcttgctttagctagggatcatatctgtagctgcgtcattaatgtatttgatacgaaattacgccgctgtcgatcgatgcgaaggagttaattaatgtgcgcgaggtacacttgtacgtttacgcatggataccgacgcccacaaaacgcctgcgaattcactaccagagcttgtgaagctgccgtgtgcctcaccctgttaccgggagtttttgctagtactcggtgacttaccgagagtagcacgttgcacccggtaacattgcaaacataccgtgtgttagcgacgaaaaaaactcgggaagacaaaaatacgctatgccatgccaaaccgctcggtaaccatgggacccaccgtttctaccgtggcttggcgcagattttttttttgcttggcgggcggtgatttccgttggcgtaggtggatggcgcgcggtgtttttttttggcacggggtgtgttttttttttacgacgcgtgaaatttccattggcggggccggggtggacggcgcgtgaaatttctttggcgcccgatgatttccgttggcgcgagcggatgacgcgccacgatttttggctgcacagtaaattttcgagtgggccagtaaaaagttggcccaaatagcaccacaaaaccctacccctgaactgctcccccttctcttctccagtctccccctccgccgccgcctcgctctcctctcatcgcctcctcacatttcccctctccgccggccttgtcgcaggcagccatcccagccatgcgaccgcgcgtccctatcctcatcccttcacacgggcggcgagcacggccctgcacgtccacgtccatccattgcgatttatacgccattgtctatccgttcaacaaggctcccaatcatcatcgagctaggcattgaggcctgctgcaactgcttcctcccaatctgtgtggtatgcgtatgttgagtggttcttgcatctttatgcaaatatggttcttgattttggaaaaatacacttcattttctctttggatctagtaatatggtgacatcctaatgggcgctatgctgcatctagatccacgacgccgtgacgtgccccatccagttggaggctgcagctggtgccgtgcatcccctttcctcccggagggacgcaacatttttcaggttgtactgatttctctatgtgcctgcaattttaatttatatgagagatgctctgagcgacacaactagcagcacaggaatgctgcggcggcagcagtcgcgaggcttgccgactggctcagggagttgatgtgagcagagcaaagagaaagaatgcacaactctggtttcttaacagcaaagaaggatgtaattcttttccacttttattttctgttgcttaatctttggttaagtgtttccccggtcgccaagtttagaaattgtggttagaaatttcttgttctttagtgcacatatgtacttcaattatcacaagtgaagttctgaattctagctcatcctatttcttagttaatactcaattattatttctctgtcatcaaaagaacacagttgagataatttgcaactaaaaaaatattattacaaaaaaaagaatagtttatttttcacccatatcagaggcttacattctagatgaaatcttaaatttcacatccatatactttggcctagtttagttcccaactttttcttcaaacttccaacttttccatcacatcgaaactttccttcacacataaacttccaacttttttcttcaaacttccaattttagtcaaacttccaatcctttgttgattgagtgcggacaatgcataatcatgtcccttgatacaaatgtcactgcttagcctactggtggctgtagaccatgcatatcctcatatcatattaggaaatctagctagcttcagttctgaaactctagaatagtaatgcaaaccaattaattacttgataactttagttctgaaactcaatatttccataataaacagtgccttggtcaagaacttgacaatgattttgagaaggttgccattagcaggaatactgaagaaatttgcaatgacaaggacttgaaaattctcaatgaatcatctgttcaacatgatgacaatgactgcaaaatcctactgttctaattcatccatagaaatatcttgtttgacgaatatttctaaggtacacacttcacttagttggagatcacaatgcaaaattgttgtaacctgcctcccaagtcccaaatgaaaatttattttgtgaactacccacaaatagtgacctctaaataatctagttgtgttgtaatcttatttggcactaaacatgtttttttataatttcaggcatataacaatcatggcaaaacactaaagagttgatctgtgatgtcaatgaacacatttggttagtcggccactagcatttgtctatatattgcctcattgggagaggttgtaagaattgagaatcatatattctactgcatcatgtgcagtgagtttgtagattcattaatattttgttattgtaccatgatgttcctattaatactgggagaatttgcagctaatgtccacatgacatgttcctgtgatgtatccttgcgctctgcttttcatgtttgcctattgctgcgtttcagtgttgtacgataatgaatttatgaaatttctagaatcacgtattcaatattacctagtgttaatagctctcggtaagttatctaacggtaccgtgtgtttgactacaacacacggtaacattttattccttcccgtgagttagtacctctcggtaacacccccgttccgtttccgcaacccatcctgtgccggacaatacattgttaccgagaaagtgctttcacccggtaatttttcttgtcataccgagtgtacaagcgtagtctcacgggaaatattgcacggtaaaggtgtcaggccgctgagtgtctgctctcgggaagctctgttcccgtgttttttcgctgtgttaccgagagcttttggcacacagtagcttccctctccctggtagtgaagttgcaatgcgtttatgcttccctattcgagctgtgtttaggctgtgtttagtttctaaaattggggagaagtttagaaaagttgatagtttggaaaaaaagttgggagtttatgtgtgtaggaaaattttggatgtgatgtgatgtgatgtaatggaaagttgggagttgggggaaagtttggtgtgaaataaacagagccttagttcacgtcaaaattgaaagtttgattgaaattggaatgatgcgatggaaaagtttgaaggttatatgttgtggacccccgtttttataacaggaatcaatcgtgtaaacagtatcatttccctagatcaagtagtctggtacgcacgaactcatagctgaaatatcaagtgcacatacacgagagtctagtacgaattattacatcataagcccgcaggcacagtcttaaatcatcggaccgagcggttcggaatacattccaaaaacagaagtaggtaaggcagcggagttaaagcagcggcacgccattgccacaggcaacgaccgtaactaagacctactgagtgccatcgtcttcatctccctcctagtagtaggcatagggatcctccgaagcttcatctcccgcttttgattaattttatatttgcaagggtgagtaccaaccgtactcagcaagacaccacagcaatgatgcacatgacagaggaattcaaaggatggctatggttcttttgcgcaaagcaagttttgtaattcttttcacaagcctaagacctagcatagactgatcaagttttaataccagtgttcatattaaacaatgacggttctgtccaccatccattgtgatcccaaggatagcttcccaccattgagtcgttatggttttctcaggacgtccacattcccgcctctcaggaagtggctccatcagcataaaaatcatcatgcaatatcccatcccacacaagttaaaggatttagagtctagccaagtgtaatacatgtcccggtgctcaataaccgcgagcatggctattcgaatagatttggttttactcacactgcagtggatgtacactttacccgcactccgcgactgcccaacacatgagcctcgtcccaacacatgagacgcgccacggcaaagccttttgataacctcgcattggcagtacccgctccatgaacttaaattctcatgcactctaggcgtccatgtttctagcagtgagaggagttctggcgctcccgggaaagagaagtctcacacacatattaaattatggctcaagttaagttctctctctcacacactcatggcagtcctaccaatggcgacaccgatgtagggcacgcctctcggccctacctcaacggctatcccaccgtagcgcacctgcctcactcaggggtgaaccatctatgcagggatactgcctccgctcggctatctactccgctaggtctatacccatacgagaagtacggttgtacgagggtcgtttcatgcttaacttcatggctcggtccttaattgaccggggacggtactagccttttccagataccacccaaatcctccgtccgccccagtcgaaaacagttatttagtttatttctcctttcacaaatcatgtcctcaatatcatggcaatgtggcgctcatgtctccacatgccgcatctcaattaccttcccaaagataattgcccaagcatatagcatttgacaaatatgagtatgcatgattctagaatagcatttctaagcatttttcatagttgactagggactcatacgtaaacatggttacgaaggaataaggggcaaacaataatcaaggcatggcataatcacaagtaggatgttcatcattgcatgcaattttatttgtaaacaaaacaatttcgcaattgggatcaacatgttcaaggaatagtgatgacttgccttgctcaaagtcttgcgggtcttggccttcacttggatccgcaactccctcgggctctatagttacgtgcgaaaattgatttgaattcggttagaattcaaataaaaatccaaataaatccaaatggaagtcgaacgcgtaagtcgattcttttatattaactttactattcgcgaactagggcaaacccaatttcgatttttatatcctaaactattttgcgggtataaatattttgttatcataagtttttaatttaatctacccgagcattatatccatataataggttggaaatttctatcgcaagctaaatatcggacggaatcctaaaattatcttataatattatacgatttaatttttgtctaggactaaacgactaaatataatatacgtctaaaatttctagtgattaaatccgaatttctaacgtgaatcaattacttatagagattacccaaaataatctataatagtctataagaattcatctaatcgtttagttcttaattacatttaaactactaccgcgaattgatttcctgtagaaattacctagaataatctataatttatattaaatttcttaattctacgtctataactagtctataaccaaatgctaattattttaaattttctaaacttccctaatctccctctaatttcctatctatttcccttttctttttcttcccttctttttcttttttccttcctttctttttctttttttttctttctctctctcttttcttttctttttccttctctctctcccttttcttttctttttccttctccctctccctcccggtttctctcctccttccttcgactttctctccctcggtttctccctctctctctctctctctctctcggctctctgctacccggggcggcgacggcggccgagcaagtggaggaagcggcggcttaccgacggcggtggcggcaacggcggcgacggcgacggtggcgacgtcnacgcaaggtgtggcgcggcgcggcggcttcgtggcggcggcgcggaggctctatgcgatggcgaggcggcgtggaggcggcggcgtggtggcgtggtaaaggagaggaggtgaggatgaaagggaagagtgggagtaggggggcttatataagggagggggagagagataatggggaagaggggagaggggcggtggcctcatggcgtcgacggggtggcgcggcgcagggctcgacacggcgatgtgacgaccacgcggcgcggtagggcgcagggcgcgaggagaagcaacagcgcggcagcagcgacggcacggggctcgagggcgcggcgcggcaggtgatgcaacgcgcgatgccgatggcgcggcagcggcgacgcgacggccgaacggcgatggcgcgcggcgatggaacgggtggcgcggcgcggtaacagcggcggcacggggctcgggggagcggcgcggcacggggcgcgaggcgacgacggcgacggctcggcggtagcggcggtgcgcggcgcaaggcgatggaacggcggcgcggcgacgcgacggaaacgacggcgacggcagcacggggttaggggcggccaggcgcggtgatggcgacggcgtcggcagaggggaggcggatcagcgcgcggcgcggggggcgcgagggcaacgcggcaaaggaggggctagggctaggggacctcgtcgaacactttaggtgcaatgaacagtgccgttttctaattaacccgatgttggcccatttattatttaaatttgattctttaattcccaaattttgcataaatgaagtatactcaatatttgtgccattctaatccatggattcattctagattaatttattccatgttttatatattattattgtaatttacttgaacttaattagagttaattctcattccattgcttttaaatttgatggatataaatatggtcgtaataatattttactcatttctatcctcaccaaatcttattttaaattgcactttaattatttactttgtccatttaccttttagggtttattcttaaccaattatccattattcgcgatttataaactccgaacccaaactccaataaaataatcgaataaaatcggcatgatgcaatttatttaaaaagtttttgaaaatccgcatttttagagtttagatttttgttgtcgaattttcagggtattacatatgtgtaggaaagttttgatgtgatggaaaagttgtaagtttgaagaaatattttgaactaaacacggcgtcgattcgatttcatatgcaaaacgcaacgcacgcacgctagcttagctctagctacatgtgctactatagccacacaagtacgtgccatttaattacgcgcccaattcgatcgggatcatcatttcattaagacggggagtcttgtcgtcgcgtcgtacagtgtaaactaatgagggggggctgtacgtactactgttaattcgatcgatcaatggcagggtaacttggttaattaattctccccatgtcaatttattggtgctttgcatgtacacatatcggtctcttgccctgttgcatgccaatcgttatcattgttacacttaatgtatctctgaagaatcatcggttcatctaggacagtcctagggcaagccactgtgggtgggtttataagatcatgtggttaccacatggttatcgtggttatctcgtgcggtaatcttttcggtttttgaaatcttacagttttttaagttaagttcatggatttgacggtaactatgcggttactgcgttaaccgtgatacaaccgggtagaaggtaaccctcaccaaaagggtaagaaattaaatacatattgtctataagcatcattctattcgagattcgaccaactcaaactattgtatgtgtccaaatatacttctcaactccaaaattgagtattgagtacctctcgccggttccaaatcaagatagttaaaaccctatatggtgcttgtgtggtggtagttcagtcatccaaaaaccacccccaaatatcgggaaattattctaatccctcgaggggatattccctcgtttccttaaaaaccatttaaacggttataaaaaattctggaaaaatttgacaacattcatatatacaactacacaaaatcttaagttcaaactcaactcacacatcgagatataaaaaagagaaattcagcgtatgaatagtagcgtactgtttatatctaaatttatctttttttgtttctcgatgtgtaggtcgaatttgaacttgaattttggtggagtagtaggtatcattatactccacattatcaatttttttcagaatttttcactactatttgcatcgaatttggaagaaaaaggtatacgaggggatatcccctcgagggattagaatccattcccctaaatatctcccccccccccctaccaaaaaaaaataccgaattaattctaaaatcaagttctaaataccctcacaagtcaagttctaaaatttaaaattaattgattatggtttataagccaaaacacaaatgggcaagacaagtagttattactataagcttactgctacatggcatatataactcccagtattcaatatctgctgatgtcctggaattaattgcacaatcacataggcaaaagagctggtgttggcacatgattaatattattttatacacacaaaatataatattttttccatgtaattatttcaaagcctagttttgcataaaatggcacataaaatcggacattttccataaatttagcaaatgtttttttctaaaaagttatatattcctatgcgcatggcacagattaacaccacacgacatatgtccggttgatcccagtcactgtggcagtctgccagcaggaaataacttattacaatgtggttttactctgcccaatcataagtaaataaggcagcacccgtacaaaaatttgcacgaatcccgacatcgatcgatcgaatcgagactggagaaatcatcagaaatgtaatgcggcaaaagtgaaaagccgtacgttgatatctcgagtctgaattattaattgaccaacggtattgcttctggatagagaggccaaatcaattctcttgcagttctcctcagctagctatcgtcgtcgatcgatctacaccacgattcatctgctagctagccgcagctcaaatcttgtttaaagctgctctcttcagtcttcactgctactgccacacacgcattattccggtccatattgatcatatgcattcatcagtttgcagatttgcagttgcgcagaattgaatcaattttaatcaattcatctggatcatcgcagcagctgggagagctatgggtgtatttagttcgcgaaaagaaaatttttcggtgtcacatcgatcaaacgtttgaccggatgtcgaaaggagttttcggacacgaatgaaaaaactaattttataacttgcctgaaaaccgcgagacgaatttattaagcctaattaatccgttattagcatatgtacttatggctaattatgaactaattagattcaaaagattcgtctcgcgatttccatgtaaactgtgcaattaatttttttatcaatatttaatgctccacgcatatgtccaaagatttgatatgacgtgtttgggcaaatttttttttttggaactaacaaggcctatatgagctaggctgcatacaaatgttcatcgtcagaactgttcagagattaattcagagcttactcgagtccaaattggcgattgatatcgatcgattgacttgtagatatataaatattaatttcctccgtttagaaatatagcaacttaattactgatcaattagacacaatctattactacgaattcgatcggacagtggtgatagcccttttgcagatttgcagtggcagatcgaattaaatcaatttaatcaattgcagcagctgggaagctatactactccagctatgtatatagagccaatcgcttagctatgtatataggctgcatatgttcatcgtcagaactgttcagagattaattcagagtttactcgagtcgaaattgacgatcgatccacaacttgtagatataaatatattgctagatgaacagtggctgtagcccttttcaaaggcaatcatctttttgctgatcgaaaaaagaaaacagttacacatatattgtagcatgtgtaggcatggtaccatggatatggcccaatgctgatgtgacatatatatatatggtgtcagggtgttttacacatgcatggtcgtttgcttgtttggatcgaaggtttcagttactactgctatacatgaaaaagaagtcaatactgtagcaaatggatgcatgcatctgcattctagctaggtgatagacagaagagttcttcttcagaacctgcatggaatagcctgctccatgagcaatttttttctgactctccttatttgctttatggctaataaaccatgaaaaaaatgaatggataaataaaaataattcatagttaattaaaactgttatatttttgttcctataagtttaaaagctaatgctagaaaataaattacgatgaaaaaccttaaagtaaactctgaaactaagttttaaaattcaaattttgattgcgtcagataaaccaacaagcaaatgatggagcattttgtttttgaatgctataagtaaattgaggttgtgtttttctcccaatgggttgggagaaaagatatctcattctcaacacgcatgccttctgaactaaagtaaattgaggttgtgtttttctcccaatgggttgggagaaaagatatctcattctcaacacgcacgccttctgaactatttgacagtacgttggttgcaaaaaattctctataggaaagttgctttaaaaattatattaatatatttttaagtttaaaataataaatagtcaactaattatgtactaatagctcacttggttttacgtatcttatcaatcttcttttcccccttctctcacagcctcatcggttgcccatattatctaatataagttgtttattagggaataaaaaataatatataggtaaaacttttgtatatgtgttcttagcgacttaaaagccaatataaaaaaactgcgtcaaaattgtcttaaaattaacttcaaatttaagtttaaaattttaaattttgactttatctttgattaataattaggtcaacagtcgaaacccctcaattctccaacacaattaggtcaacagacgaaacccctcaattctccaacacaacctgagactattgggctttatttccattatgtgacagagccaactgaaaggcccaaaaccaacagcttggcccattttcaagacagcccaacaggcctctcgcaatttccgttgaaagtagtagtaacgttcgttttcgcatcttcttttttcttaacacagtttttttttctttttttttaaaaaaaaacatgctcttgttggtgaattgaatcggttgtctctgctgcagggtgtaactcaggtaggatagtaaagccttttcaagttggctattcttttaggtttgaagtttctgttttcctttgctgcaaaaaaataaatacaaaagtctacaatggctcacagctggtcagaaaattagaccaacataatgaaaacgcatgacctgttctgatcaacagcagcacatagaaatattcttcttcttcttaattttccagccaaaaaataacctaaataataccctggaatcaatctacatacgtgcaagcactttgctgctttcaaaaaaatattataattttctttatgtacgtatgggttagctgcggcaaaccttgaatcagtacttcaacagattttttttttttgaaaattttattatatatgaaattgacgtgaaacaattcaaactctggaacaattttttttccctctttgtttcgccagcgcctataaatttgagcgacaaatcccatcgtttctcctcaattccctccaatttttcccccaccggagttcaccgccggtttccgtttcctccccggcggcggcggcggcggctaggatcgatggccggcggggtgtcgtccgtggaggtcgtgaaggacggcgccactgggctggagaagctcgtcctgcgcgaggcccatggctgctccgtccaggtcgaccccctctcctcaaccctagctttcagttgcagtatttctagcactggatcgatctgttcgtcgccaatcctccacaaaattatttgtaattgagatgtaattagttagggggaattggtgggaattaatggagttgattctggtggtggagaaaatgtttgagtattactgtagtttagtttgttgcgatcatgcgagggaaggtagcaggtttggtcaaatgcccaattggtgtttgacctttggcttgtctgtggaggtggatgttcatatctacgcttaatttagtatcatttgatttcattctttaagatgtggataaattgtttattgggggtggacaccatgatgctattgttagctgtggttttgattggccttttgccattattttaagtattctcggcaacggtatgtctcatctgttttagacccaatcatttggacatgtttgttgtaaatattgctctaatgaataaggcaagttgcctttcgttcaaacaaaaatcacttggacatgtttgcacattgctcatgctttgtttttttatgacctttttgttgttgttgttgttgttgtttcagttatattagataaccttacaggttccttattatctttttttttcctcagaaatggtcaagtacgttatttttcactattttcaggtatttctgtacggaggccaagtgatcttttgggaaaatgaatatcgagaacaactgctctttgttagtagaaaggtattcagatcttttaatgttcagtaagggcattatttctgccttgcaggcctatatatcgaatgcatttttacatttatgcactctacagatttggcagcaaggcttccttttcttagataagtggttgttttaccattcttttttttggtcgtttttagtttttcaggaaaatgagatatgttatgagtgtcaaacgttttatcttccaattacatgaattgacacttaagccatttacaattacccaataattccacattttttaaatttcttggcaggcttatttcaaaccaccaaaggctattcgtgggggcatacaaatttgctttcctcaagtatgaccctgggactgttcattcatagtccagttatgtttttcaagaattttgtctcccctgtaatacccaaaatggacgatccatcatgcagtttgggaaccatggagttcttgaacaacatggatttgcaaggaaccgattatggagtgttgatgaaactccccctccttttccagctaccacttcaaactgtcatattgacttgatactcaagcagtccccagaagatttgaagatctggccgcataggtgtcctctagtaaatccttaacattatttgctatggcattggtagattagaatgttccatttttgaattgatatatcctttggctcctgctaaattgatgaagttgattatccatatatttcagttttgagtttaggctgcgagttgctcttagccctacaggagatctgatgctcacatctcgaataaaaaataccaatgcagatgggaagccattcaaatttggattttcatataacacatatttttcagtctctgacatcaggtacattttgtcgtggtaatttgcttgtattatgtttatatgtaaaattaggcatttcttacattctttgactgaggcatatagctcataggatatgcacttctatactaagtcgtgctgatttttgttgacaaaagttatgttcggacctcttttggattttatcactccaaatattattcaaatgtacagaatgaatgatgtactatatgggtacttggcttctacattgtatttttcctccataaaaattgttttcacattccagtgaagtacgggttgagggtttggagaccttggactacattgacaacctgcaatgtggaaaacgttgtactgaacaaggagatgccgttgtattcgaatctgaagtaagcttcataattcatttgcaagtttcatattttgcagccattgcagtaagattgtgtttcttgttaatgctttgattgctaaggcggagaaggtatatttgagtgctccacccaagattgtgatcattgaccatgacaagaagagaacttttgagttaaggaaagagggacttcctgatgttggtaagatgctaatttctggattacacagcacggttgttctggtccttttgttttgcttacttttatgtgtgtgtgtgtgtgtgtgtgtgtatttgccgggtcaacaaagaagccacccacaaggggccttctgtatatatatgtctcgtcagtatacttttttttatgcagttgtttggaacccatgggacaggaaagcaaaaacgatactggattttggggaggaagagtacaaatgcatgctatgtgtaggggctgcaaatgctgagaagccaattacattaaggcctggtgaagagtggcaaggaaggcaagagatatctgttgttccatccagttacagcagcggacaatgggatcctgaaataattcatcggatacaggacatctgaatttctcagggattgcattccgtcattttcgcgcaagtattatggacttcccttagatctttttttttatatgtgtaaaagaaataagtgcataagtaatactgtttgctacttacactgaaacatcaagttttgctgcaggaagactcaccaaacagtcacagttggtagtactcttcaataaatttatctgaatgtctgtctgctccattccaaaatcaaaagcatatgctgtggttttcctggaggagtcaaagtcaccatcgtgtttttatagaaaagatggagaatttcaggttcaatatagatatgtaatcctgtactggatggtttactgtattacaaaaagtccaatttgacactgtgggaaagaaatgtacagaatgatgattttcgttgttttacactactacctaagaggctaaatcaccagaagatcatttagctctcatcaagagctgctcttaattctgacgtgcaaattcaagttgttataaagtggagagacaggaaatcgagagcttgaaagcttgatttttttttcaagattttgaaatatgcagtctgctcaaactaatctctctcctttccattggtaatttacaagtcacaacctggtatttttggtagaaactcactgcagattcagaaggcatcaagaatgcctggcctgttgctcccatcgctatctgaataacctgtaagtgaacagtcttatctgtatatttcctagattaaaaaagaagtcaaattacttttagtcattgtccactaagttgagttcgacctcgaaatattttctgcatctctcactgggctcaatctagtgctggctgctgggccgtcgacacagctaagcctgatctttcctttggttaaatgggcttttgattttcaaaaacattgcaaatatgtactccctcagtccaaaaaaaaccccaacctaattaaggatgggatataatctattacgatgaatctaaataattactaggttgggttttttatttggacgaatggagtacaattgtgtaacccctctcatcattgatggtccatctctttaccttcgatgattcttcatttcatctcttttgccttttgttttaatctaaaaaaagatggccagcttgccctggcgcgttattaccttacctttgccaaagaggaataaagcgagctccgcgtgaatgatgcaaacgcagctttcatcttccccagcatagcccaaactggaatagtgtgcatctggataagatttaacccctctgtttcgaaatataagcagttctatcgtttaaaatttatactcaaatataagcatttcttgtgctacatattcttattactactactcatctcatcaaccaacttctgtttattttttctccatcttactcataaccatatgttgtttaattgtatgaaaatatttttcttgtgattttaacatctgctaaacatgttagaaatgcttgtaccataaccatctcttatttaatgagatgtatcaaaatattttctttctgattttaatctctgctaaataatctaaaaatgcttatatctcaaaaccgggggggggggggggggtctaaagtgctagcaggataatgcagcctgcaggacctgacgccgatctgctaataatgacaatgtgtgtgcaaacaccgggagcaggtgtaaatagcacttgcaaactcgtctaagtaaacactgtcatgataggataattatatattaaacatgtgtattatatgacataatcttgatctaccattgttacttttcactagatggcaactgttgtagttggtgatcagtaatgtcgtacgtcaggtgtggtcggatgtaatgcatcatggatgatcaaatcgaattaatgcgcgattatattagttaacgcaacctaactcccaatctaacctgcagctactgctaggctagctagtagttcgcttgatcgcttgatcgaggcagatgagctgcatttctgagccaggtggattacccgacttaaacctatttgagacctaaatgtatgttctgagaagcagttaagtacttaagtatccagttaatcagaatctataagctgagtcgatggctactaaattatttttctcttatgtactccaactgtcctataatataaaggattttggagaaatatatatgttatttaaatttggggtgtgtttagtttatgccaaaattgaaagtttggttgaaattggaacgatgccaaaattgaaagtttggttgaaattggaacgatgtgacggaaaagttgaaagtttgtgtgtgtaggaaagttttgatgtgatggaaaagttgaaagtttgaaactaaactcggccttgtagtattatgatgcctcacatccctctaaaattacttatattttgggacatatgaagtagttactaagtgtccaaatcgaaacaaaatttatatcttttaaaggagctagcgatttttaagtagctatagttgtcaaaagtacccaagtactcctactacctccgttcgtaatttttaacgttttgaataatgacaccatctctaaaatatatctataactatagctttttattacaaaatatatacaataaataaatacaattttaattttatcatagtatactttgtgagataaatctatatatttatattttgccttttaagctagataatttataatagtttagccttaattttatctaaaacgctaagaattatagaacaggaaggaacaggtcctaaagctattacgcatgcgaccaactggcctgcatgcaggaggctttctatcgatctatcggccggggacctagcatatgcagttgcgaaacactcaagctaggaataatctggctagatatatagatcgatcgagttgcttgcagaagcagacagatagaaaaggagatcgatcgagagctcatttgtgattgcccgagaaatgccagggattcctgactgctcaacaaggtgacgatgggcttagttggctgagttcgaagtctagcctcttctatttatttaatattaggttacttcctaatattcgcgttatgtttttttcatttgtgattgtccatttgcccttacatatcaaagagaagaagacaagatactatctttaattataataaagcgatttttatatgtgtatctgtacttattaggagattagtttttattaattgatcgcttttacaagtgcaacataatttgtaccgtagctgttttgttgattttttttttgttgcgatgacaagtgcaagcacttgcgctagtggagctgttgggggtcaagtagtgcatgagaaacttatcccgtagggaactgaaaagctgagttcttatctttactttctcaccccacatctcttgttttccacacgcactcttttcaaactactaaacggtgtattttttaaaaaaaattatataaaagttactctaaaaatcttattaattcatttttttaatttattttagttaatacttaattaatcatgcactaaactgcttcgtaaccctgctgcttcgtaaccctcgcttccaaacacaccccaagatttgttaaatataacgttcatccgtacgtcatgtcgcaggtaacttagcttttcttcttcttttttttacaagaatgtaatcaagggtatttttgtttgagcttaagtttacaagtgacgataattttgaattttaactatgacttaattttaagattaatttatggcttttaatcatctctttttatgagttagcttttttccgatgacatggtagacacgtacatacaacactacacatgcacgtaataacgtactcacaccttcataaatacacccttaattaacctacactcaagggaaaccaactgattgtatgactgctaaggcactgtttgattctacttaccagctgcctatctagctcctagtttttttagcacgcttttattttttaaaaatattttctatgtaaaactttttaaaattaaataaatttactttttaagtttacgatagccttaatcaagctactgattggtctctttaaacatgcggatgatatcctcagccaagaagctgaagtcttgaagactttaaaattgccttcggcttataatccgcttcccaaaaattgcacaaacaagcaggcttaatctaccatcaaaggtatatactactccgcccatttcaaaatgtacgacgtctcgcataatgtttaatcattcgtcttactaaaaaaattgtaaatatcatttattttgttgtgacttgttttatcacaaataaaataaattataattttaacttatgtttttacatatctatattaaatttttaaataaaataaatgataaaacattatacgaaaagttaacggaaatatatattattttggaaaagaggttgtatgtactggtccctctcacccgaaactcactcctcacacatgggttgtgtttagttcccttcaaacttttaactttttcgtcacatcaaatatttggacacatgcatagagtattaaatgtggataaaaaaccaattgcacagtttgcatgtaaattgcgagatgaattttttgagcctaattacactatgatttgacaatgtgatgctacagtaaacaattgctaatgacggattaattagacttaatagattcgtctcgcagtttacaggcgaaatatgtaatttattttattattaatctatatttaatacatttgtaatgtgtatatataaaatttttttttaccaaaacaactaaacacggccatgttctacgttcgttcgatcttcccctaaaggcttatcaaagtcggccgctttcggccacaaaacgcgtgatggtaccgagaatctcgaccgttccggcagtgtatatcctttgtcacctagatatccaaaaaaattgtaaagtgttttaacaatgtagtacaggttaagatcgatcttatctatatcacttcacaaaataaaatacttaattcagtttatacggagaaacataagagaaccaaaacaaaataaacatcttgcatatttataaaagtgaaaaaataatataacttttttttagaaaaatgacagtttggatgccatgcacaaataactaaataagagtacgtgtgttcacgttagttgatgatggtttgaacatgaatatgtagaccattttttaaagaaaaatgttgataatagtttggaactttggatagcacacgcacgaaatgagagcatgtgcactggcactgcgtgcaggaggatggctgcttgaacctggaaatactcttttttttttttgagctatcgccttcgggcgctttcgttctagcttgttacaataaatgtaaaaattgagcattgaaacaaatagtttaagcgctcagttataaatatttaatatttaatatgatatttggttaaacttgaagaattccaatcattaataattcaagtgcttagttttaataaaatgctatcagtatattttgctcaaaaagtactattattatagttgctaaaaagtactatcgtaaagttacagatttcattactctattacaaaatcaattgttttaagagttgtaaaagttcgatacattctttctcctaaataataaatactatgagggagattgtcgacgtttgatgtcacgattccggtatttacatagtatggggatcgttgataccatggtatatgcgagattgaggtaaaagagatggagatgggaatttttatacatgttcgggctcctgaattgtcaggtaataaccctactcctgttgaccgaagccagtcgttactcttattcaccataatcacaccaatacaatatttggggtagcctatctaacatttgtcgacatggtggcttgaagtatcatcacgtagtcgacaacagggtagccttcctcctcaaatccgtgtccagcgagatcaaagacagcgctatgtctctcctgacagtatctatagacatagtaggggactagccatgcttatctttgaagttgatatccggcggcgtgtcttggcgtatgttggcttgttgttgatcttgtgtcttggtctattgttccatgtcccctctcctcctagggggccttgtatttatacccatagatgtctccttgtctaaatagaactagagaaaccaatatggatataatccaagtagtccttgtcgtttccacgtagaactctaatcattcttccttatgcggaactcctcctgtattcgaagtttgtttccgtataagacatggtatgtaagtgggtcctgccgagatttagtcgactactattaagtatgtggtattcataaccctgacagagatcaatatacaatatagacagataacaaaacaaacataatcccatatatgtcattattatctccaccccacacttcgctagcttcatatatgccttattagagcacctctcaccattgttttttttaccaacgtgtctgtacatatataacatattttttatgaacttgataatagctataactttacatgtacaagataaattaccttaggccatacacaatgcaccaaggtgcaaagcaacctcggacttccacatcagttcgcgtacgccagcaaggccgagattgtcccccgtgatggcacttgtgccttgcagagggcatgggtgactagttgtggtgcactgcaacccccgtaccactatcttgttgtgcgtcctcgtgtagtcgtgtctggtcctcacaagaagaaggtgccgtgagagaggagagagggagagggatgaacaatatggtatagattgggggaaggggtgattttataatagttttagtttccttattggcgtttagggtaaaatttgagtttatatgtcaattgaaagaatatgtgaacgaaaatttaaaatattagggacggacttgtaaaattaaagccacacttaagtcattttgcactacaatattagggggtatagtcttagttcacgtggtgctctctctcttttaaatcactcctaaggccttgttcgatttggatggggttgaagaggattggaagggattgagagagaatgatttcacaccatgtggaataaatcccctctaatccctttctaaaggggattaattgaataaggcctaagactaagactaagagtgtgttgcaacatgaatgtcttaggctacattcatttctgcataacaggaagtgctatttctttacttaaggtgagcgcacgcacgagtgctttccaaacttaattattataaacttaaaaaataaattcacttaatatttttaaacttctatatagaaaatttttacgctgagacatatgtttcagcttggaaaatgtaggccgtgtttagttcctcctccaaattttttttaacgtatacggacacacatttgaagaactaaacatagattaataacaaaacaaattatagattccgcatgtaaagtgcgagacgaatttattaagcctaattaattcgtcattaccaaatgtttactgtagcaccacattgttaaattatggcgtaattaggctcaaaagattcgcctcgcaatttacatacaatctatgtaattatttttttcgtctatatttaatgctccatacatgtgtccaaataaatatttgatgtgatggaattttttaaagtttgaaggagctagatacagccgtactcaccaaagagtgagtagttcatgttccattcgaaggaaacttgcctgaaattgctccgggtcgtctcggagaccgagatcatggacgccaggtcaggtcggttagctagccgcacaaatgcgatcctctgccctgacgacctatctatccctgggccactcatgcatgttctactttggtcaagtcatcgatcaatacctttgcaaaaacataggcatacatagcgaatgaagcagcgcggaaatttctggcgaaaatagcgaattaatatactccctccgttcgaaatgtcgatgccgttcatttttttaagcatatgttcccgttcgtcttattaaaaaaaattaggtaactattaattcttttcctatcatttgattcattgttaagtatattttcatgtaggcatataattttatatatttcacaaaagtttttgaataaaacgaacggtcaaacatgtgctaaaaagtcaatagtgttaaacatttcgaaacggagggagtactatatattgcagtgatcctgtgcttcataagacaaattttgtatatgtagacatgtagtattgcataagacaaaatgtgtacatagatatactctcaaatatgctttgagtgctcaaaggggtggattgatcgtcacgacggcagaaaagctaggtcgttacatttgtcgcaaggttcgtctacgacatcagacaaaagtgatagtatatctttaatttgtgatcgatctgcttaggcaagcttatatgcatggttgcaataatctgccgcccaaccgatgatgaacgtaaccgctctagcttagctgcgtcattctactcttttactgatctgtatacatatcaaacttaatttcgaacattaatatcgtgcccgtgcatgcatcgatatcttaattaatccgtgtgaatgaatgatttagcgacgacattgtgatggatctagttgcaattatgctcgatcgagcaactagatcaacgagtaaaaagtagcaaaggacggcgacacggcgtacacacatgcatgacatccaattgtgttccaagtttccaacaatttttttttgcaaatataaaaaacgaaaaattgtgcttaaaatactgtagataataaagttagtcacaaataaaataaataataatttaaaaaatttgaataagacgaatggtcaaacgttataagcaaaaacttaaaatcccttatattatgggacggagtaagtaattagtagtagtactgcatatgaaaagtcggattaattagcatgagtactaacgacctagtcaattaagctactgcatatgaacagtgggattaattagcatatatccagttgcaaaagcatgcgaacagcagatcgatcgagctctacgacaccctgcctgccaaatcatcgatatatacaggtcgggacgaggatatagatatccatctcctccaagatcctagctagtcagtatatgtcagtatctgatgttgctgctgttaggagagattctttcgttggtcgtacgtgactctttagtacattctattactactaattaagatcccgtctacaactccccctctctccctctctccctctcgtgtatttacaccccagtgtgtagtactccctccatattttttttatgttggttagctcaaaattaaactaatcaacgtcgtatatttgtgtaagaaggtaatagtattcattcaattcatatatatcaatacgtgaagtgaatataatcacgccgttattaactagttgagccctactcgagctctagacttagaaaacttgcactgcacaaattaaaaaccataacggatatgtagcgcaaaaaaccgtatacttaacagttaacaccgttcttttcttctctctctataagagcaggtacaatagcagactataagccagctataaacatattttaaggagaaaaaggaagagaaagaagaacagtgggctatagatctgtagtcagctgcagcacggactccaagacataatgtgcgtatgtcaggtaggaccaggtattaatagtatagtaagtaactattgtatgaattagctattacattggctatagatgatttggatatagctgatttggagctagcagttggctatattgttaaacttgctctaaaagagcagagcgatagcacaaggtgagagcaggcaggcagcgatgcaaatgcgcaaaagctagctaccgacatacttataaagcagagaggcgctcgatcgcttccttgttcaccgccggaagcaagcgttttgtgtctccactctctccagtaagcccctttaatttggacggatggagctagcagagcgtgtagccgtagagatcatctcatatatgtagccaaattaaagagggcggcgtgaaaaaacggtagctggtggcctagttgagcggcaagagatcgatcgatcgagagtagcaaggatcggagaagctagcttagcagcggcgcgcggcgagaggaccggcggatcgagcgagcgagctaggaagctctcagccgaccggcgatcgaatcgtgcttgattgtttggggttgtgagctggttttcactctgtacgccgctcgccgtcgtcgtctcggggcgcgcgcacggcggatcgatcacctacccgaggtacgtacgtatatgcgtttctctcgtccatttgcacatgcgcccgatcgcgtgagctcctttcgcggagaggaatcgtacgtgccttcgacgcttacatgaattccttttcttatgcgtaattgtgcggctagcatccatataatatataatctatatatatataattttacttgaaattattaaatatagctatattattatcttatgaatttgaatgaccaaatcttaccatgcccatgtttcttttttttttagagttctaagctctttctaatagagtagtatttttttcggggagggatagagtttgtatagccaccagcctcctccacatacagaatcctttaaattccctacaacccacccctttttttgagaaaaaaaaattcttatatgtgatggtttcttctgcaatattttcttaacgcacctcttaacttgttgcgccatatccatttatttttatactttggcatcgcttcatccatatacatacccaatatcactaatctcccctactgttgcatcctctctcccttacttgaaatattatcgtactcaatctctttggggccaccataaacataaaaaacaacagctaatgatgtgaagtggggaatgctcggagatgaagaggataaagtgggggaagtaggggaaggagacatttgattcatttggtttggcagatctttaggtttgaacatatgccaaccaaatttgttagaagaaaaaaatgaatgtttcggatcggtttttttggcttttgtaataaacagatcgaatgtggattaccgattgatgcaatggtcgaatggtaggagccttactaacgagagtcacaactcaggagattacagtgactaactagacgacgatgatgcttctaaaattgatggcttgtggctggtgtgggatgtgacgtgccttgtgaacttaatgtataggtctggacatgaattagtgaggctaaggtggaattacaattaagtacggtattttccgggtttcaatatccttcgcctacaaaccaaactaactagtcaacaatttagcattgagatttagtaaaaaaaaaaaagaaaaacccgacacaacgctttagttgacaggttttcaagaaatttccgcccccctattcttatagaactagaatgtaaatatgatagagacaaaaagacaaagtaaaaaaaaaaagaaacggaaaacacccacagtcccagccacagcacatttttggtagcttgtcttttggctagttggcctggctctggccgatcgagaggatcaggaaaacaatcggacttgaaaacaaaaaccagctacagccgacagggtcgtcgctccgttccaccgttggttcgcaaccgaaccaacgcgtgcccgcacgacgccgtgcgccccagatacaaagtcgccaacgcgcaatttatttagcccagcccagccaagaccgtcgcgcgtgccacgcacccagcacgtacgcgtgacggagacaccgagccaatcgcgccggttcgatcgagcagttgggctcgttaggtcaggtcaggtcacccccgcgtcgtccgaccgcgacaccattcatcacacaagtcacggtctcgaactcgactcggccgcgacgtcgacgacgagttcaccactagcccaccaccaccacgactacactctcccggctccgagacccgccggaaaatcccccgggaacttcggcgcgattcctctccgagttaaagcaaaaaaaagcggaagccgaagcgcccccgcctccgcgtcgtctgcgtgaagcactccccctcttcaagcgggaaaagcgggggagggaagcaacgcggaaattaaagagcagagcagagcagagccctgagccctcgattcgcttcgtttcctacggcggacgcccattcctcccccaccccctccccccactccgactccgccgccgccgccgccgccgccgcctccggctccggctacagctcgccgccccccaggttgctctggatttttgcgcgtgtcgctgttggttttggggggcgaggggtcgggggatgggttgggatttgtgcttgttttttttttttgtgcgtgtgtttatgctgttgctgatgagggtggtgtgggaatgtgcgtgcagatcgggggcggccgccgcctggtggtgtccgtgtcatctctcctgaggaatcatgccggtgggagtgcaggcgcccgaggcgtcgccgggaaggtaccatcggcggcgggacgacgacgatggcaacggcaacgactgcagcgacgtgctcggcgtcgacgtgctggacgagggggccgaccccttcgacatccccgccaagcgcgcctccgtcgagcggcttcgccggtggagggtgagtatgagttcctccccttctctccgctaactgctacattctactgctcatgcttccatgtgcaatgctgtttaattccgtgcgggatttacctttggctgccacttgcgcttttaagtttttagttatactccctccgtttcgtaacataagtcattctaatattgtccacattcatataggtattaataaatctagacatatataatgtctagattcattagcatctatattcatgtgggcaatgatagaatgacttacattatgaaacggaggaagtattgaactattattatgatcctgtatacctttttcctattttgtggctcctgtaaaactcaatcgtggaactgtggttctctaaagcttccgaatgatctgaggattgccaattttactctaggaaacaatactacgaagtaagaaccgaatgttgctggtgttagtattttgctctgttgctaccacctagaatctaatgagatgaacactgactgtgaatatgaatggtcggttcttagttctcttcaggtactgtgaaatgttaaactatgttagtgaataggtatgcatgtataggctcattcatgacccttggctacatatgcaactgttgcgggctgagacattgtaatgaacctatccctcatgtacagagacattgtaatgaacctcgtacacagatgggaaaacaaatgtcctagttttaatgttttgaagacctattgatcatttttttaggtggatcctattgaacttgtaaaatcgttagaactgaatttacaagttaaacaatctcgtgaaaattattttaactagcaatgcatatacaatcttgactaatgttgtatcctgctcattatttttacacaatacaactatgttttccattggcagcaagctgctcttgtgctcaatgcctctcggcgattcagatatactcttgatctgaagaaagaggaggaaaaggaacaaataaggaggaaaattagggctcatgctcaagtcatccgggtatatgtttaaccttatatttgtgatatgcatatcatgtcatggtatcttgtttgacggtttcagttttgaattcaatcaggccgcattacttttcaaggaagctggacaaaagcatgatgttgatagggaattaccaggtagcttttgtggactcactttcaggctggagacataattgttagttgtgtttttttctcttgaataattgttagttgtgtttacctttgttgtttatcaatatgcttgctatctttgtcgaggattaatagttcacatagtaaaggactgaattgcattgtgatatatagctgtgcaaagagaaaaagagagaaaaccttacacattcatataatgcagaaattctccctcgcgggttcggaattggagaggagcagcttacagctatgacaagggatcatgattattcttctctgcacggatatggaggggcatgtaccattcatactgcaaatttaacttgaatatcatttttagaactactaattaaggcatggaattcttctttaataaacattaggttaaaggactcgcaaatttactgaaaacaaacacggagaagggagtccatggagatgaggtagatttggcatgcagggcaaatgcttttggggctaacagataccctcgcaaaaaggggagaagttttttggtaaatttatttgtccatttcaactagtaagcgtgtcttagtttcagtactgatatctctctctctctctctctctctctctatctatctatctatctatctatctctctatctgtctgtctgtctgtctgtctgtctgtctgtctgtctgtctttctttctttggggtccgggggttaacaggttttcctctgggaagcttgccaagacttgacactagttatccttatcatagcggctgtaatttctctggtattgggcattgcaacagaggtgactcctataaccatcctcctttcttatatttcttatgcactgtatgttatctaactattggttaaatattattttcccttctgatcttgaaatccaatttcattaatgtccacaaacgatggtttagttgagcaccctcactgccagcaaaacttttgatcagtgttttctttagttctaagttctgtcttaaaaaaattcattagggcatcaaagaaggatggtacgacggtgcaagcattgcatttgcggtctttcttgtcatacttgttactggtatgctattcttcgcctgttcatctctatgctaattgatcttctctaagcagttcaatagttgagatattaataggtgaatacaccatcattatactttacttagatgcaaaccattgttaaaggttctttaactttttctgaagtttgagtcatgctttaatttgtaatgataaaagactagatgttttttgtgttattctttggcaaagtgattgcagtttatcattagctcttttaaatagaacaccacttctatttttgtcatgtactttttttgaacagtaacaaataatactcaattactgcaataatggagttatgatagacgtccccaaataaattattacacataaggcttgtacagaacttgttatgaagattcaaacaatccaagtctaaatatctcaggcacccttagttacattatgcacaatacaacgaaaaggcagctagagagtgtagatgctttccctgacaacaggcccagtaacccttcttcacaaatcattacctattgcttgtttggttgagccacttccatatgtcagctagagagtgcaggtgctttctctgacaacagggcaacaggctcagtaacccttgttcgcgaatctgctacacgacattattacctattgcttgtttggttgagccgcttccatatatcagtatcagacgaccctctgatgttcccaactcgcctatcctgattctgttaactgaagcctgcacgctattccaacgcctatgcttgaagagtctcagctctagccacaatagcttgcttcacaacattcttttgctgtccgatatttcattaagaacacactgtatgcaattttctcaacagatctaatcaaattgttctcaaagcatgctcagtttttagtttccacgttgtttgtcatttactaatgtttctgcagcatgttttgtttttcccccatatccttcatttttcaatgttcaacatttttttccttctgcttagcaaacccatgcaagacactctagttggaataatttagttgctttactaaacactcattttgttttgtattagctgtgagtgactacaaacagtcccttcagttccagcaccttaatgaagagaagcaaaatatacaagtggaggtgcgccatatgaatatacccatttctcagataattagcaacaatattttagtcctctaatggggttgtatttgtgttacacttgtcaggttattagaggtggtagaaggattgaagtgtcaatatttgatattgtagttggtgatgtagtggctctaaaaattggtgaccaggtaagattatgtaaatccatgcattctgatttgatttatgttctatgctgtttgtatttctgagattataatgaaactaaatacaccttttaggtcccggctgatggtgttttggttagtggtcattctcttgccattgatgaatccagtatgactggggaaagcaagatcgtaagcaaccttttcgacccctattgtcctatataggactgacttccccatcatatgtaaaccctgtttcttttattaggttgtcaaggaccataaatcacctttcttaatgggaggatgcaaagtagctgatggttatggtaccatgttggtaagtaaccatatcttgattcaatggcctcactcttccactttttttcttatgaaaattgcatgcctgttaacaaaaagaggcaatttgaggcccatctgtcacctctgatcatcgatttaagtactgctgtttagtccagtaaattaattcacaagctagagtaaaccaattcggtggactttttaacagaccctagtgaaatgatatgaaatttcacccctacttacacgactgaagtgcaaaaatatcaacgtcattactttgtctcatgtatgttagtgccttataccctcaagaattaagtttgtgacgttttttttctaacatttgtaatgtggtgtggaagtcttttgtatatgaaattttgcagtttcttttgtaggtaactgcagtcggtctaaacactgagtggggcttattgatggccagcatctcagaagacaacaatgaagaaactccactacaggtttttctccaatccctgtgctatgacctgaatgggaattgtgggctggtttggttttgcactaccaacaatttggcaacttcaatatgtacctattatgtgttcgcattgaagccaatatttgtcaaatccatatagttgaggcacctctatcctatcgaaaatttggtagggtcaaaacttgcccaagatttggcactaccaaataaccaaaacatgatagggtagagaaccaaacttgccctgcatttgaacagttgcccatgccatcatttacatcttatgattcattcatgttcttctcttttctgttgaaggtacggttgaatggagtggcaactttcataggtattgtggggctttctgttgctgcaatggttctcatagtccttgttgcaaggtaagcaaagtgaatggctatctatgcatcttcttgatgtaaatttagtatagctttggtgattaacccatacaagcaaaaatcaaattgtcggcatgacactttttaccactaaacttatgcgttttgaattgtactggaacctggagtgcaatatggcatatcattacactgcttggtaaagcaataaagtgctcactctgcaatgattatcatctgaataacttaaatataaactggactatacatgaaacagatgaaaagagacactactgcacttgtaacaaggtttagtctctttgcatcctccccccatccccgaccaacccccaccatgatgtatgatccccaccacaatacatgcacacacgcacaatgatgtatatgatccctatattgagaaatatataagatactataattaggaatcgccatcatgattgtgtatatatgtaatatatgatgtttgttgcccatgtatccactatgtacttagaacttctcctttgctcccagatattttacagggcatactacaaatccagatggctctattcaatttgttaaggggcaaacaagtgtgaaatctacaatttttgggacaataaagatactaactatcgcggtatgtagtggtttagtgttcagtgtatctgaagacccttctgttatcccattcttatattacaaagtaccatgtaggtgactattgttgtcgttgctgtacctgagggactaccacttgccgtaactctaacgtgagttgatataggttgatgttttcattcatgtttaactttatttgaatcattcaacctcttgttttattttatcaggctggcctattcgatgcaaaaaatgatggcagacaaagctctggtatatatttctcggttttgtttatgttgtacccttttggttattacatggttccactcatgtgattttcaggtgcggaggctttcagcttgtgaaacaatgggttcagctacaaccatttgtagtgacaagactggtacactaacactcaatcaggttagttgtttttgcatagtaatggatatacaatttactctaatactcagttgtaaattaccatggtacctttgtgattatttgactctgaattttggttgcttaagatgaccgttgtccgatctgttgttggggggataaagctgaaatctccagctgatattgagaatttgtcgcctgttgtttcctctcttatacttgaaggaatcgcacagaattcttcaggcagcgtttttgagccagaggtgatgccacgtgtttattactactgcagtttacatacctgaacattgttcattattctaaattaggctattcagtagctggtagatttggtagattctagttatctatttggtaggtatttaacatcctggtctgatttttttatgagttgcattctcttgaagaggttcttctatgctctccacaatagtgtatagtgtgaactttaaatcatattgagtgtctgtttgcaacaacacacagttccactactaaggatgctgcttgcctgcttcaagatttgtgcaaatgaggaagcacatgagcactagtcagtttattaccaagttgataccattttaaaaggcatgcaggggaagcgttttaaatttgatctctaatgtgagacatatgtcttttttcgtacttgtgtactggtgccattgctagtggtttcagtgatctgcattctttacatgcattgtctcatattggtacctttatccttctatgttatcctgattcttgattcatcaggatggtagtcctattgagataacaggctcaccaactgaaaaggctattctttcttggggtgttgaggtaagtttccttgcattctcatactttgcttctcttttggtggctacatttttacttatctggctgatgcctcctgtagcttcatatgaaatttgcggaggagaaatcaaaatcttctattattcatgtctccccattcaactcagaaaagaaacgtgccggtgttgcagtgattgtggtaaatccatcttttgtcactaatgttatttgagatctagtttttggctgttagtttgttcgtggcatcctatttcttgaaatgatttcatagacacatactcattagatacacgagcttcttcctgtgtcgtcaatatgtacatgtacttcgatagcgatgaaatggcaatgggccttatctcaaatatggctccctagaatttgatgattacatgctttatttttgttggttgattggcaaaaggttcatttctttttcaatttaatgttatgtatattcattgcatctccactattgcagtttagtttttttccaaacatcttcttttacttgtctaatgtctatgataatatgatataatatcggttcagaacattttttttcgtgattttagaatgtaacaaaaaggatcttatgtatcagaagttctcctatttgttaacagacattcttgttgatttgtttgaacaaaaggtcttgcactgaaatgagaaaaccattctttacatagaaatactgcatggcaggttgagcatgctctgattactcagtaatctgaaaaacactatgcttggtttatggatctagtttagctagagtacaaatattttcatgatttgcaagtgccttctatttggcatgtaacacgctgcaaccttataatattgtttgcattcaggatgattcagatattcatgtgcactggaaaggggctgctgaaattgttcttgccttatgtacaaattggcttgatgtaaatggcattagtcatgaaatgacacctgataaggtattaaccacataggaaacccttctcaggtttatttaataattctcatgtctcagctgggtctttcaggctaatcagttcaagaaatacatagaggagatggccgaggaaagtcttcgatgtgttgcttttgcttatagaaatcttgatctgaattatgttccaaatgaggaagaaagaatcaactgggaattaccagataatgaactggctctcattggaatcgtagggatgaaggtacatgcaaagcaaaccatgatatctgaattatgatatctgttatatttaaagcaatgttaaaagaagtttctacatgtctaaaacaatgtgttgaaaagcagtaagcggtttcgtgtggtcaccccaccttgtagtgcttatgtggcataatcggtcacttatatggtataattgaccactcatgcagtttaagatgtacaaggttgggacaaatgttccttgtatgcagccttgtaaaccttttttaaaaaacactggtgtaaaggcaagaaattaacttgttaatcagaggaaaaagaaaaggttatacaaaatttaatatggtgggtctagattacagtataaatttatcggatggttattagggccttatggtcataaaaaaatgtattctttgcaatatgcatgagtgatctagtaaatacaactctattttcaaatacaagcatgcattagtatctagccatgcgattgcatttgtgtttggctagttatatattatagctcacttttcctttattactgttctggtaacattgtttgtctttgtttgggacatccatattttttgcaggacccctgtcgccctggggtaagaaatgctgtagatctgtgcaaaaatgctggtgtaaaggtatgtagtttgttgaattcatgtgtactggaggacataatgggcatttttacaaacattacagtcccattttccttacagcgagtgttgatacttgaatgttccttcaaatattgactgttatatacaattatagaaaatcagatttagatgtacaattacgctccagtgaacataagatatgtgactttcttgattttcttgcctttagaattcatgttcttttacttaaggaactaaatctgtttatttgttcatgttggatgtgtaggcataaaactatgagcactagtaatgttggcacagtgccacttgaatagttgtagctcttctcatcactattacctgacaaactcctgcggtttttgaacaagcaggtacgaatggtaactggagataacctacaaacggccagagcaatagcacttgagtgtggaatactcacggactcccaggcatctcaaccagttataatagagggaaaagttttccgggcatacagtgacgctgaaagggaggcagttgctgatcagattagtgtaagaacaatctcatttgtgcttgcaaaaatattaaagtgtgtaccaagtttatcgatgtaaccttataatggtgcttttagttcttaagctggttcattgctcattgtgtatgttattttcccttgcttttttggtttggcaaaaaatggaaccataaacctatagctcggttgcagaaattgctgcagaatgcctaacgatttatttcatgtagtaagacagatatatctggagtacatactttcgagtttacacattaccatgttcagtacttgtactggctgttagctcgatcattctaggggaagcaacctgatgtcaacaatgcattgtaggtcatgggaagatcttctccaagtgacaaacttctcctagtaaaagcactgaaaaagaaaggcaatgttgttgctgttactggagatggaacgaatgatgctcctgcattgcatgaggtacatacataattgggaattttgttttgaacaaataaaaggataaacataatggttttatttcaatcagatgaagacaatcgatcatgcatgttgatgcacatttctaattttgatctcttattcctcctaatttaggcagacattggtcttgctatgggtatccaaggaacagaagtagctaaagaaagctcagatataattattctggatgacaattttgcttcagttgtaaaggttagggaagttggagcttaataatcttacacaattaatttaacaaatgccttaacatttatccatatgtaacgttctaggtggtccgctggggtcgttcggtttatgcaaatatccaaaagtttattcaattccagcttactgtaaatgttgcggctcttataatcaatgtggttgctgctatttcttcaggaaatgttcctctaaacgccgttcaggtttgcaacaacacaatgctcttagaattttctttgagaggaaaatactcttagagttactgctatgtactatgccatattagtataactttgtttattgatagtttaaaactcaaattgttagccatgcctgaattgccatgactagttcggccactgctctctgtagtaaggccgcaaaaagatattgcgagataaactctgttgctttaaactcttttttgttttgggttggtctgtttgctttgggagttgcgaagatggattctttgagaactttgtttctttcaatcttaatgcaatgatgcacaagttttatgtgcattccctcaaaataaaactagtttgtccacttgctgctgtgtctgaatcattacattggctaatggaaataactatggagtatgtgcttgttactttagtggcaatgtggcactgtacggagtttacttcagtatattatcattttttgctactattggggactgtatcctgcttgctcactgtaccattctttaatcacatgagggcttcacttggaatctggaatttggcggtgtcttgttgaaagcatacctaggatgcaaaaccagttaggacatgaatacgttttctagtgtattctgatatgttaaatcttaaatcaatcaagtttgttgaagggacatttagaagatgtcctgtaaataaagatggggttgaaaaaataattttaccatgggctaaggggaaattgttagtgaaaatgaaattaagatacttaactgtattgatttgcacgtcggcacatggctgaatgttttacttccgtttgttgttgatttagcttctttgggtcaatctcattatggacacacttggtgcacttgcattggctactgaaccaccaacagaccaacttatgaagcggccacctgttggacggaagttagtacacctgaaaccaacccgtgctcactataattcttgattgtcttaaatttgtaaaggaataacaaaattctaacatgctttcacatttaacacagagaaccacttgtgactaacattatgtggagaaacttgttcattcaggtaggacggacttgtcatataatgcttctgcattgttaatccaattattttttacttggctagttgctgagaatttttttttctaaccacaggctgtctttcaagttactgttcttctgacactcaactttagaggccgggatcttctgcatttgactcaagatactcttgatcatgccaataaagtgaaaaatacatttatatttaatacatttgtgctttgtcaggtaatttgtcttcggtgggcttcttgcaccttttgaaagcatgttactgatttttgttaaatggttatcttttcttttcatatatagcatagatgtgcaccattttgcagcttgagaaaaatcctaacttctccatttcttttacaataggtgtttaacgagttcaattctcgtaaaccatatgaactgaatatatttgatggggtttcaagaaaccatctttttttggctgtagtgagcataactgtcgtgctgcaggtatgaaagggtggaaatactcaatccaccttcaaatgctgattaaatagttcggggagcagataaaatttaactaacatatctctgatactcaggtaataatcattgagtttcttgggaaatttacatcaactgtgagactcagttggaagctttggcttgtttctgttggtattggttttgtgaggtgagatacttgtccactttgtagaacgtggtgcttctgttgcagggatgattaatacttttccaaaattatttagtgaccttttcttcctccaactattgatctgatagcaatcgaagaaaacagctttagtttgggatggataaattataacgattgactgtagcttgcttactgtgagctaactattgccttgttcatgcagttggcccctggcttttgctggaaagttcataccggttccccgaactgaattgaaaacttacatctcaaggtgtttaccgggaaagaaaggtacccactatattttagccagctgttgtaaacatttgaaacatatctgttctctagcaactatgtttgcttctatgttttgtttccttcgctgctgtttatcagaacaccggcagtaacattatttctttttagttttaccaatttaatcaccttcctttggcccaatttacagataacgaaggatcaactccacctccacctccacctccacctgtgtgattgtgcatgtccaagtgaccaaaattatcagctctgaaattagtggtggtgcacatagatgcttgtataattttgaaggttgacttctaaccatgctacctcttaggctgactgtatactgaggttgaagccaatccgacagatgtttcatcctctcttactcatgaattgggcctgacgccgatgtaaacaaagattaggaacttagacatacacttcactagttggctagggatgagtgtgggctgacccgtggatactcttttacccacactagttcaactaaatgaactaaatttcacttttagaatcacaaaaaatgaaatgtagttcgtttatttggactagagtgggtcaattagtacctatgggttggcccgtggccagtcttggccgcattcatgcatcatagtacgctactgagcacatcttctttcaaagtattacacggagatgtctaaaaatttgagctaaatgactgggaggtttattagtgttactgcttttgatttttgagagctgctcatatttttcaggatcaacatacattttgtacttgaatgctgtacttttatttaggtatgttctggcgcaaattatataatcctttataggcctgttttgactttgatagtagcttgtttgttggaggatttaagctaatctggctagtaaccatcatggcaaactgaccatccagctgatagcttcattacacatacctggtaagtacatatggcacatgataaaaactaggatgttccatagcaaattagtcctatgttttgcctctaatactgatgtatggagtatttctcttgactgaacaaagtgcaattgctagtcgtacaatgtttgcctagagttctatcactagcttgccatttcggtaacttttctagtaacatgcccatctttcagtatatctccttgctttggatctatgtagggttgatgattataaggctgcgtttgagcgcaggagaaagagagaaagatagttttgttttccgcgcgcacacttcccgaactactaaacggtgtgttttttgtaaaaaaatttctatagaaaagttattttaaaaaatcatattaatccatttttgaagtttaaaataattaatactcaattaatcatgtgctaatggctcatcttgttttacgtatcttcccaatctcctcaatcccctccttctcaaacacaccctaatgctttaaggagtcaaatatgacctttcaccaaaaaaaagaaaagaaaagatagcaaggcaatgcatgctatgcttggaaaaaaagggagaatagctaatatagtccctaaagtttcgctcctgggtcattttagtccttaatctttcatattatccaaacaagtcctttaaatttgtcatgtgggctaatatagttcttggtcccaccagaatcgccatatggacatgccatgtcaccttcccatacaaaatctatatgatttgtccaatttaccctttgcataggaagataaaaaaacaaaaggaaaaaagttacaaaaatatatggtatatgtaagagaaaaaatatacctcagaagggtgaaaaaaagaagtatttttttcctatggttatgtctaattcacccttatattttttttatgatatatgtaagggtagattggacaattcatcatagattttgcatgaatgatgatatagcatattcatatgatgattttggtggacccaaagactattctaggccttatgataaagtttaaggatttctttggaccatttataaggttagggactaaacagatcctacagagaaactttagggactaaagtagctattcttaaaaaaaaaaaacaccccctttttcatttgtttacggaggagtaatctaagcatgtcgccgagccacacaataagtaggccacatgcccgtgctcccacccaaatcatggtgcttagtttgcgtgctccctgcattgccctttcccctttacattacatgcaagcagccatgaaaatattacttgtagtactagttacatgacttggtcgctttccattaccgggatcgagatcgtactgatcagcagtactcctgttgctaatagcgaggcagattagcatcggtcgtatcgacgtattgcatctaactcggggtgcttagattaattaagcacaatcgtactacgtactgctccagtagatggttggttcttggatctcgcactggatggagcatatgcgtatgcgtgtctcccggtgtacggacatgatatctcctggtgaagtggtgatagagctagcagtagctctaaacatccggatcaaatgatcaaaatatgggtttttgagacgttctcatgcattgaaaatatgataagccatagaaaaattatggataaaacttttaatcatgtattacgaatctttaaaacctgaacaaacctcctatctgattttcacaataataagatatgttttatctgattttagatcactaatgttgtgcttagatccaggggtgaaaagttttgacgtgtgacatcgaatatacgggcacacatttgaagtattaaacatagactaataacaaaacaaattacagattccgcatgtaaattgcaagacgaatttattaagcataattaattcgtcattagcaaatgtttactatagcaccacattgttagatcatggagcaattaggcttaaaagatttgtctcacaatttacacacaatatgtataattagtttttttcctatatttaatacactatacatttgttcaaatatttgatattcgatatgacatggcgaaaaattttgctaaatagaccctaacatgcgtacggagattttactcctactactctttataagttcagaaagcattaaaatcaccttataatgtatgagtaacatatatcgctacacgtgcttgtcagagccgctccatacaccagcattaatttctagagtatttttcttcaagtatattaattggccgggaacgcgcatgcttgcaagacacgcagattttttttatgttgcaactaataacgaacatcgatcataaatgcaagtcaagttttggattttctcctcgcaaaataggaaaaatgttttggctttcttggatccaccacacaccgaattttaatttggtttcaaaacaaattactccctccgtttcaaaatatttgacaccgttgactttttaacacatgtttgaccattcgtcttattaaaaaaaattatgaaatatataaaactatatgtgtacatgaaagtatatttaacaataaatcaaatgatatgaaaagaataaataattgcttaaattttttgaataagacgaatggtcaaacacgtacttaaaaagtcaacggtgtcaaacattttaaaactaagggagtaagtttgtaaaatacaggagcatgatactaatatataacaatataacacacacgcattaattaatctggttttgctcattaattctgtgttaaccgtttgttttagattttttttccggaccattttctttgaacatactatacttatcatcttaattatgggggaaaatgacatattgtatcgagtatcgacatatatattgcgcgtgcttcatgcgtgacggccggcatgtacataaaaataattcggatatggccctacgtagccttgggattgggcccacacctgacagtggtccagggagagaattggttgagaaaatacgttgccgggcccatgtggttatattatgctacaatggaggcaacgcgggttttcattattataataaaaaattagtttatttgatattgtagagtagtttctatataaaaaatttttacacgatacacagtgtttgacggtttgaaaacatactaaaaaaatcgagatagaatctacatcttaatcagaaaataacgatatataggccatgaaaccatagtttttttttccacttagggactgttcatttgagcaaatggtagtggtaactttcttgttatccattatcatgcttactaaactgctaaacaattttctttacaaaactatgtatgtagaagtttctttccaaaactcaattgaacttattttctaagtttataataatttgtactcaattaatcatatactccctccgtttcaggttatatgacgttttgactttggtaagagtcaaactgtttcaagtttgattaagtttactgacaaatatagtaatatttataatactaaattagtttcatcacatgaataattgaatatatttttataataaatttgtcttaggttaaaaagttactactattttctataaatttagttaaacttaaagtagtttgactttgactaaagttgaaacgtcttgtaacctgaaacggagtactaatgacttgtttcacagccaacagcggccgagaacacagcctaaaggcatggtggacctagaaatttcatagagcataaaaacgttcacaaaatggctagatgttgggatcgtcaaacactgataatgcaattttcccgtcctttggccgtgccaactaacccgggcaactgctcaaggtcgccatacattggatcgactgctgattcgggtggtcttaccatgaactagtacatacaattgacactcgaacttattgtttcttttaacttgtattagttgaaattaaacatgtatgatcgtggagtgatatatgttatattaattcatcttattaaatatttttagatttatgatatataaaacaagaggacatccctcgagggacaatcgggctatattcgtttgcagaagaaatatcttgttatccgtttgcacgcttctcggactgttaaacagtataatattatagaaaagttgtttctaaaatcatattagtccattttacaattttaaaaaatgacatattaggctcttcctttctcctcttctcaagcacacccttaaactttcatggtctcacaaaaatgcactatactcatgatctggatcacacacttaatttcacatattcaccctacattggtgacttaattaaggcaagatccaacttagtttaaagctgagtactactaaactaacaaaacctaattattaacacactccaacctagacagcttaaatctgatcacccccaaagcccaaagcttaatcaccatcatcatccagccccccacttcattcctctcacaatcatcagtatcacctctatctctagctccccctctctcttctctctctaaccttttgcacctgcctgcagtctgtctccatagaactctctctctctctctggatcgccacctttgccatcatcatcactgccatcctctccacgcctgctccccgcatccatccacccctctttaccccaccattgccgctgcttccctcctccatcgctcactcgccatggcggcgagctacttaagtagagctcgagcaaccctaccttgcttcttcttgcctcctatctaagcttctcttcgatcttgtgtgacacacacatgggcctcgagctcgacctgctgtccgctcagctcccgccgatccgcaccacggcggcggcggcggcggcggagatgccggagttcgaggaggtggtgctgtgcagcacgccgacggcggcggcgagcgtgctgcgggcgccgtcggtgtgcccgccggcgccgaggaagccgccgaggccagccgccaagaggaggaagaaggacgctcgctttagccgcagctgctactgctgcgggcggcgccgcggcgggagggcgccggcggcggcggcgttcgtcgccgtgccggacgatctcgccaaggtgttcgtcccacggcggccggtgccgtgccggccgccgctggacggcaagaagatcggcgtgcacgtcgtgggctgatccatgtatccaccattgttggtctcgtctgagcttgaagctgtccatggcgagtggcctaaaatactctggctatacgtacatacgtgcatggccatggagtggtgttggttgcttgcaacgagagacggtttagtttagtaattaattactcctagtttagcttaattagcttactttaatctagtttttttactacagggggttatttgaataacaaactgtaaatgtagttcattattatatcattaccccctagctagctagctgactggatgttcagctaattcaggtaccaattgaatggtcatcactcatcactcgattgatcatgccattacttactttgacaaggaatattgtgcttgcattgcataatatatactgtatgtgcaaaagttgagcaatattatttctttccttacttcattttgagacctcctttcgggaattttacagggatttagttcaatttctcaaaaaataatttctccatcccaagcgtgtggctctagcttagagcttaaactaaaaaaaaagccaactaagacaccatttgatttaggttattgagtggattattctagtagattatctacttattttatatatggaatgttttaaatattttaaaaattaacttaacaaataacttaaaaacaaatgaccttggcaatgtattagaagataacttttttgagaaaacgaatttttcgaaacgtgtactattgcttagatcgcttattttaagttaatttgaagtaaataatctgaaaaaatcgaaaattgattattattttttaataattcagtaaataatctaaaatacctccctttctctcactctgcaaattcatgaatgttgcatgcttattagttaaatactagtagatgcatggtgcgaaatgagcgtaactcaactagttagatttcttttggtggaatcaatccatccggattcaggtcctagatttgaccggatgctcgcttttacgactatttattttttcagtggtaaccgacgtacatacccgtcggcagcgggacgtccgtaataacttcgttaatatcaagagatatcgacacagtcgtccggagatgctaatagggaatgcagggtcagctgattgagagggagatagagagcaggtaatggctggaggggaaaggagagtgtgcactgtgcagagcttccaaagggtgaccccccccttggtgtacctggctggtccttttgatacctaaaaagggatgcatatatgcatgaggcagagagcaatccatgcagaggagaggagaggaggcatgcagcagtggcagaacatactactccagatctggggaggaaagctgcatggttaatgccactcagatctgaaaattttgtgtgtgtggggccgggccattgcaatttgcaagaggggattcaatgatactgtccatggtgaactaacagtactgctgctgtccctgcatttctccctggacaataagctagcgggtggcagaaaagatgagcggcaggcttccaaccccatcatatatgtccctaaaaatgctgccatttaagtccacatggtccatctgatcatgattatataaaagttgttttagttaaattgcaaggtgtatttttattttttaatagaagtttttattgctaattaaactgtggctaatagtttgtcgtcaaatatattctcaatagtttcatatgcacacataagaaggttaattagagatgcacttgatagtacagtggtaagtaatgtgtgatttcaacctcaagatctcgggttcaatcttcaaccagctataaacttcatgtctcggaattaacacgatattctcttttctcatatttttataaagataaaatattgattctcctatcttctaagcctctcatcatttggtagtttatcaaccacagtcacagataaaatttaaacttgaaacttaatttctgaagttgatttttggatatatattttttaattgtggtctattttttagaattggcttttaaatttctgatattaatataggtataaagttattgtcaataaaaattgctttgtctttttctttttcacggtttatctataaatgtgtgtaagaacatggagtacaacagttcagacgaccatcacctacattatgtcttcacatttatggcctacgtgggcgcgtagttgaggtttaatgtgcttcagttcagcttgatcaaacagcacacgtagtattaattggacgcccactcgcgtatgcacgcacgcatgtactctccataaaaaaaagtaaatataatacaagacatgatgtatcctatgaatttagataaatagttatctcgttctataaaaaacaaatataatacgatatatcattatgaatttagataaacagctaatctagatttataattaatattactataatgtatcagacaatatcatatcttataccagattttttttatggggcggaagagtgccccccacccaattaatatggtatttttgtacattttctgcgaagaggcatatgcaagagggcagctagctagcaacaatttttgccgtggctaataagtaaagccatttccctttgcggcctccctttttttacttccttttcttgcatgcccactatagactacaccatcaaccttttactagttctacattcttacacacctagcaccaataataatgatgctggttttaccttttcatttttattttcaaagagaaaatgaagcaaacatgcacttgagagctagctttgctctcattgtactttagttaggacaaataagaagtataaaccatgcactttctaggtatcttaggtttattacatcttattgtgtgcaagttattgtgtccaagcaccacctaatgacatggctacatcataatggaaatattgtaatgcctagggccctcccacgacgatgcatgtttgaagcaaatgtattgtattaataattccctatcttctaaagaaaagaaatacgaaagcaaatactcagaataccaactatattgcagccttgccgtgacagaccaaactgctcctggcaggctagcatagcaggccatgctagacatggttgaaaaggaaaaggaataagttcacattaggtctcttatcttgacgtcgagtttgaatcacatgcttgaattgtaacaccagatgtaacgtttacctcaacttataaaatcggatcactcgaggtcctaggacagtattttgtcaggttttagctaacatggtgagttgaatacagtcaacccagccgagttagcatgggacccacatgtcagtggctaagtcttcttccatctctcttcacctatcctccccatcttctccaaagcgacaaccgatacagtaaagggtagcacgtggcgggaagaagggcatcggccgatgggagaggagctagggggctccgcttgttcgtccctgagctcgatttaatgatagccgaccttctcaccttcttccgcttcatcaagttacgggcggagcacgtgaaagccgttaggcttcttgtttggggagtccatgggcggggccatctaccttctcattcacctctgcacatcgtcggaggagtgggccggccagcacgtcctggtggtgccccatgtgcgagttcttcaccttcgttgcatggttcgcgccgacactccccatcatgcccattttcgacctcaccgagaagtccgccaaggcaccgaccaagtgccttagctgtatgcaacccaatgtactacaacaactggccatggattgggtctttggtgcagaccgcagggcacccccttggagaatatggggaaaagagaggggagatgggaagagaggaagaggaaagcgccggccgtttacatgtggggtttgttgttggctccgccaggttaaacatggtcaattatccatgttaaccacaatctagtacaatactgctctagaacctcaattacaccagttttacaagttgaggagcacgttataactgatattgtcgttcaagaacaccattcaaacttaacgtcatgaggagccaagaaatgaacttagaaaaaaaagaacacaacgcccaaatattttcctcgtaggccgaacaatctagcccaaccagggcccaaatatattccttcatgggccgaaaaatataggcccagcatccactggccacagcccaaccaggcaggttgacccgtacacacacgacgtccaccaacaccaaagccgccgcttgttttctcgccctcctcctctcgtcttctcctccaccttgcttgtacccgcatccacctcctcaccctttttctctctcatcaatctctctctctccacatccatccaaccctacccacacccacgcgaccaaaccctcggcgcggcggcggcggcggcgaggaggcgaggaggaggcgtagcagccgccgcgttggcaagcgccaggtgcgggcggatcggatccggggggcggagcggaggtgtggtggtgggggggagctatggcgtacgtggaccacgccttctccatctccgacgaggacgacctcgtcggcggcgccgtggggggcccccgcggcgcgcccgtcaaggagatcgccttcgcggccgcgctcctcgcgttcggcgcgctcggcgccatcggtggcgtcctcatggccgccaacaacgtcggcggcgaccgcgcgcacggtgagcgccctcctcttaattcgcgcgtctagggcctgggcttccatacaatttccccccaattgatgctgtggtagtagagatcttgcgggattctagcttggggggtgtggtttggcttcagtgcattgggttgtgaggatgaaattaagggggttattgtttgactgcgcaatcatccattttggtaatttctcagaggaaatttattattattagtaatttacttctggtattctcatttgattttgacttggtcaaccacatgcattttactacagctgggtggcaattgggggaaataatgtactttatgtatgcattgcaatttggtgacagttcgtagaacatacatttattttaatgctactagtttgttgtcaattacattcattcatgtatcaagtttttgtaatatactggcattttatatccaaaagctccagatagcaatcactggaagcaacagggcttgactgctggagtagtgtttaagattcgaatgggttctctagtttgacaactttataggctaaaaaaacttttaacatttttaagtgggtgggcacaaagtgattcagtcatcaagttttatgtttggtaacataacatttgtttagcatacaataggtagggttccccttgcatagaagatagaacctttgctgttgaaactttattctttctttacctgaagccatttcccttttgttggaacaggaatcttcttcatgattctgggtattgtgatgttcatccctgggttctactacacaagaattgcctactatgcttacaaagggtacaagggcttctcgttttcgaacatcccgccgatctaaagaaagaggtgtatcatacgccgacttggttcatctcatcacgtccaatggcgaacaccatttctcattttcatcttgtctatttcttcttctgctgcccccctttgtaggatgaacttctagacatgtacatataaaatgctactcccataatgtatcattatggtgtggtgagctgaaaggttgtccattgtgtgattatgttgggttactatgacacatgtctgataagaactttatgatgttgtgttgctctcatgctgtctgctgtttgtgttaagataactgaagttaccgcactgtcatgacagtttggtccccttatcagataagaacaccattgtgtgaataaacgttccgttagctttggtgtttcgctcattttactgttgatttaccttcagttgttttgtatctgtcaactgctgttctggaactgtggtctgttgtgcctgatgtgttttactgcaaaaagttgcaccttactcgtctttggaattcagtggattcttctcttgtgtcgatctctgataatctcaaatccacaaatgaaaccgtagaatgatccgagtaatgttgacacagaaaagtggcaggacaacctcaaatcaacagacaatggcaggtgaaagacgatctaaacaatgccttgctttagttactactattacgaaaatagaaaatagggttaacgcttagagatttcagtttttttaacgaacttacagatttcaagtttgaactttaataatggtttaacgcgagaataaagaattgtttcattcgcttgatgaactatggagccgtgtacagtactcgtccatgctaagggtgagttcgaatatcgagaagattggaaagatatgcaaaaaaaagataagctattagaatatgattaattaagtattaactactttaaagtgtaaaaatagattaatatgattttttaaaaaaaaattgcaaaaaacgcatcgatgtgctatctcactcatcattgtccatggaacgaacgcaccctaactccctaagtgtccatccgatcaacaagaaatatttttaagatgggcatattttatatggagtacccattgtccattagagttttacagaaatcatccgcctagattagtccctcagttgcacaagttttttcgatccgcagtgactgacagcaaaaacaagcaatcgattgaaacaccaaagcgagcgaattaatgaaaaaccggacagatctatgggatacagatacaatatttccgcttgaaatttggatggatctagaaaggaaacacccaatcgtgttagcggcctgcgtctctctcggcacttctgcaaagggtggctcgcccatggaatagatcggcagagcacccgttcgtctgagagccgtccaaaacatacaaatcaccatacaaaaaaacagcaagaactgaagaaaagaaggcgatgttttcgattgggggatgatttgggtttgtggccaggtattgtggcttggaactaaagaagatggatctccaaacaatcttctcctggcttaggcatcgatctgggctccaagcggcagacagggcaccattgaaacggcgcctgctgttgactcataatatagagccctattattctcaccaccaaatcatttgcatcccaaacacgattcaaaaactatatcaacgatgcgatgaattgaaatcttcaaacaaacaaaatggaagcaaaagcaaatcaatcgttcaacgagaaaaaaaaaagagagaaaaacacggaagcaattaccactcggagaggaaatcaagaaggaaaaccaagcgaccgagatctgaatgcgcttgtgctgcggcggcggcgagagacaggtgggactgatgggtttagggttctgaagcgccccgtgttttatagacgccttcctcgatgtccagcctataagagtatgacacgtgtcccgtgcaaatctgtctcttcctgggccgaggcccaagcccaacaacaaattggttggatactgattatttgtatatttatttattatttatttttgtgtaaaaacgtagtatacgtgattatcacgtttcacgtacgcgtaaaaatcgttatcccatccgaatacgatttactagcataatataacggtatatctcgagggattaaatactctctacaggggcgtatatatacgtacacatacgtacgcgcgtcgatcgccgccatggctaagaagaaagacagcgacgacgtcgccgcggtgtacaccgccgtcatggaccacgtcgtcggcgaggtccacggcgacctcgtcgcccagggcgtcggcgacggcgttaagctggccggcgtcctcgcggcggtccgcgctcgctgggaggccaagctggcgcggcggcgcggcggccccgccctggatggcgacggcgacggcgacggcgcgccgccggagtacaagccggcggccggcggcggctactgttgcgatgcgcctagcagtggcccgcatcatcacgatgcagtcgttaaggaagaggaggaggtagccgcagccgtcgacgacgacggcgctttcttcccgacggcggcggcggcgccggaaacgtcgaacgacggccccgcttctcgggcggtggtcaggcgtgatcttcttggcacgcttggcgcgaaacgcaagagggatacgtgtaactaacaacgtgcatggaactgctcgaatttgtgataaatttgtaacactggcagtttgtgatctatactcctgcgtttctgattacaagttgtttttgacttttggttaaattcaaattatatcaagtttgatcaggtttatagaaaaaatattttttaatccaagacaaacatattatgaaaacatattcgattattgatttaatgaaactaatttgatgttgtaaataaataatattatatttgtctataaacttagtcaaacataaagttgtttgattttcactaaagttaaaatgacttataatctaaaacggatggggtactaccaatgttgtgtatggagaattactaactgcagtactataagataggtggaggaagaaattattcgtaatttatttgataggattgggaaggaaaaaaaatcatcggatttgctcttcagtcggaatattcgaagccgttcagaaacaggttttttttaaagaaaaaggccatcggaatatttgaacttcactaaagagattgaaattggcagttcagaaaagaaaacgatattgaaattagagaaaatttgggaagtagtcaagtagaagaggttttacagttaggggagcgaggagagatctgtactgtacggttgaattttaggtctgatgcatggtcagcaaatgactgaattcattcttctaatgacttctatacgtgatcaacaattgagcatcatagatgctccctttcttcacctgcttggcagattacttttcagttactccctccgtttcagattataagatgttttggctttagtcaaagtcaaactactataaatttaactaactctatagaaaaaaaatagtaatatttacaacaccagcatagtttcattaaatctataattgaataattttttataatatatttgtcttgggttaaaaatattactactttttctataaaattagtcaaacttaaaatagtttgactttaaccaaacgttttaaaatagtttgactttgaccaaagttaaaacgttttataacctgaaacggagggagtacataatttacactttggagttaattttgtaccacatgagagttatttacagatttacagacattgtttgatgatattgcttgctgaacaactagtggttgtgggcctagctagctagtatgctattcacatcctatctcaattgtgtataattgagctaaaaaaaattgttgcgtatacgaaaaattcgtagctgggcccatccaatggaatctgtctaagctaaggcccatccaatggaatttgtctagggaaaaattcctgaacttggccacttcagttgttcagttcttcaggataataatgagctatggtccggtgaacttatcatacaacttctgtaaaaaatgtagaatttcatttagcaatttgtacattgcaactcctttggttcagatgactgatctactttcacagtaatttttttttatacgattacttttgccaactcggattttatgaacctccatttcagtgggcagttaaataaatcaatctcgtaccgaatacgacacatcttgtatgattatgtccagattcattgtatcaggatgtgccacatcttataagatgttggtttattttggaatgaatggagtactacataataaatgctatagtatcctctaggatacaaagtagctatccaagaattatctggtcctagaaagtcaagtacccgaaaggagagtaggttctcttctgttttatgccggcctttttcctccttttgttctcaccttttacacccccttttccattgtttagcttgactagaatctttctactagctacataaactgctatactcctgaattatcaggagtgcttttccggtggtctctactagaagtacaaacggacatacggtgatgtaaatttccggtgatcgagtatcatttatataactggtcgtaccgttttcgactgaattttattatagtcctataaaattttgattttttaagtttctgttagaatcatattaatatcaccgctaaataaataaattgataaatatgaaaaaaatcactagatatgacatcgtgtatgaccattttcattcccggtcagataatgattatataattaggagggtgtaatcgtttctcttggtggtacgataatgaatcaatggatcgaattctcgttaatcattgacccgttttggtagtctgacgtgttaggttaggatagtgacgtcagcagcaggcccatgacgggacgaatcgttgaaatcatcatgacaacttggtggtgatgctaagcattccctctgatccttgtggctaaagttgatctcgtctgtttttgtttgtccatcctgtttaaatgcacttagcttagttcggtatacccaacttcccatgatgcaccgaaagatctctttgaatgaacccagcaattaacgccggcatactatgattctattagggatgaaaacggataagatataggtatactatatcttgaaccatactccatccgtcccagaaaaataaatctagaactagatgtgacatattctagtacaatattctagtacaataaatctggatgtgtcacatccagtactaggttggttttttatgggacggttaagtatatttttagcggatatggatataaggcagattttttcggatgtcagaaatggtgtggactcaatttagaaacagattaaatctgttggacgttacattattgcaatcaatataacatcgagttagcaatgggacaacaataaaatgatcaataaatgacctatcgtaataattatatacttaagtgctaaataatatgtatacaatgtatacataatataaaaatacagcaatgcaagtgtgaaatgagatgatgaaagccccaaactaaaaaatctaggttaattgatgaatcagatcattggatagtctggctcatgtcacatgcaatggatagagtgattacatagattgataattctggattattcaacaaacggcttattagataatctgatagatatatcggataattcacatccgttgaattttagagataccacgtttgcatccatatccacattatactatctgtatttgcaactatatccgttagatttcttaaaacccgtaccaatacgaaagtcctaaggggcgatcgatcgctccaagcgatcagtccccctccccacatcgatcaccccctcctccatgtggtttccttttttgcaccgcattacttcactattttagtaaatttatacacctaaagtttgtacacatcaagttttcacatctaaagtttatgcacctaaagtttagagacccaaagtttacaagtcaagtttatatatccgattcaaatttgaatttgaattcaaatattttttatatatagtatttctatacatctaaaaattatacacctaaagtttatagacccaaagtttataagtcaaaagtttacatacccgatttaagtttgaatttgaattcaaatattagtttatagacctaaagtttataagtcaaaagtttatgtacccgtttcaaatttgaatttgaattcaaatatttttttatatagtatttctatacataattttttctaactttgtttttttttaaaaaagttatatggtgtagtaggaagagaagaaggggaggaggaagggggagagagagtgtatagaggatcgatcgcccattaaccacacccgtaccaatatcctttgtttcggatggattcaaagtggatgggatccgttttcaccactacatgctatcgtatttacgtattattcgacaataattgatctgttaaggtcaaactaaactaatctgtcagagagtaaaccaaaattaacctgagcaacatgaaagagagagcttcctttcaccctcgtggcagtaataatcaacataatgatagatcttaattgacatagcaaatattgttttgtttgcttcccaggacacacgagatatatatgagtaagtgataagtactgtcattaattaactattgcattctccaatcaccattatattgacccaatgcgctttcaacaagtatatatactgtcatggcggctggctaattgacgtggggccatttgatttgcaggcctcaggtttgaaggataaggattgctcttaacttgtccccttccaagtgatgctctcactaaaagcatgggttttatgtgcttcaagcttcctctttttttgaaggacaagattgtgacttggcatggatgtcattgtcgaatcaatggttttattaggtttttgacgctttggtttgttggaaaattgccaggtgcttgacggctaaggcaatgaaattcggtgtctcctagctcctgtcatgttcctttgctttatagttcttctttctctccctctctctttctttctgtgaggatagctctccttcttctcgtggagtttaattgatatcaagtgatatagcagtgatggacgcatgtttaaaatatagatgggacggtagagctagccctaattaggtgatggcacaacacacacaaatcttagtcgctggttcacggcattggcgcaacaatgcacggcacgaacatcgagaaagttaacaacgaggattggtagtcgaacaaacgtatatgacttatatgtagagagataaaagaaaatgagaaatgctgttagacaacaaggggaaccactttcaatagttcgggggtataaaacgagatgaaaaattatttaggggtttaagtgcttcgtcaaaatagttcaagtgagtaaaatggatttttttaatatatttacctatttactgtagactgtattatgcactaaagaaatagaaagaaaatagaattttatgtacggccaaaatcagaaacgatcaaaatggtattacttatacacgaattttcataaatgtttttgttcctacttaaaatacttgatttatctgattattcaatagtagactaatgactaatgttggaaataggactaaaataaggtttcggggtgtgggacgacacagatcgtagttgggccggccgacccaccctgcctaatgggtgtgttcgtcactgagtgataggttaattatattataatactcttgtaggatgtttgttaaattgttactaccaaaattagaatcatgtttcgataaattcgagttacaggtggatcgatgggctaagtatatccttttgtatcacaaattcatatcaatcctcaacacaaaatatctaaaccacctttgagcaacacactttttttctagctactttgttcaaaagttttgaaaaggaagtgcctttcgtgaaggcatgcacaacaagcacaagacatttgggtgcaatgcaaagttgcaaacgtacatggatatacataacggcatccaaagctgcaatctcttcctttttcgtgtgcccaaacaactcttcccagggacaaaaagccaaaacgccaaatgaaaaacgaatccaggagcccaccccacgagagctccacgtcagcgctggccccacacaccctcccaatccagcccagccgagacccacgtcatcatgggccccacacgacccctcccctgcactgaatgcctcgcagcgtgcagaacactcgcactactcgcgttccataaaaaaaaataatgtactcctaatactaggaaaccgaaaagtatcgattcgtattaataaaatatgtcatattcgatactagtttatttttttatgaaacggagaaaatactacacatggcggttcctttgttcactttcttaactctatctttctttttttacatgttttttaaaccactaaacatgcttactaaatagtatatttttatagaaattttctttataaaagttacttcaaaaatcatattaatttattttcttaattttttaatactactctatcagtcccggtttagttgtcgctggggtgtagagttatttcccagaaagaaggtcgtttagctgtggggcagctagcatgctagccactagcatgagtacttctattaattttcttccctatacttgttgccgacatatcgaaatgacagacgccgtactagttttgtgttaattcttaagcattgaaatgattaatgtaggggtatgtaggttatttttccaataccatattttgtcatctcctttctagaacggctagtaaaattggacggagccaataatacttaattaattatgtgctaatgaataatactttttagaaagatgaataattttgtactcacaagtcacaagtacaaatatcccctgctattctgctcgattttttctcctctcctttctcgcaaacgccttttcttctct

SEQ ID NO: 9808 - DNA, 1260 bp, Oryza sativa
cagtttatgtttcactcataatcccaaaattaggaacataatatcaacatctaagcatcacaacacgttacatgtgcatattgctttgagaactaaagagaacagaaaatatccagcaccaaacatgtcaaactagctaggaatgccaatatctacccatgcctacctccctcggtgtgcccacgggcatgcctgtttaccagccaccacaagtagtgagacaatgttgaaaaaagaagtctgcaagcattataagttcaatacacatgtacgtagcatatataattgagttgtaaagtcatcaccaacaagcccgtaattacaaatattaagtgttcggacctttggaccttacatccacaacacatcacaaatataacaggatgccacactagtggtatggtctgacaatcagaccatatcaaggagatcagagttataagttttacccaaccgaaatctgagcttcaagactgtccattcaccaataccttagttattgccggcaataaaactgatagcaaacaaattccaatagccagccatagcaatcgtggggctaatacggtgtataaaccagttgcaaatgccacagtagttgccatgtatgcaaaccacatgagcttcttagtgaaggacctataatgaagcaagaactgaagatcctcccaccttgctatgatgcaaatgaaggcgacaacaagtgaggaacacattgccaatgtgtttgcgatcaagaatgacaaatgcaaattttcttgccaatgggaaatcccaagtttccagcatcgctgctataccctccaggtaaggtgaaagcagcaacaaatgtaattgtagcaatgattattgcaactaaagaagtgttgctcgtatatgtctgagtcagtgacttagcatctttcattgataatttatttaatttgtccttggccatcttatgaagaatataaacggacattgcactttggggatcaactttgaataaaagcatcaacacttcattctgcatatattaaaagagaggaacaaatgactaaatgtgattggtataacataataaaaagccttgatatctgtgcctttcgagtataagtattagcaaaacatgaaacacctttgtaatttttctttgggaaaagtgagcttgtaaagtcatttagaactcaacacgtggtgcaaagaaaaacctatttatatgcacctacaaatagcgcactatgcatagctaatttgcgaccataggtattatgggacacc

SEQ ID NO: 9809 - DNA, 996 bp, Oryza sativa
cgccccagggaggagggcgccagcatggctggcgccgccgcctctattcctgtttctctgtgtggagttgcaacggtgtcatttttattttatttttttgatgtttttacacactcaggatcacgatacaaccaaccataaaaaaaatttaaactcgaactaccacttagctaagtctgaaaatatctagtataccacttagtctactttgcaccttcactaaaattagaccataactcctttagtaaaactctttgatcagcatgttaaacataatgcactctaccactatatgaaattacttaatctaattcaaaatataaccacatgaaatgacatatataagttaaacagtacatagagatgcaatttttttatttttatttcatttttttgatatttttttcacacttaggagaacataggaaccaaccgtataaaaaataaactcaaacggacaaaatatgtgacatgtagaattttccaaaactctaccgaaatggacaaaatatgtcatctattaaaataggcgtaactttctcatacggactcggaattaggcaaataatatatgcatggacatctacagaaaaagttacatccgattctccccagctttgctgggttcggcgatattaaaacctccaaattccgcttgcaagattgtgttttcgaggagagaagtttttcggtggagctttggaaaattccatatgccacatatttcgtccgtttgagtttattttttacatggttggttcctatgagttcctaagtgtgaaaaagtatcaaaaaaataaaataaaaataaaaaagttgcacatctctctcctctgcactagttcggagagaggagaggagaggaaaaattctacatgtcacatgttacgtctatttgagttcaatttttctatggttggttcttgtgtgtccctaagcgtgaaaaaaatatcaaacaaataaaacaaaaataaaaaattttgggggggggggggg

SEQ ID NO: 9810 - DNA, 4552 bp, Oryza sativa
tcaatatgaatgtgggaaatgctagaatgacttatattgtgaaacggaggaagtataaactaaattatataggatacatgagttgtgctggaaaattctactctttgctcaacctttcaagcaagattaattgtgagtcatctgctagaatctgcttcctctggtatcactgtcaaagacacagttacattgttcgcccttttaacaagaactttaaatggcactccaaccttgtcccccatgatatcaatgatctggaataaatattttatttataaatatggtttaacatgctcttggctcttggattgaagacaggacaatataattactaggttcctaaaggaatactgtaagtgatacactagttagcttagttacctctttgatgctctcaaccagtttaccatcaaattcaacgaccacatccccaggacgaaatcctgcatgttcagctggtgatcctggtgtaacctggttgacactcatatggtgtcagcagtgccaactactattatgatcataataaaaatagacgcatgctaaacatgtgacaccagatttgcagttgagttaaacagtcatagactccagccaatatccaaaggccattgcactgtgatgattaaaactgaacagtaaaattcaattcaaacaaggtgattagatccactctacccagctgcaagaagattcatcagacatgatgaattaagcatcacttaccattggaacaagcacaccattttttacatctggaaaagaacttgatctttctttaagttgtgcaatgatcattgggttaaggtcaagcatctttaaaccaagccatggtcttacaactctcctgcattgcatgttggagaagtataagtagcagctaagcatattacaagctaaaccagaacaactaagctaagtgttcattacaaaagcaaagccatgtctgatttcaagtaattgttcactattgaatgaggtttcattacttctcttcgcacaagagaaaccaacaggaactagaagatttaatcatgataaaataaatgtgacgataatacatatattacagaactttactgttgtaagcatgttgaaactattttgaaagaacacacccattttaccccatttgactcttatgagcccccaaactacaaaagcataggcctcaccagtgttttcctctctctctctctgtttctcttatatgcaactgccagcagctgagcgccgctcccttcccaataccctcactgtcaaagttactacacgagcaaccttgtcactgtcttattttcaaatatgcatcttctcgtaattttatctccccaactatcctcaataatcctgctgggtctaagcagtgctctcattcctcacatcttaagccatggaggcaaggtggagcagtggccaagatcaaacgaattgataagatgcaaagttggctggttggaaaagtcttgctgtcttgaagaatggtacaaaagttcacatactcatcaagagtgaattcatatcattttaaacacagcgaaggaaaacaggtgaaatggaaaaccacatgtatgctaccagagaattgaaatgggtgagaatcgccttcctattcacagtcacctactcctagtcctcatctagccactgatacggattgtttggggaattcgaactaaatataccagcccatcccggaaaattggtcatgatttaacccgtgctaaacaagacttgagtgggatcaatgactgctatggtgaggaactcaataacatggtagctaattcaacagctttatggctgtgtaaggcaccgaaataaggtcagtgaccacaactgcttgaagcggcggtgatcagcatgaaactattagtgagggcttccatgtgtgcattagtatgccaactgtgaccatgtgcacactaatatgcacatgaaaaggacaagtagggtttgtttttgccaagatatagttactacattaggacgtgacgactcgaaatttcgaatgccatgtcaatcaaaaccacactagtcttgagagtaaagggtttactgattttgataatcaagagggtgaaacttagacggtcatgtagttgaagggttgaagttggattcttctggtaattgagggtgtatactagatatatacctatttcaaaattgacagaaatattacaagctgatttgaaagtatgatactatgatgctagatgtcctcataattcattcttgtacaagagtgcaatgcatgtggaatttatgtcacaaaaaaaagaaaactattcataaaagtcaatgcataaagacagactaaccaccaaacggtttcttgtattttatttctcccacagaacaagttggaaacaatgagggcattccatttaattctcacatttatagaagtacctaagtgggtaaactacaggctttaatcactaaaaaaacctcaacctgaactgaacaaatatatttcaaaagaaaagacgaaatacacaggaatggtatctaggaataaatagtacaatgcaactggcatcatacaacttagaaggaaggcatacccatttttcttgaagttctccactattttcacaatagagtcaatcggtactgcaaagctcaaaccatcagctgcccaaactttcatcacattaactccgacaatttcaccgtcaagattcacaagtggaccaccagagtttccctgtgtccaataaatgcgtgaactatttgacatagagaaattgagaaactagaacaggaactagggaaaaaaatatatcctagaagtcggtacatgtgagcccaatcatccataggacagagtacagaaccaacaaaaaataactccaacagacacaaaggagtttatgttcctccaaacaagtataacaagaaagcaagaaaattaaaaggaaaatgggatggttgacagcacaatgtactatatttttagttgggtaagccctgataagaaggggaaaagtaattcacaattttccgattacccccttctgcaattactagaattgcgatcctgaatcaaattgtatatgcttcagtagaattgaactctaggatcaaagcgtagaatcttagacctattccaaagtggcatgagagtccgtttgatcaccgtggcacctaatttgattcatttatcgtttatcttagcaccataatactgtattcctcttaataacataataccgtggaatacatgcattattgactgattttttttcagcaatgtgcagtacattccatgggttaatggtaagcatgtttattagatcatttacacataatttggttggtaaatatactccctccgtcccaaaataagttcatctttgcctccacttgtttgtcccagaataggttcatttttaagcaatcattacattgtagtttgtgaaagtagggggacaaatgcgttggaagtaagtgggggacaattccatcgggatttagttggagggtattctagtcctcttgcttttgtattggtatgtatgtgatgggtgaaaaatgaactaattttgggacggaggtagtattatttagcaactaggtcacattctgatatcatttgaacaattctacgcctagaatagcaattttaatgatcttgacattttatgtgacaaactaaactaaatatatgtaatccatttttactttttcatccttcaggattccaaatttaaagagaaaatctaattcatcaaataataacttcaaagtaatcaacgtagaagttctaattctttccaaacctgagaaagaccacacaagccaactcccagaatggtacaatcttatacgatcctacacgactagtgatcctatgactgggattacaagcattcgtggatgagctgtagctcagtggtagatcacccagtagaggtctcggtgggcttcgtacccacttccctgcacaaggtttcgggggccccttctttaaagccaactcaagggggacatacttgccccttcattgagtttttttaggattgcgagacttccagatatgattcttgatatgattttagttgtttggttgggtggaatcgtagaaatcaccctataactagaatcgtgattttaacaaccaattgttaccacccagtgagatgatataccaatggtaaccactcactgaacaaacagagtacataaaggagataacacctatgagtaccactcactgaacaacagaacagagtagctgagaactgtgtggtgttacgttaattgttttatcagtgggtttgaaccacaaaactactttgacatatgcttattagatatattaaaatttttctgcatttattgtgatggtttggtgacagggagtagtacaatggcataaacattagtataaaacaatctagtgtactcataaaagcaatgacttaggggtataatgtaaagggtcttgccttattgatagcacaatctgtttgcaaatactcccttcttattcctccaagacctaggtcactgcttttccggtcaacacaactacaagagaatg

SEQ ID NO: 9811 - DNA, 8771 bp, Oryza sativa
cgctctcccgtctctgtctctcgcttctaaggaactgaggaggggagttagggttaggttgatttagtgggccttgggccaaaatttcagaggtatatctaggtggggggtccattactacacggcccacgacctggttcgcggcccaggttgccccaggcctgggtccgcccctgcaattagtgatggtggcatataccgtggccaccttaacttagtcatatgttcccttgatgccctttagaataggacaagagaagatggagtatatcaagatagtttttttttatgtttttaagtacatttgtggtacagtgtacacacagtttgtttttggtgttcatcattactactcaaattttatcatttagataaaatactctcttttgaaaatgagtgaggttaatcatttcatgatacttaaaaaaattatagctaaagatacatagcaccttgataatatcgagaacaccatattattgtttatattttgacaaatatatataatttagcgtttagtttgttttccactcctattgttcatagtgacatgaggcaattttactaatttgaagaatgcatttatttttcccaaatttatatatactaactaatccattggagtacacttatagtcacgtcaatcaagtttatggcatatatctatcaattatgcctgacatagtgaaattccttaagtataagaaaatatgacatgagtagtttattagcatgttacttcattgttcaaaatcatggcaaagacaaaaatatgtgaccataaatctattgatggattgtagcaaaatcattggctggaaatattgttgatattttttttcatatctatgtatcatgtatgctgcctacttcttaaataccaatcaaatagttctgaaaatatccaaaaaatgctttgagaatcttaatctcaaacaaatcctatatacctatacaaatcatccccactactacaattctctgcttcctggtgcttccacgtcacccctttttgtccccaccgttagattcgcatcgagcccttcctccgcatcgctcctctcctctcccctcccgcatctcgctgcggcgccggccccacgcgcatcccgcatcgctcccctcccctccccgcatcgctcccctcctctcctctcccgcatctcggcttcgccggccccacgcgcgcatcgctcctctcccgcatctcgcgccgccgcccctacaccgcatccacgccgcgtcccgcttcgcctcctccatcgcgcgctgcttcctctccccatcgcgcgtgtgccagacgcggccctccgccgacaccctcgcttcctctcctggtctcccccatcacgcgcgccagcgtgggcccgctagccggccacgatcgcgtctcctctcattcctagcgcgagccagccgcgggcccagcatcgtcgccgcgtcgcgcttcccccatccctccccctgacccaccccccctccccacccacccaccctccccctgaccgtcagggctgtttcccttcctcgcttccacccaatctttcgctaattcgtttcaccttccccattccatctccctcgcgtgaaactgatggcgcatgccctgcctcctccacttctacaaatggaaggagcattcaactcgacgctcctgcactttatcttcttttaacccccctcactcgatgccactcttctctgacctctatcatcagatttattgccaagacatgataatggagtacttcaaggaccttgagtccttacctctctctctccaatgttcgtctgcggcatcaccatgcaccatggatcccaatcttgcctttttcttcttgctcatcggtggccaatgcaagatcaatgatattattttgtaaagtactgcaccatgtagtcaccaggcctggcctatggcatatctgatcttagatgtggaccaaatgtttcagttatccggtaagaaagtggtaagaagaacaatatttttggttgatgatatgatgcgatttgctggtacgttcttatgggtggtatttgctgcttttagcacaattttatacttctgcatacacaattgtttttctcctaatatctgaaggtatttatttaatttaagtgggcaaatgtctttatagtatgcagatttctgaccagattgtacccaaggtatgatagagatctaacattcttatattcatgtccttgagacaaattgttgcaacgagtgaatcattttctgctctatggaaatttgctcaaatccttcttaattgtctctctgctgtgcatatatagctcatgttactgccttgcttccaagatattgggttcaaatgtaagataacactaataggtatctgttgttccaaccataatctcgatctgtttaactaatgcagactctgtttgcttttataatgctcattttatacatcatatgtttacggaccattaattaggttcacataagtatgtgtctcactagacgctaccttccattgaaatattatttgttcatatcttatctgacatttccatcttataccattttcctttagtttgtcacattttaaacttgctgctgtaagtttgctaactaaccatgtgaaacaggtcaacattccttagtctcaatacttcaatagtgcaggttgcaattcactacctgaaatgctcatttcagctcaaagttttctaggctatcgtctgctacataaaatccaactgatatgtgagagtcctgctcctttaggtgtgtcacgttctgaattcagatcagtaaagttttagcgtctctcaggggtggacccaggcctggggcaacctgggccgcggaccaggtcgtgggccgtgtagtaatggaccccccacctagatatacctctgaaattttggcccaaggcccactaaatcaacctaaccctaactcccctcctcagttccttagaagcgagagacagagatgggagagcggcggcgtggcgcgacgccttcttgctcgaggctcgctcctacggtcctacccagcacgacagcacgccggcgccgccgcccgcctggcacgccgtctcctcggctcgctcggtcgctccctacctgcctctgccttgctgcctccttactcctcagcctcaactcctctcctcatccggctccctggcggacaggcggacagcaccagtgcgccatcactgggaccggcggtcggcaacgagccgacaacccccaagggccaagggccaaggcgcggctttgtgctcatgagcggagcagcaagtacgggggtaagttttccatctctattttcttctgtcaatttgttctttacttcttttctcaaatgcctaagtggctaagtgcctaaaatactgcagtgtctatagatctattgattccaatcaatttatttaacttgcaatagagatcagaagatgaagaggcctaggactacattgaaatctttttatgccccagcaacaccccaatccaatttagacccaaatcctccacaaacagcgggaaccggaggtagtaatactcagcaagcagcagctgttgttgaggcagccataggagaaactggagctagagctagtaacattcaagttcaacatgcccctagtacttgtgaggcagcccctagtattgttgagacagtggggagtaatattccacaaccagaacaagaacctcacaattcagagacagttgagcttaatccggctgacatagttgctgatcctgggcttagaaaaccaattgagcaatttcatatagacattagagatgctgttagaagggaatacttgtcaagaggtccatgccaaccaattggtcataaatatccacagaagttaatgggaaatcgacaaagaagctttcatgactcgtggttcaaaatgcataattggttggagtatagtattgccaaagatgcagcattctgtttttattgttatcttttcaagcaaccaagacctgataattttggtgttgatgctttcacaagtaagggctttactaattggaaacatgcaactggatcttttaatgaacatgttggtaaagtagatagttttcataatagagctagaaaacattgtgaggatttcaaaaatcaaaggcaaagtgtatcatataagatggatagtggatctaagaagttagagcaacaatattatggtcgtataactatgatattgggtgttgtgagatttcttttattgcaagcacttgcttttcgtggtcatgatgaatctcatggatctagcaataaggggaactttctagagatgatagaatggtacaaggagaaggataaagatgcccaaaaattacttggaaattctcctgggaatcatctattgacttcaccaaaaatacaaaagcatttgtgcaaggcttgtgcaaataagacaactaaagccattctaaaggatattggtgagagaaatttcgccattcttgttgatgagtctcgagatgcatctattaaagagcaaatggctgttattttgaggttagttgctgtcttttgcattttccttgttcttatattttgaaactgaccatattaacaatggtattattctatgttatgtcacataggtacatcaacagcaaagggcaggtgattgagagatttcttggggttgaacatgttcctgatacaacatcagttgcactgaaaatagctttggatgccatgattgttagtcatggtttatctatgcataaagtgagagggcaaggatatgatggcgcatcaaacatgagaggtgaatttcatgggctgcaaagacgggtattggatgaaaacccctatgccttttatattcattgttttgcccatcagttgcagctagtggttgtgtctgttgcaaaatgttgttctcctgtctcagatttctttaactatacccccatgattgttaacactgtcaatggttcttgtaagagacatgatcagctggcccaagaacaccatgataatcttgtgagtagtttagagactggggagatattttcaggaagagggaaaaaccaagcaactaaccttgcaagacctggggatactcggtggggttcacatcacaaaaccttgtgtcgtttgcagcacatgtggaaagcagtcctagaggtattagaaaatatatgtgaggataaccccactacaaaaacaactgctacaggtttgctaaaacagatggagagctttgaatttgtgcttatcatgcacctaatgattagactattgggtaaaactaatgatctgtcacaatgcttgcaaaagaaagaccaaaatattattcgtgctataggattgattgggaccacattgcaaaaaattaaccacataaggcagcatggttggcaagaactctttgaagagacaaagacattttgtctcaagtataacatcattgtgccagatatgtcagatacaactactactaggggtcgttcaaggggtcgtggaggtcaattgataacttaccaacatcatttcaataatgaaatctttaatgtggtacatgaccagcttattgtggagttaaacaatcggtttgctgagagatctacccagttattgagatgcattgcttgtcttgatcctaggaattcttttgccaattttgatgaagataagttaattgagcttgctagaatgtatgctgccgacttctctccatatgattgcatagtcctaaaggaccaacttgagacatttatagctgatgtgagagcagacccacatttcctaagttgcagtgaccttggtaatcttgcaatgaagatggttcagagtgatagacatacagtttttcctttggtttatcggctcattgaattggctttgattttgccggtggcaacagcaacagttgaaagggctttttcagctatgaatatcatcaaaactgagttgcggaataaaatggctgatgaatggctcaatcatcgcgtggtctgctatattgagagagacatatttgcaagcattgataatgataagatattaactcattttcaagaattgagaaccagaaagatgaagctacctctccctagtggtatgtcttattcttgttctgaaatttgtgtactgttaactttgattctcattttctcaatccatggatgtaatatgtgattctttttccaataggatcaagatctggagctacaattgaagaattcaatgaggatgatatagactccgaggaagataacacgtagcaaggtatttgaaaatgtatttgtacttctttttcgcaccgcaactaaatttgtaccatacattttgatcgtgcattagtattagtagcaaactagcaatgtagcatctattattgtatcattgtgtgcggtggcaataagatttggccccgggcttagcaaaatcctgggtccgccactggcgtctctgtccatatatacagctacatatgccagacacgaaaagagatatgttatatcaaataaagattcggcataatttatctttgcttttactgctaacagttattacttctgtacatacatcctttggattgcgcaattgaggccgaatttctcctcgaaaaagcttctctgtaggaacacaatttctcctggaaaaaacttctttgtaggaacacacatggcactagctgttgatgcatcaaatccaagagatcctgcatagctatgggcctatggctcagtgaagctttaagctccattgcctttttggtatttattatttttaatcaattttattttttcattttactacaaatataattacatatattttcagtatggtttattcaattcgtgagttaaaaatttactgcattggagttgtatgttcaaaatttttaagtcgttagtcataaatatttttagcatgctaattgctataaacttatatttttatctagcaatttccgcagcaacacgcggggtatcatctagttacaattaaatatcagacatacttgaaaaaaaacataacaaaactctgaatttgtgatgttctctttttttttacatatgtagatttaaattaatatagtatatttgtgaagcgatatttcacaccctaaaatatgatgtgaatttttttaaaaaaaaattatcatatagctaactattatatttaagaccacaatataacttttataatttagtttaaagaatacaatgaatcacaaattagatatataatctaaaaataatttaaaatatggtttagaaaaggttggttggatattttatatttttattgtagatcttagtttaacgacatatttatatttgtgtagtaatatattttttatcctattttaaagaccgttaattctttcccgaaggtactacatacgtatgtttttttttgctttgtctttttatctatatgctttccttcgcttccatcaacggtagttaagatagttatattgtagaaaaatcatattttaaagaccgtcaatttttttcccgacggtaccacaaacaaatattttcttaatctagaaataatttaaaaaatagtttaaagagcgttgattggatattatatatttttattatagaaattagttttaatgcatatttatacatatttatatttgtgaagtaatatatttttatctttatattgtagaaaaatccttttttaaagaccgtttttaatttatgttttttttggctttgtcttttaggtgttttccttccggtaacagtaggtaagatctttatatattgtagaaaaatcatattgtaaaaaccgtcatcttttcccgacggtaccacagacgcatgatttatttttttactttgtctttttttttttatggacgtgctttccttctggcaaggcggcaacagtatgtaaagctattgttttgttatcaatagtatacgtactcgtacgaacgtacgggagcagtagttccgattgtatcatttatacatgaggaagttattagtttttttataatactagcatgaatgcccgtgcattgcaacgggaagaaaaaaagaaaattgacttaaaacatagtaaatatatttttttggaatatttgggttttttaagtaggtaggtttatagttaaattaatttataagtaaagtaagtgctagaaataaaatgatacggttggatttaatttttattaaattctccatattaattacactctttgaaactttcttgaaaattacagagcttagttgctaattttgataatacaatcatcatttcagcatttatttaaataaaaatctatataaaaaatccttatttctctataggccattttcggcccattttcctcttcagcccgcaaccgagccggcccgctttcctcccattccacttctctccgcctcagcccaaaagcacccgtcggcccaaagaagtctaagtacgctccccttgctcctcctctctttgtgtggtgggccctaaccgaaagtttaaccacgattcggcctatcaagcccgcgcggcccgtcgatggatgccggcccgaagcgggactgatctgagccgttcattttgatggacgactcagattggttccgaatccatcaaaactcccagacaaagaaacctaaacctaattccttttttgccctcccatacccccaccgttggccgcttctccccttttgtcgatccctctccgccgcttcccctccccctacccccaccaacggcgcctctccctaccggcggtgccactcccatccccccaccgcgagctcctcct

SEQ ID NO: 9812 - DNA, 6973 bp, Oryza sativa
aaagtggatcctctcatcaggatctacaacttttggtcaaaaacaaagttattttggtcacttcttcatccgacaaagttgtttagatttgtaaataaaagttgtagatcctcatgagaagatcaactttgtttttgaccatatttccatttgaaatcatttagtatttacaaatgctgtttagatttgtcatattgtcaaaatcaatttcaagctgttggaaacaaagttatatagacaaatgaccaaaataaaagttgtagatcttgataacctctacaattttgttgttgaccatatttccatttgaaatcatttactatccgaaaatgtattatgactaataaaataaattaatatacagcagctatatattttgtactcacaaatataaagacttatctggaaaaatggaaaaatagtcatcggtgacgggccttagttcaagcccgatagagattaatctatctctatcgggcattatctttgggccggtcacagatgactcatccgtgacgggcctgaatgtcatctcaatcgggcattagtatgtagcccgtcaccgatgagtcatctgtgacgggccctacggcaaagcccgattgagatgactcatcactctactatatctagggtttctcagatcggatcgaaaatttttctaagtcccactacagtttcccgcctccttagaaccctaactcttacttcgccgccgtcgtcctccctcgccgccaccgccaccgagaccgccaccgccgccaccgagcccgccgccgccaccaccgagcccgcctcctccaccgagcccggcgccgcctccaccgaccggcgacgccctccaccgagccaggcgccgccaccaccgagcccgccgccaccgccgtcgtcctcccacgagcctctacactgaccggacaggtgttggccttccttgtcgtcgccgcccgcgtcctcaccgacgcacgtcgccgacccccaccgagcccgatgccgcccgcccggcgccgacctacccgaccggcatctccaccgaccggcgccgccctccaccgagcccggtgccgccgccgcaaactcctcctttgccgagcccgccgccgccgccatcgagaccgctgcctccaccgagcccaacgccgcctccaccgaccggcgacgccctccaccgagcccggcgccgccgccaccgagccccaccgaccgtccttaggtgagccctccatcgcgccgccctatgctaactgtgaatgacatgtcattcaaatgtggatgtggatgatatgtgattgaactgtgagtgagatatgtcgatgttgggatgaaatgtggtgcatttatgaattttgtgatagatgattgtagtgattgatgaaatgtggttcatttaactttatttatacgcaatgcggttcatattgggatgaaatgtggtttatttatgttgggatgaaatgtggttttttatgttgggatgaaatgtggtttatttatgttgggatgaaatatggtgcattaatgaaactattgtgaaatgtggttaattttattactgtgagatgtgcaatttcgtttatttatacatggtgcattaatgaatttagtaaatagatgaaatgtggttcgttttattactgtgagatgcgcaatttagtttatttatatgtttcatttatttttctaagtgacattaaattcattgtaatagattgtagcactcaattgtgtatttttgttatttaaaaaaaaagaagacgatgtctcagcaaggcaaaccaatatcgacgacaactagtgggtcctcaagggcacgtactcctaggacagggaacaaaatccctaaggaacggttccgcataatagcggtggacgccgtagggttgccgacatctccaaggaaaatattgagccgatttaggtctatctgcggggtcatagggaggcagaaattcagtattctgcaagatgacatcaagctcgtgccggccgcagagaaggacattgcttggctaacgttcaaggagagctttgattatcctgcggagcatgaggactatctcaggcgggctgctttcaaggttatgggcaatgcttggaagaacttcaagactaagctagtcggcgagttcgtctacaacccggcgaatccagatccaagagagaaatttccttggatcacggaataggtctgggaggaattccatgcgaagaagttgacccccgagtctagagctagaagcgaggcatatcgcttgctccagaccaggaaccagcatccgcaccggcttggcaccgccggatatgctggtaaggaagaggaatggcagcgtgaggatgaagaagcggaggaatcgtgcacaccactcgtgtttggcgatatcccacaccctcgggctaggaactgggccagggccaggtaccagaagaatgatgatggcacaatcttcatgccaaatgcagaagatcaacgagtatacgaagctacagtaagtgtctagtcaaactagatgttcgcattgtttcccatcgtgcagtttatttaaccccactaaattgtaatgcagaaggagttggttgtcgagcaacaagtctcgcaagaggcctgctctcaaagacgcgaggacgacctcctcacgaaagcgttgggcaacaaggaacactatggacggacacggggcgttgggtcttctgttccctggaagtatggatttccagactacgcgtggcagtacaagaagcggacttccaacaaggcggagaaagatgcacgccttgaagccaagatccgggcgtcaataagagctgagttgacatctgaattcgacgaaaagctcaagtcgatgagggccaagattaggcaagagatccgagaagagcaacagaacccctaggccgccgctgctgctgcgcacgaagagttaggaagtcccacctaaaaacgcagcagttgtgcatcaactgagttggcggaaaatccaacatcggtcgacagcgccgtcgaccacataacggtaactgtgaacttactcaatacatgaaagacttaacgaatccatatgatatataatattctaaaaaaattgattaatctatcgcaggaaccaacgagctgcaccctcacagttagggtgatgccgaccttcacggttccagcagccgagggacttgcgtacaagccgaccccagagacaagagtgcatggagcgcaactcagggccgactgtgcaaaagttcaagtcgattcggtgaagcccgaatacgagctgttccctctgaagtatccaccgaacgacgaggtcctctcactaggaaatgcccgtggtaccttcatccaatggcccaaggacctcattgagatcagggttacagcgaggccaaccactgcaccaggcggtcgtccaccaaagagacccgcctctgctccttcagcccctcctgctcaagatcgtcatgcacaatcttacgatgtgcagttgcagtacgacacggattttggggaggaccgaacggaggccgacagcaaggcgattcatgaacccccaccgatgaagaagagcaggaaggcacactcttccccttagagaattactctcgataaacccgaagcaaaggggagaggaaggggaggaaaggtgcaggcctcgcttctagctccaaggaagctagatctgggcaagggctaggaaaagactaagggcaaagaggtcaagaagaaatacatcgctccacaggagttccaactaggcatgccattggttggagatgacgtgcttgccgcaatgggcaccgcttgcaaggaccttcacttatactacatggagaaatctaacgccaggaagccaagtaaagttaccgatatccttggagagcacgatggaaagccattccttggtccaacaaattatatcgtggtcgacttcaaggatcttttcgacctctacaggctccgagcggtggacacaagcctccttaagtgctactccttgtaagtattgtcgcccaactcaatctggtaataacaatcggtttaacttgcttacaagatcgtttatcctgtgtgtaggttaagttggcaatggtgtcagaagcatgcaccggaagttgccttccttgatccacaagtggtcactgtcacaaatctccagaatgaccgtcaaggaatggtcaactacatctacgacaccttgtggtcccgccgagacaaggagtacattatgtgcgcctataatcaatagtaagtgtgttaactaaatatacacaacagcatgacacattccttgagtacttaattaagtttcactatattaatgccgtagtgcccattggatccttctggtcataacacctaagtggagtacatgtcactacctgaactccagaattgataagaacgcatatgattggaccccaattaaactagcgatagatgaagcgtgggcccaatacgtgcaaagaggaggcctcaggaagacaggacatgacaccctcatccacaaaaaagacttcccggtgaagcaacaaataggtgaccagtgcggattctatgtgtgccacaacatgcgcctcctgtatagagaaaaggtgaagactttggctgagtttgaggtcggtggtctcaattgtgatagactaactacattttagtacttatatatgatcgatcaactaatctggaattatgacaatgtagggcacaataaccaagtctctgcctaccagctttgaggacgttcgcgaggagatagctagcttcatcctctgcgaaataattaaccccaaaggaatgtttaggcttaaactaaaatgatgaacaatgttgaacttttatgtttaggcaatgatgaacacttgttatgcaactgtgatgatgtaactgtgatgtttatatttatgtatatatttcatatgtttatgttacgacttgctaaataaatatttgatccaattaactcggttttgcaggtgaaacatgataaatatttgaatggatgtgaaatatgtgaatggatgtgaaatatgagatggctgtgaatgtgtggttgtgtgaaatatgttgatgtctatgtatgtgaatgcatatgtatatgaatgggtgatgctggggagctggggatattagatatctgtgtttgtttctgtcatttttgcagcgggcatggctagcaaaagcctaaggctagccaaaaaacaaaatttattttttttttgtattatagtcatctgtgacgggtcataactaaatgcctgattgagatgagatcatttgtgacgggctctagtttagccccgattgaggtcagtagtcatctttgacgggctatagtttaggcccgattgagatgagtatcatctgtgacggggtctagtttaggcccgataaaggttagtagtcatctgtgacgggcgctagttgtggcccgatagagataggtcatctgtgacgggctgtagtttgactggtcgtctgggacaaagctatctgtgacgggctttactcagggcccgattgagatatattcattcgtgacggccgtttgcccgattgagataactcttcacatcagtgacttctagcctgtgacggacgctgtgcccgattgagatggggcttaccgctcgattgagatgagggtatccgttctagtggttgtaattatgttgcttcaatgtcaatttctcatcgaatggaacttggtagtttaatattgaaggactatatctcaactatgctacagattgaattaaatggggtaactgcacacggacactttacctgcacatttgacattgactcttaattctgaagtagttggtgttgcatagtttacttatcattttataaagtagtatagtccatatttccggctctacaatattattgtcttattgataatttgactcaattttttttttgctgatgctgaatatatcatggcgatcacaagatattttggtgtcatttctgtacaaaggaaatgctccttgcataagtagatttgccatctttttgtgtcatcaggtagaatgtacggttcctcttttgtaagtggattgtatagctatcctatatatgtactatacatggcatttccaattagatggagatggtatattgtcgaaacaagaattcggcaataataaaaggggtagcgcacaagacctgaaagtggatggatgcggagacaaggatttagacaggttcaggccctctcgataagaggtaataccctactcctgtttggagatttgaatccgccgggtgtattatagatctgatgatctagttgtgtatcatgccctctagagggcttcctgcccaccttatataagatgggggtcaggattacaagatagaaaccttaaccaatatggtatcggttttctaaatctactttacaatattatcaaaccaggactttaggccgttccataatacataaggaaacgtaatacctaagtcatgatccgttatatttcatagatataagttatcccctataactagtcggataaccacgccgtgtgggtatggggtacctataatctccacggtagcccctgagaccttcaccgtcgaaaagataatcttctctcgaactagattactccaaagccgagtgcttcaatcatcttcgccatggtttcctgagtacttttaccaaatccgaagactatggagggctgaaaaatagctgaatgtaaacttaggtgcatcgactagatgcacctaataggtttagcccccgactatacggttagttgagcaaactgaacatatagtcaaggagtaaataatccaaccaactgagtggtttttgataattatagtcaactaggtgatttgatagcatatgcaggtgtgaatcctcgaataacatgatccaagtgatataccgactgctttgtaaaatatgacgtgtaacctaaagttgacttcatcattgaaaatccacatagcaacccagctataaag

SEQ ID NO: 9813 - DNA, 11315 bp, Oryza sativa
gcatgctgccgtgcgcgtgagagagagaggggaagagtgagacaggtagtgagagagataatagagaggaatagtggaagacgatatgataggtgggtcctacatttttttataaatagaatactaactagagtgccacgcgtacgccacatagaccaaaactaccgcggattgggtcgaggggggtaattcgtccggtttgcatagttagggttgaagaatatccggttttgtggtttagggggtaattcagacgaccgtgatatttcagtggtggtaccttctatctagacattgacaaaaaattgtgttcacgcacaacatgaagaatattctcttaaagcgcttggatgatgaaagtatcataattttagttttccgtagctacgcacgggtattttttctagtatatatctttacctattataaaagtttaagatatttttgccaagaatttttcgtacgttgtccgattccctccccgtgatcttttttttgcgatttttccgtgttattttccagtccgactccctccccgttcccactcgtgtcgcaccacagcgccagtaccacataaggcggatgttgcacaaattcaaatatcgatacaaaatccaatcggacatagaatatagagaaaaagaaaatgaaacaagaagaataaaaaaactgcacaaataaaaaaatcgcacaaaaaaaaagcccacgaccggctcaaatcgatccaattttcttcattgagtacttcaatgcccatccccaaattgaagatgaatatacgaacaacaaacaataatccccatatccttatttcaacatatgaacaacacatacaaatcctcaagataaaaaaaagcatgaataaacatgaacaaatcacacgagtaattcattatcatcgccttcgtcactgcttctgcttctggtgtgggaggaagaacaggagggggtggcgtcaccatcgcacctcctagatcagcccatctctgacctccaacaccaatggatcggccaagccaccagaggaaagtagaagagaaagagaggagaagaagggcatttgtcgcacctgcagcccgctgtcaccgtcagctcgttaccatggaggtcgtcgccggttgatgccgtagccggcggcgggaggagtccggaagaccgagtcgccgtcgccgccgcctcgagtcgtcgtgcccttgccgggaagggtgagtgcaggaagaggaggagatggagcagaagaggacggatctgggacgccggaccaccgccgcctcccctcccgccagaagggagggcgccaccgcctgccaccacccatcagcatcgagccctcccgcggccccatggcgagggagaggaggcgagggacggagaggcgtcgctgcgcggaaggagagccgcggacgccgaggagtagcttgccggtgctgctccccagctcgttgcgcaccgctgctcctgctctctactctctaggcatcattgccgcgggacggcgggtcgtgggtagagggagagaggaggcgtggagaactagagaggagaggagaggatgtgtggctggtgacaggagagagatggggaaagagagagagagtaaacgagagagggtggatagagataaggttctttgattagaaacattcacgatattttctcagtaaagtactgtaccagcttctgttttcttatactaaaatgaaatctacgacctagatatgctattcattgaattgaattccgctgaaaaattacagtgggttgagatacacatatatacttagtgttgttttctttaattattattttttactagtgaaaatactcgtgcgttataacgggtgaaaaaaatatttaatcataacatacgtttttcacgaataaccatgtcaataacaatatttgtatggatcgtttgtagctaagacaataagaaaattggaacatcttcaatgtaatctcgcatgtttttatttaatttttttacggacgatggaaatacattttttctcacgcattttttattttttacaaaagacagaaaacattattttaacgctttttctgacttttttctcacgcatttttaatcgtttttattttctcatgtttttttagttgtagaatgaaaacttctctttttaagtagttatattagattagaattagagaagagatatatactgtctactaaaacgaacagaaatcggacttcttttccatgctttttttccgctctttttattttttttcatgcgtgtttttttatttatacgagccattttttcaccactttcttaggaaatcggatgaacttttttttacatgttttttagattttttttatttttcgtcttttataggaatcagacatttttctatttttatgggaatcggatctagctttttttcactttttttcacctttataggaatcggattttttcacgttcggacctatggtttttttgccactttgtggaaccggatttttttagttgtttttcgctattttttccttttttagggggaatcggatctacggttttttttccactttttagggtagtcggactttttttttttgctttttcactatttttttattttgacggacgaaggaaacgttttgaaaattttgaagtagtagagattgctgacaccaaaatcaccaaaacttttctactattataaaaattgaagataattttaccggtactctggtacgtcatccgtgtatgtgttggtttttaaccgtattgaaaaatacagttcgttcgcttttagaaatccagatctatatttgagctaggttttaatttcgttcgcttttgaaaatacataaggagtcgtataaaaaatctcttgaaaaaaactcgcatgctaacttaacatgatttaatctcttgaaaagaaaaacttgcatactaacctgacatgattttctagaaaaatatatatccaagcgaattctcacagttaatgtataataagattaaaatagcattcaccagttgcaacgcacgggcatttatatatatatatatatatatatatatatatatatatatatatatatatatatatgatgtgcgccgcgttgtgtttcgctttttggcagttcgatcgatcttatctcgtttttcttctccgaatcatcttccacaatgcatgttggaccagacgcgccaagtcgatgaacgaacaactagcctgctagatcggtatatacacgtacatatatcactgtaggtgttggaatttgaatcatcatggcggcggccgacctcctaccggacgacgtgctggaggagatcctccgccgcctcgccccgtcgccgcgcagcctcgccgcgtgccgcgtcgtctgcaaggcctggcgcgccgccgtcgacacccggtgcccgcccccgcgcccggacctcctcccgctctccctcgccggcatcttcttctccggcttctacttcgcacatgagtacctaccggggttcttcgcacggcgggggcaccatcactgcgaccggatcttccccaagctcgactacctcgacgacgcacccatctccaagctggaggccatcgaccactgcaacggcctcctcctaatgcaagagtacatcgtcaacccggccacgcggcggtgggcacggctgcccccgacgccggagtggagccccgcgggatcggacttggaggcggtggtcaccgactcatgtcgcgaggagtacctcgtgtttgacccaaccgtctcgccgcactacgaggtgttctccatccccgagcttgtcttctgcagaggtgatgacaaagacaatgccgaatcggtggtaagacagcatgagtggccgccatcgccatttgtcgtgcaagtctattcgtcggcgacggggaggtgggagaaaaggtcgctcgtccggcgaggggaggccgccgggaccattgctgatgtgcactactcatcttggatggcaagtcaccacctctacggcgtttattggcggggtgcacttcacgttcagatgaaaaataacgatgttataaggtattagcttcctccgttttatattatagatcatcgctttgacttttcttttcaagttaaacttattcaggtttgatcgaatttcttaacaagagagcaagcactcactcaagctcattaattatttgctcatcgtttttaaactcaaggaataaaaataaattaaataaaaacatacaatcagtttgagaaaacaaagagcaaattgatttatcttttgctttaagtaattattaattcttttcctatcatttgatttattgttaaatatattttatgtaggcatataattttacatatttcacaaaagtttttgaataagatgaacggtcaaacatgtactaaaaagtcaacggtgtcaaacatttcgaaacgggggaagtatttgctaatttgttggttttgcagaataaccttgttagatgacaagtatcaagtgatcaagtcaccaagcgatatcaatctaaacaatcatccttatatttaccttggaagatcaaagaagggggtatgctgtgcatcaattgatgacaaacaacatcagcgtcttcaggtttggctgctgcacgaagtactgcttggtggtggtcagatggagtggatgctgatacacgacgtcagtctcgagcagatcatggcagatttccgctggaatcctgaagctgttaagccatggatcaaacataatacgtaccgtggcgagaacaagaataatgaagaaatatcagaagatgaatctcctggttgggactctgaggatgatagcatcgttgtttatacggaagatatggtacgatgggacatgaatggatacacttatatccttggactccatccttttaaagagattatctttttatttaactcacatcaggatagagtatgggcttaccacttacacagctcaaaggttgaattcttgggtatgttatgggtaggcttttcagaggagatagggcgacgccttgttggattggagatttatcttaaaacattttgttactaatttataataatccattattagtatactcaagacggatcttcgtggtcatatggccatcttgtctccgtagtttctttcatccacaggtgtatgactggctatgggcttcgtgtacatggcgtcgttacatgggtagagacgatgatggtgttctttagaaaattggtccttaggatttttctttgcttcactggtgggccatctgataaatggtgaatggcttataaagattgtggttgcgttgacagatggtggcgtaggaacaaatctagttcgggattggagcacagcctctctaatgtttacttaggggttctatggatctattatttcggatgtacgaatattatgatcttcaaaagccactatacaattgtggtttgtctgaatttttcttggttctttgtttgtcctctcttccactcgtgacaggattggtgagaatctggaacaacatagggtggctacggttgtgatggattgttatgacctgagattggttgagatgaacagagagaaacagaggagaatagcgaaaacatagtaaatgagttgtttgatggtattttgtagaataaaactttatcagtggcaatattttagaacccacgctttgtcgatagcatggaatggattatctttaaactaaatgctttgttctaacctacgtataatgatttgcacatatacataaatctctaaaacatgaattcaagggtcaagcgatattttttcggtcagcaattggcctcgcgcatatattttgaatctccagcaacaatcaaatggccaacagtacaccatatcactaacatccaaattttcaaacacacgttactgaaattgatccaaacagttttggctatagacatcggctgtattcagccttgaaacctattccactacgacatatcactgcattgcagctcattccgcatcagattctaccatgtcgtcgttgctgtcctgttcagtaatgccctccctctccaattcatccataaggctcctacctacacaggccatgccgcgaccgccaccccttccacttccacgtggtctccctctcctccctctacccctgctcattgccttccttaccttttcgaagtttgcgggattttttgggcaggtagttgtgtaatggccatccctcagtccacaccagctgcacaccctagtacagagcttcttcccccttgcaccaagtgatacattctcttctggacctactgtccgctctttagtctttggtttgggtggtggttcttggcttatgacttcagctgatgtgcccgcaccattgttgcgtgcaacgatatcatccctacatgccacgctgtctggaagcatctcttttcctttcgcagcactttaagggcggccatggctatttcaaatgcaacccttgacttactacctaaccgtacaatagccattgcctcagctagcagtgtcttttgtcggtaactttcttccacactgtcaggtccagctgtaacacggtcacgcctgtcaaatgacatgtcacttctggctttcatcgtgtagcgtcagagcacatactgaggtggtatcttctcgacctgagcatggatgaatgtccgaagaaggtgcgtgcataataaacctaacacaaataagcaatttaccagcagaaacaaacaattcagcaagctaaatttgttattatgtatctcggactggaatcagaagagttttgttcttaccagtatgttcccactgcttgcactcacattcataacgacctttctgaacgtccgctaacactttaaattgtagttggcaccaatcatgcttctcagaatgctccatgtccaacacaatccacctgtttgtgttgccaatgtccatgtcgatcctgaaagctgtgcaatcatccaatgcctcctcgaacaacttgaacacagctcttgtgtacacccttgacatctgcaccacgaatgaccaccttgtctttgttatcggcatgccctgcatatgcgatggtattaaaaacaaagtggcccactagtcagcagggaatgcaaaaataggcaacgatatacataccaaacaagccctggtctcagcagcctccttcgcttcccgtgaaattatgatatcaagcatcctacgcgcaaaactgtgcagattggtttggtgatcgacgaaatttctcttagctagtttgttcacactctcactctgctgagtagatgtcatcctgccacagtagtccttcttgaagagcgctgggatccatctgtgccttatttcgtacaagttttgcagggtcacactatcctgcaaatcaaactcatcaatgaaccacgaccacgcattttcaaactcctgtggggtgtatgtctggttcacgcacaacaacaattccgattcaatgcgatcgtcccttgcatatagaatgttgagtgcctcagagtgattcttcagtatgagccacctgcacagcctatgtattgtcttcggaaagacatttgttatggccaccgcgatcacattgtcctggtctgcagatacacaagattagtgaatacttatcttatcagttcacaatgtgtttactgctgaaccatgagctattgttgacataaacattgaaggaattacttgcctgttagcacgcatctaggcgaggggcaatcctccatacagtttttgaacgttttgaatagccattcgaatgattctatcttcttgtctcgcagtagtgcacaaccaaacagagtgtcttgtatatggtggcttgctccaacgaacatcgccaaggacatcccatatatgttcgtcttgtatgtcgtgtccagagtgactgcatcaccaaagtccgcatactcggcctgactgctagcatggctccaaaaaatgttcttcaccacaccatcctcatcgagctgcatgtcccagtaaaatttagagttctgcatcttgcattcactgaagaaagcgaacagtttgttgatatcatccgccatctccgcgcgtttgttagcagccctcctgtgtaaataaatatcacagattcaatatgaaactgtagggggttactgatgcaccaacacaacatgcgaagtgacaaaaaaaaatattcagcacttcaacagcaccatataatacctgatttccacgtccggtgatgtgaatgggacattttcctgaccttcatgcatgttttgggtaacacgacactcttgcaccgtgtcagctctgttcctatgcacttcaacagcaccatataatacctgatttccacgtccggtgatgtgaatgggacattttcctgaccttcatgcatgttttgggtaacacgacactcttgcaccgtgtcagctctgttcctatgcgacctcatttgtttgacagctgatggcgatggcgatggcgtcaacgggtggttgtgccctataacgacgacgtcaaaaactacagatgacaatttgccgtcagttgtgacattcttgattttaacatatgctttgcagccagtcctcttcgatgtccgtttcctctccctgttcgcctcatcgcccctgtatttgtgcctcccctcccttgcgcagcatatctcccgtatcgtccgcttcaatctgcttttcctgacatcaaaacctgcatggcatgcgtatttctcatagaaatcgtacgcgtgatcaaacgattcgaacaccatcccctccttcggcaccaagtcagaactaaccccaggtccctgccagtagtcaaatttttacaatcatgcatacggtgaaacttcacgctaacagactaaacaaaacaatgcttaattgctttcagtaaggccttgttcatttaatccctcacccaaggggattgaaaaggattcgaaggggattaatttcctaactaatcccctccaatcccttcctcatggggatggataactaggcctaaaatggatccgactgtgcaaaatagattggaatgactccgatgcacaactgctatcaataaaatggatctgaaatgggggtttgtggggggggggggggggggctcacatgggtgtaaaccatcgatcgactcggggtcgccagattcgccggctgcggagcacgaaaccgtgccgcctccacgctcctcagtgggatcgactcctcctcgcaggtgcggcggccatggcacgccgacgacgtcgtcggcacatcaccatcgccgccgcggccgccgccgccgctacgcaagcgcgaagcgacgggcaaggcggcggaagcagatgatggagagggtggcgccagggtcggggccgagcacggcgactccggcgatcgcataccggcggcgaagtaggatcgccgcggacggaggagcctttggtggttgtcttcctggagcgacacgagacgacgctcacatcggtttttacttttttaccccacggtcaattgttttgcggggaagttactgctccttccgtttttcctgtggaagcgagcgtattatacgggatgttttcttcattttttgcgaaatatgcggatctatcaaacgaggagtcgaggagcagttacgcaaatagtttttcttcacgataattttttaattcatgtatttagagatataataaattatgtgttcagtaattttatgaccggtatctaagtaaacaatacatgcagcagtactcttagcgaacaatagcctctaagccattttgtagaacatgatactcgctccgtcccgaaatatttgacgccgttgactttttagcatatgtttgaccgttcgtccttcgtcacgttgctgaccgcaaggacggtggtggcgggacgctctccccacgagtaatcccagtagcggcaggtcgcgggaggcagtggtcaggtggtaagcgcggcggatccagccacgtcggaggtagatccgcctcgcccgatggcggatctggtcccccctggccagatcgagttggagaggtggcggtagcgggagtggtcggcggtggcaatggctagatccgacgggaggcaatggctggagtagtcaacggggtggatccccccttccctgaggcagacctatggcgcaacccagtgaggcgcggggtggcacggtggttgtgaccagtggagtaggaggccgacgtcgcggcgaagggtggttccgatagcggcggagctcacggcgacggcggcgacagatgccaatacagcatgcacgaggaggcgcgacaggtggcggtgaaggctgacgcggtgtgaggaggtgcgccggcgatggcggaggtcaatgcgacaagggtgacaccacgaggagactggcaaagcggtgggctctggtgcagcggtgcccatgcgccggtggaagttagatggcattggagcaatggtacgtcaactatggataggctgtcggctagcggcaggggaaacctagcccggctttgggcgggtcaacaatggtggcattttcgagcatcactccccctcttgagggtgttggtgtgccgtctcatcccctgtagtgggactgccgggtgaaatcccagtttgcattctttttgagacctcgacggcagtggtggcggctctttcgtcgcttctctccttggagacgtcgtctaggtaacctcttgccgaaacctcccaaacatctagtgcaagctcgctttaaattcatgtctttttgggttgtcgccctagcttatgcaagttgaccacgtcgaagggtctaggggagagcagttctcttcttccctgtcaccccctctccctcaatcccaaaaataaatatggatagagtggggtttgtgttggttgtaagggttgggttttgggcgatctcggttgtagttcttttgttggcctagcgacagctggtctaatgctagcattctattcggtctttctgttggtgatgacggggcgtagatagtggtatatttttttcattttcctagtcacgaccacggatcagatccgtaatcttagtaattttttttcatactctatcctttaaaaaaaatcaaggttcacgaagaaaaggtcgatgtgtagcaccaatgtcagatccaaattatcaaagcagccatactatgttactccagaatgaaaatttctcgtcttctgaatgtagtaggagtacttcaattttgttgcataacgccacatttcggacaattaagaggatcgcctcaagtgatcatatcgaaaacatcgatggtcacatcaagaactatctgaaaagttttattcaaacttgttgtgtcgagcacaaaagtctgca

SEQ ID NO: 9814 - DNA, 10755 bp, Oryza sativa
tcaattgggcattagtatggagcccgtcaccgatgagtcatctgtgacgagccctacggcaaagcccgattgagatagattaatctctatcggccgtaaacgttggcccgtcaacgatgactcattttccatctttcatttgttgtgagtgcaaaatatatagctgctgtgtaataattcattttattagtcataatacattttcggatagtaaatgatttcaaatggaaatatggtcaacaacaaagttgtagagcctttcaagatctactggttttattttggtcatttttctatataatttttttcccaacagcttgaaattgattttgacaatatgacaaatctaaacagcatttgtaaatactaaatgatttcaaatggaaatatggtcaacaacagagttgatcctctcatcaggatctacaacttttattttggtcatttgtaataaaacaaaattagccatattaatgactacacatatcaagtctttgcaataaaacaaaatacttcattcattacaatagataagtacaaatgcatcagtcacaaggttatgccttccgtatcatctgaacgagcatatgccacaggctcttggggatcatcgtcaaggtcaatgtgaggtcttacatgaagattatggttgtattcttcttcatcaacgacgttgtcaactcctacaattcggcgctttccatccctcactatgtgcatcttcttgtttgaagggtcttttatgtagaatatctgctcgacctgtttcgcaagtacaaatggttcatcggcgtatcccaccttagatagatctactaaagtgaaacctttcttgtcggctttgacaccagtgcgtagattaacccaacggcagcggaacaaaggaaccttgaacttgacgtagtttagctcccatatctcctcaatgcggccgtagtatgtgtttgacccaacttgatcctggaatgcatctatacggacactcctgttttgcactgtgcttttgtcatcttgtttgacggtctaaaatgtgtatccatttatattgtatccttgccatgtgtctacggtccaagacggtcccatccccaacaactgtactgtctcatttgggacatccgtggacattgtcacacgattcttgaaccattcgttgaaccgagaattatgttctctgttaatccatgcatcagatcgccccaagttctcatctcggattttcgctaagtgctcctcaaagtatgggccaacttctgccatatgttggagcacagcgtaataagcatacgtgtacgacgcttgatcgggcctaattcttttccttccgattgtgccaacacctgacaaccttccctcgtgacgagacgcgggaactccgataggatcggcatcggacatgtaattgacacagaactcaatagcctcctcggtcgtgtaaccttcaatgatgctcccctcaggtttagctctgttacgaacgtacgacttcagaactcccatgtacctttcaaacggccacatttcccttagaaaagccgggccacatagttttgtttgcttcaccagatgaacagggagatgaaccattatatcaaagaaagacagtggaaaaaacatctccagatgacagagggtattcacaatattggtctgcagcccaactagatcttatggatctataaccttctgtccaattgcattgaagaaggcacacagacgttggatcgtgtgacgcactttcggtggtagaatgcctctgatagcaactggcaagatttgtgtgattagcacgtggcagtcgtgagacttcattccaacaagttttagatcgtccaatttaacatacttacttatcctcgctgaatagcccgatggaactttaatatccttcaagcatgataacattgcgatcttctcatccttcgacagtgtgtggcaggctggagggatgtacactttacctgtctctgcatcttgtatgggctggagttcactgcgaatattcatgtcctgtagatcatggctcgcgttcaaacccgtcctttgtcttcccgggaatattcaacatcaggccaaccaaactctcacacacattcttttctacatgcatgagatcaatgcaatgacggacatcaagatctttccagtaaggtagccgccaaaatatggattttttcttccacatacccttctcctttgtcttgctacgttttcttttcttcccaaactcattgcttatgtccttgaccatattgtggacctcatctctggacaaatctttggtagcaggctgaagttctctcttaccgttaaaaattttcttctttcttctaaatgcgtaacgtagcgggagccacctctggtgacccatgtataccatcttttgtgatttcttcagccaccggcttcgtgtatgttccttgcaatcggagcatgccttctttccttttatagtttgtccggaaagattaccgagtgcagggtagtcattaatggtgcagaacaatagaactcttagcttgaagttctcccgaccatatgcatcccatgtttccacactttctttccaacgaatctccagatcgtcaataacaggctctagaaatacatcgatatcattgccgggttgccttggaccttggattaacaagcacaacaaaatatatttccgtttaaagcataaccatagtgggaggttatagttcgcaataagaactggccaagtgctgtgagtactactcatgtcatcgaaaggattcatgccatccgtacacagacatatcctcatgtttctagggtcggcagcaaagtctttgtgttttcgatcgatattcctccattcaatcgaatccgctgggtgtctaagcataccgtcattccttctctccgtggcgtgccaacgtactaactttgcttcgttcgggttggcaaagattctcttgaaacgatcaatgataggtagataccacacaacatttgccggaccacccctctttgacttatttccttcgtcagcacttttctttcgcttgtatcgagaagccttgcagacaggacaagcatccaagtccgcatattgcttgtggtacaatatgcagtcgttgggacaagcgtgaattctacggacctctaaccccagtggacacagaacctgctttgcttcgtatgtcgtctcgggcaatgtgttctcaacaggaagcatagccttcaaaattcctaaaagatctgtgaaactcttgtctgtccatccactacttgccttcagcttcattaggtccaaggtaactgacaacttagtgtgttttgctttgcatccagcgtacaaaggcgtcttgtaatcacttaccaacctgctgaacttcattccatctctctcattctaggctaggtcctgaatgtcacgtaacatgtcttgcagcagatcgtgatccacatcaaccatttcaccgcccaatggagaatgtataaacatgtcatgctcatcttcatcttcctaattatgcgcaccacttctgtctgctgctgctccacttcctgattcttgctctccatgcttcacccaacatgtaaagccctccatgaatcctcgttatatcagatgactgtgtacgtcctctccgctatcaaacatattcccattcttgcaatctgcacatggacaacacatgtaatcactgtttcttcttatccgatcctcctccgcagcgttcataaaatttattacgccctttctgtactccgtagaacggcgtttcaaatttttcgcatacatccaacttcgatcaattgctacaaaataaaaaaacaaattagaggcacatattataagatcattattgcaaaagtaagacgtgatgaaattgctcaattaatgattaatattactcacttgattgatccattttgatcacctacaggaatttaatttctgttttccttgaaaaaaggacaaaaaatcgccccctacagccttccaccaaaatagtgaacaatgggatacagttacactaggtggtggggggtatttatactgtgcaacaaatatctgtaacggccctaaaacaatcaaccgtgacgggcatacaagtaatctctatcgggccttaataaaaggccgtcaaaaaagagtgtcatctgtgacgggcactaaacttatctcaatcgggcctctagttggagcccgtcacagatgaccctcatctgtgacgggcttcttttagggcccgattgagatatggaacccttatctcaatcaggcctcaactatagcccgtcacagataagtggcatccgtgacgggcttttagttttatgccgatataccatggctgtgtgaccatatctcaattgggccgaagttcgcccgattgagattacttccttgtgacggccggcaaattccaattttgttatgggccgtcacagatggaaagatctataccagtgaaacgtatagacgtactatagattcaattataaagaagagatgcaatttatctttatctcacaaactagggagcatattgatttacatggtgcatgaagttatcagtggtgatctaaatcattgaggtacccttctttggcactacaacaaggaggtgactgcccacaagttacaaatcatatacttcctctgtcccaaattataaggcctatatttttttacacggttttcaataacatactttgatcagtattttatttcattctatgatcccaataaatatgaaattagcatcagatgaatgtattttaaaatataaatctagtgatataacatgcataatacttagtataaatataggtagtatgattattagtcaaaagctaccgagtttgattttccttaaaaagtgacgccctataatttgaaatggagggagtatattaaataaataaaaagacgtgaagtactccagttgtgctctcactagcaaatgacaacttatattagaattgtagggcttgtttggatcaatgccctaccaattctttggtagtgccaaaacataggcaagttttggcactgccaattatttggtagaataaatttgtattcatcttatttggtttgctaccaaaatatagctaaattgtgataccataataaaaaaaagttctagattgctaccaaatttgggatgggtattaaaaaatgttggcatcaatccaaacaaatggtggatattatttaggctaccaaaatattggtagggcaaattttggtagcaatccaaaactgcccgtaatgtacttagctgacattctcataagtaacatggataaaaaaaaaatctgttgcctgaagacgtactgtttcaaattatactatgactactcactaagggcagacaaccacctaagcacctcctttgcacagaacaaccaagggaatttacgtaaataattatactaagatggcatattctacgagtaaaaactaagtccatatacagtgtacatgcatgtttctaacaaagggattgatataagcagaaaatgagttcactagtatgtagtggaacttgacttgggtagtttttttttttatttgaacttgacttgggtagttgatgtaatatatatacaatgcatgtaaagttatcaagtagcctttcaaatatataggcagaagctcaaatgtagctcataagcaaaagtagaaccaaagaatagagtaaagcttaactagaaacaacactacagccatgaaagaagttctcatattccccaaagactgaataacagatacaagatatataggggtatgtctcaataatttataagaaaaagaaaggagtcccccaagaataaacaaaatacaatttctgatacccaatattttgctcaaactatgacagcgtgctgacttacatggcatatgagccttcatatcatcggtttcgtcagtggtgactcgaaccttctaagaggccttctctgacatttagcaaggttctgactgccatcaaattttcacttctattagaagagggaatatataatggtatgtacaagtagctaaatggatcgagactaagaaggttcttatctttcctactggttaagtaactattggtctgttcactttgataaaaaaaaaaaaactgaccaaattttggcattgccaaaattttagtaaagttgtcaaaattttggtaacttgccaaaattttggcaggatttcttatatggttaccaaaatttggtaacaaactaaatgtaaccactttttttttgataactttaccaaaatttgataaggttaaaaatagcatcaaagtgaacaagccctataacaggagtaccaacttacatgttattagccttgaggtcttcagtggctagccaaaaaaacccagcattgtaggatattgaggtaaaatcataagcaaataagaaaggctggatccaacaagtctacatttgtatgtttgtaacacaggatatgcattcctctactgatcaatgatccaacaaaccatccgtcggctctggtacatgctcctctactgctccagtaccaaggcctgcatgtgcagcaagcaatgtcaatataatctttcactatatctttgccacagctaattaagatgtatataattattcaaactaacatgctaagagaaaagtctatgtatgacttgtataaaaattacaaaatgaaacaaaacaaacatatagaatgagatcgagcattgcaggcatataattttatcttttgctcaggtttgatcgaatttcttaacaagagagcaagcactcactcaagctcattaattatttgctcatcgtttttaaactcaaggaataaaaataaattaaataaaaacatacaatcagtttgagacatgcatagaattatatgcatagcgacgccaaaaaactcggatcgccacccatgccgtcggcacacgacctcttcatcaagaatctcatgcggcggggcgccggccacgacgacgccgtgccgtggttgcattaccctgccgtggacgacgccaacgctgacacggcgccgctgcctcccgagtactgcgccgctgcctcccaacaactgcgccgccttgctcagctccggcttctccgaccacctcccgccgcccgccgcggagaccagagacccctgctccttctcccacggcactgtcgtcccgtccgcgtccgccgcctagcaggctcgcacaagcgccgacgccggcgtcacgaacttcacctttttctcgaggcctctgcagcggccctccgggcggcgagagcacgtcggcgaccatgtcggcggcgggcacctcgaccgtccccgtcgagtcgacggtggtgcagccggcgacgaaccggctaatggcgaggaggagtgagagagatgacgaagggagagaagaggggaaagagaggagagaaggctaacgtggataaccctgacatgtgggcccacgttggtcccatgctgacttagccgttacatagattaaaaccagggttaaaactaccaaaggatctcgggtgaccggttttgtatagttaagggaccccgtatatttggttttgtggtttgatgatgtttttttatcccgatgacaagttgagggaccctcggtgtactttttcccgacacaaacagcccacaggcccaatagtacctatatacctagcccatcgtccggtagcttcgtatagttccaggccaagcccaacgagttcacgcgctgcttttagaaggagaaagtacattccgcacccctctgaggatgactgggtgaggcggccagaggagatcgatgcgcgcgcggggatccgatcgaacactagatccagtccgtttcatttgtggagtgatgagatatatatatatatatatatatatatatataacgtgacaacacagctagtggtagctggtttatataccactctatctataagagaaactatccacctatactttaacggaattgctaatggtctgttgacagaaaatagggtgctaaatctgtcacttttttaccattcatctttgtttaaaattcgtgctgcatttggattcaatggattgagcaaagtcaggcacggttgtggactttgagatggattgggcttttgctagactttgttgttgtgttctgtgggtctcacatatttacggttcaatttcgaaacacacgcctgttttttttcctcgcatttgagcagtgttttttattgctactttgtttatgatcccacacttactaattacatcgtaattacactaaaattacatatgtaattttgtgacttacatcgtaaatatactaaaattacatatgtaattttattacttacatcataaatacactaaaattacatatgtaatttttggaacttacaatgtaaatacatgctgacttttttttttgttaaatattatgacatcatatcataggtactccctaaatttaaatagatgagattaaatttagctgttagatgtttattctatggcttcaaaaatctgtatgataggaggctagaaaatctgttatatgatgtataggcagtcccatactttaaatgcaattttctcttaaactattcatccaatctacgatccgattacaccgttatgttcataacaattaaatctttacaacaagatctcacataattatattttgatgaaaaatcacaaattacttttagatttcactaagttacttcttagacatacaaaagtctaaattacttttgtatgtctaaggagtaacttagtaaaatctaaaagtaatttagacatatcataaaagtaatttgtgatttttcatcaaaatataatcatgtgagattttattgtaaatatttaattgtaacgaacacaacgatgtaatcggattatagattggataagtaatttaagagaaaatttcataagaagaaaaaaaaatatgcacaacctaatagcaaaaactacttgcatgcatgtctgtaacgctaccagtacttctcacgtaattgcccgcgttgctcgttaagtctaaatcgagatgcctcccgaaaatatatatatatatatatatatatatatatatatatatatatatatatatatatatatatatatatatatatatatatatatatacacacatgtatatacacgtatacacatatatatatatatatatatatatacatatacatgtatatatatatatatatacatatatatatatacatatatatatatatacctattataaaagtttaagatgttttttccaagcaattttgtacgtcgtcgcttgtccgattccctccccttagtgtgcccgattcctcccagatcaccgtatcaaaaaattcataagggttccgtttctgtcgtttgagtccgagtccgtctagaaaaattcccgtgctagatacccaaatcaatcaaccaaccaaaaacagcacgaaataccaaatttaatctagaatttgatccaaagaaacctaatcacccaatccgatccatctgagccaacataatacattaaacaatagaaaatgaatcataaatatacttaatcacgaaatcacaaatccaaaatcatcaaaaaaaaattaaataaaagaaactaaatcatcgacgccactgctcatgggagccaaggacgccgctgccttgaggccgtggtagcttggcggccgcgccaccgtgcatcgcgaggagggtgctatcaccggccgaggagaagacgccgtccgcagggaaaaggacaccacaggccgggagggggggcagtgtgagggcaccacagctgagatgccggctgccaagagaagcggcgtcgccggtggggggaggaggggaagcggcgccgccagttgggggagagggagtggcatcggcggagagggagggcgagctggctgaggggttggggaagcggtatcgctgccggggaggagggggagcggcgccgcgccgctggttcggagtgagggaggggcagcggcaatgagggactgagggcgccgctggctggaggagaaggaagcgcagcggaggagaaaaggagataaggtgggcaggcggaggaaagaagtccgagagggaaaaaaaagaaggaaagagataaggtcaggcgaagaatcgagacgcgcgtgaccgcgtcttctctcggctccgcgtcaggaagaaaaatgtatacgtataactgtagtcttttactctcatccgaaagacttgattcatctaagcgacacatgtcccgcacgaatctcagagccaagcttctctatgccgagcttgggccggactgcccacgcggcatcaagctagctcgtgctgccgttctacggctagaaagatactctgtatctcatgatttggaagaagccgcgtgtgcctgcgttatcaattcgaatcgcttctagacctgcaatgcaaagagttgcctcgatggtgaagttattcaatggttagattttgtttgccgttgagtttagtttgtagagtgaatttcattgataatctttgctgggccggacttgtacattgaagttgtaactttttctctatatccgatcgagattacgttcgtgtagtgtgacacgaagtccgtgtgtttggttaatgtgaaataggctgttttgaaaaaaaaaggaaaaagtacgaattactcccgaattattgcggtcgtccgaattacccccatgaaccacaaaaccagacattatttaaccccaactatgtaaaccggacgaattaccttccttgacctaatccgc

SEQ ID NO: 9815 - DNA, 29046 bp, Oryza sativa
ttttcaactgttggcaggtaaagatttatctaggtcaatgtaatatgctcctcttcctttcgatcataaaataattgatctatatatttctatttagattgatgttttgttatgttccagtgtcaagacaattcgaacatgctatcctcaaaccccaaatggcactggtccagttactaatagatctgccaagctagatatgctttttgctaacaaggtaattacttttaatatttccattactcaaacaccactttgttactgatcactgagttctagtaattcctgtagtaatcttccctgaacaatgtattcttgcacagtagcaataattattgagcataatacaactaccaaaagatttatggaaattaagagtctaatgaggatttagaaaaaaacctagtgggttaactccattacaacacactggtccttacatgtgagacatctcagttccttgattgggggttcagagtctgattatatggtgcaggaaattctggaaacccaattgccatcttgacctatggttattctgtttgcactagattgcatgaataaaatcatgacacggtcgatattttgctttatctgatgtgttttgaggaaaaaaaaaactttatattctatatatatgtgcatgcatattcattatttcatttcagtatttttaggggggaaatatttcattattttttcgatgtaggtccagatgaaatgatggataaacataggaagtaataataagatattaattaacttggctcaaatgaataatattccttgttaacaaggttatttctttgttccatttttgttgtggccgacatatgtgctacactttttgtcattgatttcttgttggattaatatattttccccttgttggcagctgcatgcttttgttgagtacgatactgtagaggatgctgagaaagcggtatggaccattacatgatgcattgtaatattttcatgaacatggtaatcactgttgcacatgcatcatctctgatattttcttcatcctatgcagatcgtggaacttaatgatgagaggaactggagaaatgggctgagagttcgattattgaatacttgcatggtaaccattggattagtcaattgcacatgagagttcagtactttggtgcttaagtgcatatgcaaatgtcatgttaatgcgcacttgttatgtatgtgttgctttacctgtctgagagaactttagttggttttgccgtgtatgaatctgctttaatggcaagagaccatgattttaaatctaatccttattagaatggatcaaaccatgtggacggattcaatcgtatggcacttaacatccattggaacatctaataagagtatgaggtccattaatctatccagctttaaatacgcaagatttaggggattgcactagtgcactcataatagcgttacatttcagatttgctctcaagtatggcacaagtaaccttgaaaagaaatacacttcagttgttatgcccccaatttgcaggtgaccccactttgatcccaactctccacgaatattaataacagatcaaatatggggagttggtgaccctgtacctcatatattgtccaatatattatagacaggtctagagaatgcatttgcaagaatatagggaaagtttggtaccgtggtatataggttgacgtgtttcaactttcaacgtcataatcttaacttgttgctaatatgtgtgaacataaccagttactcaagaaattataaacatggcagcagatcaacagagaagtcatatttatctaaatagccatttgactaaaagatcacaagcagttcagtgccaaaataagcatgtttttatgttctcagcgtggacaattcatgttaattttctgtgagcgcaatttatgccatgttcagacttaattcgaacttcaagtaacaagtatcccccttctatttgggttattttctatcagtaatatgtatacaacaattggcataatcatcatcatcagtttagtgtatgccatcaatccttcctttcttttgtttgtgttcactgcaacaattatatagtgtaatcaatttgcgcagtgctatcttaatttatttgcgcagtgctatccttaaattggttgcatagctcaaaatgattatgtagtttaatgcatgccataaatgcttctttaatttgtttgcacaatgcaaaagaaaggaattctctttacctttatataatgttccttttttgtggtatagacaaagggaggcaaagggaaaaagggtggccatgatatcaatgatggacatggtgtagaggatgatgtctccacttctaaccaatcaaatgagaaacatggagaagaagcactgcaaacaccagatgcacagggagagcaattggtaagctctccattttactttgtataatcccttatttggaaacacaaaaaagaaacaaaacagtgctttactgctgtagagtttccaagtgtgcgtaaacttatttccaaatatgagcacaatttgtggcactggtgttaataagggtttcttagggcatgtaccatggtctttattagcggtctctctttattgttatgcaagcatatttggtgacgtggaagagagaggaagaaggaaagagaaagatggttgctacgcatgacaacggcatagagtcgactcttagcatttattaggaaatttttcgttgtattgagtctaataaaggaaagatgactagtaagaaagtattttggtacattaatggttaaagaccgtattgtcttaactattgtaacgtgatagcctctaattaacgtagagaccatactgttctctactagttaggaatgttcgctgacatggaagagagaagcgaggagaggcaaacatcgttgctactgttaacaactgcttagcaacgactcttaacctatataaaatggaaactttgttgtatgagggtgtgaagaaggaaagaatagtaatatattttttttctggatcaatatggtttagagcatttgttgtctcacaccattgtaaaggtatagtctctaaataagcatgcgttatctaagtgtctatatgggctctacctttgaacatatagtgttttctttaagcagctcatgccaaaaacataactagttacatcacaatgaatggttctctctctctcatttgaaggttcatgattggttgtaaaaattttacctaatagttgggttgtgcatctaagcttgttaaagaaactatactcccaaagatctgaaaccaatttgtttctgtacagcctgatgagagcgctggggatatgggacgagggcgtggcaaaggccgtggccgtggaggtaaaggccgagggcgtggctaccactaccacaacaacaatcaacagagctaccacaaccatcagcagcataatcatcagaatagcaacaaccggaacgccgcccatccagttggaacgccgccatccaaccatcctgccaagaacgagcagcaacagcaggcacagccacagccacagccacagcacagccacagccaccagcaggagcaaacaagcagcctccagggccacgcatgcctgacggaacacgcgggttcgccatgggcagagggaagccgcaaacatctacgacgacacccagcgcatcatccggtagcgaaccttgaaactcgaaacacgcaatgttgctgttggtcatgttgatagaaagagatgcggttgagagacttgtcttttttacaagtctgtccttggaagcgtgcctccttttgttgtttgttctatatatacacgtttttctgccgtgtgctgttgttgtgtagtactacttctgaaacaggtagagcacacaccgtttgtgtgactcggtgtgagtgagtgacctgagtgtgctccctgtcactttgcagctctgtttttttttttttaccatttttgccgccctgactgtaagattgtagtagtaaaagttgattccagaaagataggggaggagaacatagtaaaatgtgatgatgtttcttgtactgtgttgtgttgtcctctgtttttgttgctcaactggatgttttggtgtatcatgcttgtaccttactttgaaagcgatataattgaagttcccgtaaataacgacgtagtatcaccttaatatggtttgattaaattgtgaaatagaatgtgcaagaacaaattataggaatgttgagaagcaaatgctagaaattttggaagtatgttattcagagcatgtttggttggttactgaacaggcatatgatcatgacctggcaatataacaatttagtattgaattagatagtacaacatttctccaaattcatattactaggctgtgtctataatcttgtacagggttactatattttgggacggtggtacatgatatgtaggaaagactaccaatgaagcaaagcatccttgtaacaaattgtgtcacgcctaaagccttgtggtgtgtccttagaattacgtagacaaccaaacaaaacacacccccttaagatcgccctttctagattccatgatcagaaaaacaaaattaattattgatgttactatatcacactagaaatttcaatgcacgaagaattttacatataccagaacacacaagatcaatcatgtgaaattacaaagccaagagtacgtgcacaaagtgcacacgttacaaagactaaaaaactacggcttcgccgccgccgccgccgccgcggcgagcgggtggaccttgacgacgccgccgctcttgccggcgtccggcgccgccgccgcgtcgtcctcgtcgaccaaggtgagcaggcgcgtcatctcggcgaaccaccacctccgctcgaactcgtagcccagcgccgcctccaggccgatgtcgccgtagcggctcacgtcgacggcgccgcccttgccgtagccggcgccgtagctgtagccgtcccaaaccctcgccgccaggtgaagccccacctgctcgtccacccaccgcctcttctccgccttgtctgggcggcggcgagccgccgccggcgccggcgccgacgacgacgacggtggccggaagcagcaggccagcttggacaagatcgccatgcgatcgaggcgaggcgcaagagcgagctagactgatcgatcgattggcaatggcgccgtgtcgatccctctatatgtagcgcgcgcgcgcgggctcgcaatccgagtcggagaggtagtacgtgacgatttgaaatcggagtcggagattttctttcccgcgtcgtcgactccgaattgagcaacgaaggctaagtacaagttgaatccacaatataagtgaatgtcatacagaaatacacaactttgcttttttttttctcgattttcccattgttcgctttgatcaacactaagaagtactcggatttggtttgatatcttctttgagagccacagggagtaacctaggctgagttcgtttcaacggttatgctcaaatgttcagcgctgccggtgcgtgaaactgagataatccacgattaattgagtattaattattataaaatttgaaaatggacttatttgattttcttctaaaagaactattgtatagaaaaattttacacgaaacacatcgttttgtaatttgagatgggtgatcacggagaatgaaatagtagtagctgtataatccttcatgttcatttagtcatgtcagctgtataattcacgcaacctgaacttgtataatcctgcaaaacgtaagcaagcaatgaacacgaaggattatatagatttggaccgcatgtgtgcgtaatatcctactcctgtatatggaatatggatgatcgaaataagctacaatgcatggggtcctaacgaggaatgctagtttctctgttcataatatcatactcctgtatgtgtcctgtatgtggaatgtttagattgtggatcattaacctcatcttgatgagtatgcaaccaacgcatgtaagttgatttatttcacctctgttcgtatggatcagtttcttttatccaacataatttagttgtcattgcattctttggcacaagcattgaaacatcatgacttggtttgcctgatttttacgatttgcaacactgcaaccatggaaaacaattcaatataaaccagctttcatgctggtaactattaatacctctgttagtttgttctacaatttggtcttggattctaaattctgagacttactaaaaaatactcagttatctctttagaatagacatattatctctttagggcactactgtgttctgccttttcaaattgagcgtctaaatagaagaaattgtgcctatgtaccttttctatatattcgatgaaataagttttgatagcaaaaaaaaaaatatgcttgcggttctacataaatagcgatatggctgaaatgagacatttctaattccagattatgcaccattttgatagtgctttcagtttatctatttgaaaagctcttagatatgtgatttagtcacccgataagcttgcgactttgcagtcactgctgattggttcttttcatgtgtgctttctctcatcagtcattgttcttgccgtagtttccagataattagaacttttcagaaaaagaaagcagtgatatccaacgtgttttataacacactacgatgtacttcctccgtttcacaatgtaagtcattctagcatttcccacattcatattaatgttaatatgtatagattcattaacatcaatatgaatgtgggaaatgctagaatgacttatattgtgaaacggagggagtacatgcatctttcattttgtgttttgtgattcttacgacgagtgtccagaggtagatcattcaatcgacttgaaatgcacttacctggcaaaatatgttcactgctgggtatttttactctcattctctttcatcatttcgtatggggaggtatggtgaaggcgagaagcctataatgaagtatgcctgcttcaccttgtctttgctggtatataatggcccatttttctgattcctggttaatatcaaagttcttctcatcaagcaaaatgattccctaacctccacaagcaaaattgtttgtaatgcctttaagaagagaagaaactaccaaaatgattccctaaccttttccagtgtctataagcaaaattgtttgcagtgcctttaagacgcgcgcgaagaaactgttttgagcatgttgctacatcaatagtacaatcgtcacctatagatgcctcacataaagtcattgtggctcacaaatttgcatccaaaacatgaattgagattcttttaaattggaagctcgtcactgagggttaggatcaggattgtctactactccaagtgatctgtacaatagatgatcagctcttttttttttttaacttcgcaacaggtgatagattcgataaccattggaaatatttagaaacgtgtagttgaactggaagaatatttgtggcattatagccacctaacctttttcttaatgaattattccaataattttttattgagtaatctgcccttataggaagaaatttgtactctggccatttaagctcctataaagcatgaacattattgcataagcagggagacattcttccagagtataagcttctatccttatttgtggatccaaataattatgctacctagttgaaattgtatgttcatcgagtgaaaactttcaagctgaaattgtttcgttcgtttttctcctttaagatgtgtattacatgtgcaatttttattaaggtgttacagtacttgtgcttaactgttctgtttattcaacagcagcgttacaacatactccatacaaatgtaataactcgcagcattttttatatcaataatggaaaattttagtattgatgtaaccacactcatgaggcacgccaatgccgcgccccgtaatctagtgcctgtttaccagccaccacaagtagtgatgatacaatgttgaaaaaagaagtctgcaagtattataagttcaatacacatggtacgtagcacatataattgagttgtaaagtcatcaacaacaagccccttattacaaatattaagtcttcggaccattggaccttatgtccacagcacaatcacaaaaataacaggatacatgccacacgtactagtagtatggtctgacaatcagaccatattgaggagatcagagttaaaagttttacccaaccaaaatctgagctccaagactggccattcaccaagcaacttagttattgccggcaataaaactgatagcaaacaaattccaatagctagccatagtaatcgtggggctaatacggtgtataaaccagttgcaaatgccacattagttgccatgtatgcaaaccacatgagcttcttagtgaaggacctataatgaagcaagaaatgaagatcctcccaccttgctatgatgcaaatgaaggcgatagcaagtgaggaaaacattgccaatgtgtttgcgatcaagaatgacaaatgcaaattttcttgccaatgggaaatcccaagtttccagcatcgctgctataccctccaggtaaggtgaaagcagcaacaaatgtaattgtagcaatgattattgcaactaaagaagtgttgctcgtatatgtctgagtcagtgacttagcatctttcattgataatttatttaatttgtccttggccatcttatgaagaatataaacggacattgcactttggggatcaactttgaataaaagcatcaacacttcattctgcatatattaaaagagaggaacaaatgactaaatgtgattggtgtaacataataggaaagccttgatatctgtgcctttcgagtataagtatcagcaaaacatgaaacacctttgtaatttttctatgggaaaagtgggcttgtaaagtcatttagaactcaacacgtggtgcaaagaaaaacctatttgtatgcacctacaaatagagtgccatgcatagctaatttgtgaccataggtattatgggacacccttggctctcagtgaagcctcgagagcaggaaatcatggatctttgggtgatgggattgggcttattgagatgctgataattgcatggcttggcaaatgcccatccaatggcttggttcgaggacttttcaggtgtcatgggtaaccctgtattggctttggaagaccttgtcacgaacatctctttattgtcatatatcttgcaaacacaggctagatgattgaaataagtttgtgtcatgggctcatggggtaaatcccacatcttctataggggttatctaatttgtccaaaaaaaaaagcattgtccatggtcatgcatcaaagtaaggtggttcctccggtgacgcatagtcttgtttgcaaaggtttcgaaaagttatgtgttaggtattaggtaatatctatctatctattatatactaaaagtccattaagcatcctataaacgttccgaagccgccacgtggcgcttctacaagcgttcctagaccgccatgtggcattctacaatcccaccatctattttcatttaaattggtggacccattattttacaccgtcggattagatctatttaaaaagtttatgctttctatatccgagcaatttaccggaaatactatatacatcaaaataattacgtactatggaaatacttacatatgtgtacgtatgaaagtacttacatacgtatatgaatatttaggtactgtaaattaaaaaaacaaacaaagaacgtacgtgtgtacgataaaaaaaaacctaaaaaaactgcaattttgtcatgatgtaattaggacccaaaaacttatattttcttcgtatcatgcatgagatgaatatgtttaaaatgcctcttgcgtctctatatgcgactgtgatcctatattttaattaaattataatgctgaattttagttattggtactaattggctataccttaaagttaatttctaccacaagtccctaggtggtctgattttaaaacacttttttttgttccaaaattcctgttagaaatacaagatacatctttatttggttcgaaaattcatatgcatgaagtttatattactaaactttgatttcagaaaaaaagaaagtgagttcaaatagatcatcttgttttatgtgtttctgtttgtgatgtgtagataataacactcctattattgagttgttagtggcactatagttacattcggtggttactgaaaatctgttctaaatatcattgtccagcatctctattatgttttctcgatgattctgacattttgagctaataaaataagaaatatcgctaagtacagttctttgaatagttcagattaaactggttcttttgtttaggaacttttgagatcaatccaaatatcagactgggagcacttgctaattctaatcacattgtctgttcagttctcacctgacactacgcttttcttcttggttaaactaatctgtcctctacttttgttcccttattagttattacacatgcaagcaactgcagcagcaagagtaagagccgattatccgggcaaaagctatagaagacaagggagcttgcaggaagacaagaaaaaatgctacatgagaggacaaggtttgagagagcaacattattggtcccatcgtttcgattatttgtggaataagccaaatggtatatttgcaaacgaaaaataatttgcgaataaaatttttatatatgtgttactagcgatctaaaaataaaggataaaaactaaacttcgataataaaaccctaaaatcagctccaactttaaggttgaaaatttaaattttggttgataagctaagtataagtgaaaattcaattttttttccagaattctcatagcttgaagaattgcaatgagggaatgaatgagcaagtggaaaatgaggtctgttgttttatgatgttgttagccttttcaaaatgtgatcaaacgtatcacttagttacaatatctgtcacatgtgattcagttcctttggcttaatttcagctgttgtatatatgttcattttctccaacaatctcccaaatattatctttgcagtgaattgatgtataaaagtgatcgctgaactgctggtgtatacataaatcttgatggaggaaacaagtcaacaaccatgaatctaggttcttgtcattaactacacatctatctatctatctatctatctattaattaattttaattatatactaaaagtctattaaacttcctacaaacgctctcaaaccgccacgtggaatttctataattgctcctaagctgccacgtggcgcaacaaaagaaggcgaggacccacatctgcagcgcatgtatctgtggataaaacagatcgatctctaccattagatctaaacaaattcccaaaacaaaagaaattctgaaatcccctccgagaccccacacatacacatgcgacattgcgacatacggacgccgcttttattctccagcttttttttcctacggtaattaaaagatacccctatttggtaacaaagttttgatctaacaaaaaaaaaaccgaaatcctttccatgggctcccgcatgcatgtacgcatgcatgccttttcttccctgcttttttttttctattgcagttaaaaaatatttactgcacttttatttatggtaaaagaatttctgcatgttccatattgatgtctcacacacaaattgttcttcgtgggttttataaacaaataagcaaagtttaaatgattataaattatatacccaatatatgatcggtttaaaccattgtatattttaagcaaattaataatttatgattcattcatattgactattttcaatgctaaaaatttattacatgttggaaccacctatcatcttgaggcctcaaccgagttaaaggaaatcttaaaaatctcattgaaatcaaatgccaaaccttaattatttttgtcacttacggttagacatctaataggttttttacgaacataattattttatctctaaatgtgtgggggaaactataacctatacgcatggatcatcatgcttttataaataagcaatcataaaatgatcatagcatctaatacaatacgtgaagtctctaataattagaggggaaaaatcttagaatgatctcattttttttacatcataacgtgttccttatcaggagcctatttttcatagacaacaaatttaaaatacaattatggacatttggcatcatgatgggtcgtaggaagcacgtgtgtttcaagaagggattatggtagtgaaacagctatgtggtgccattagtgatcacttaaatttttgtatataccatacgatacttcagaatatgaatatgtgataggagattccggtttggttttaatttattactacctcagttctcaaacagatgcagctaaacctcggaatattaaatcattagcaaataaaaaatagggtttgatatggaaaaaatgatattaacagaatgttactacctccgttctcatatatgtgttatcctagaaagcgtgcagtaaaatatcaaaatcttcattaataaaaatatattatgcttatatggaaaaataatattgataatttttttatgaaaaatgcttttatacagttatatttttattgtttttgaaatatatagctaaaaaataaatgatgtaattaataatggaacatgtatattggagactattgttgtccaaaacagagaacagagaaagtaaaagacagttcatataatatttttggctcaattttggtggtagggttaggacgtctttagcctctactgagttgtacactcaacacaattttgttttcttcccaaattttagagatcaaaagcatttcaaggatgattgatataacataaatctccaatattccatacgagatggaaaggaaaactggaatttcaataaaaattgggctaaacttaaacaaattttgttgaatccaaaggccgatataaattgcagaaatagaaaaaaacacttctgcaggaacaatgtaattggaatatgtgatttttgtaaagaaaatcttacaaaatattgtatttcaaatatttttggttaaatttcaacaactcttctaaaagaactatgtggatttcttaaagtatagatgtccaaaacgaagatttgctaagtattccaataaaaacacatattgtaaaaatattagttcataggagttaactctattgttgtggcacaatattttcctataattcaagatttcacggttttaagtaattttagtttagaatttatatgttgcgagggtaattagaagaaaatcataaccaacattcaaaatagtcacaaatgatttattgggaaaaaggttgataacggaatacaaatgttttagaaaaaatgactcatatttttcaagcaacattaaataaaatgctcgcgcatatgcgcgggcttgcttcctagttacctttaaagaaaaatcttcggtgtgggttccaaactgacagtagtttcaacaaatatatataaagagtgaatttcagaaaaccccatgttttgaggccaatgtaacacataactacatgttctatttattttctcatataacccagtgcattcaatccaattaacacagtaccataggtttaagtgtgggaaagtgttacaatggcaagtgacatggcagacctactccacatcagctggccccacctgccagatcaatgcgtgggctatttagggcgggatcatgcggaagaacagaactgcacgttccctgttgccacgcacacacggccggcgacggcattccccaaccatctctcgcatgatggcctccggtgatgatcgtgctattgacctagctggaggaagagtagaggaagagaactcgttggctaccaagattagggagatggatagaatcaacaatattcctagcagttaacatccatccattttcttaagatgatcatctgaatcgactccaaagtatgctggttggtgattcgcaaggacacactgcttcatagttgatgaggaattaaatctagctttttgatcatgtttgtcttgtcaagaaattagggctaataaaatgtgaagaacatgtgaagaactcaggttttatataccattctctggcatacaggtgcattctcacaaagcgaccatcctatttttcccaagcagtcacttaagcaagaacgatcaacagtacaagtatcataacattggacaccaacaaaatttgttgttttatctgtagtgatagcgccatcctttcaaattgatcgctccttttcgtctccactctccagagcctgcaacatggtgatgtccttgttcctctctccgtcagctatcatcctctccttgtgcagttcataccattgattcacttaagcttcatttcgatttcttgcacagtcaacagcgtgtcgttcaatctcaattgtgttgagatctcttgcagccactgcccacaaaatcacattcatcgtcatcctgcaacaagaaaaaaaatgccaactgaaacataaataagaaaaactagtgagaaagaaattgagtcagcaatccaactcatatggggcacccaatggattgtctcccagcatctgaaccttcccaggccatccttctcactggctcaacataattgaaatatcatgcaattttattttgcattgacaaaaatcgcaaattcccaagttactgaaaccctacaaacataaattgattaaaattgcagaaaagcagagttggagatgcttgcctttgcctgtgcacgacgacctgcccctctgaacttgtaagaggacgatttggtggaacactgccgcagtgagcatgaggaagacgaggggtgcatcgtcgcgtgcgtgggaacagaggatgggtgcttccgttctcccgcgtgatcccgccctaaatagcccacgcattgatctggcgggtggggctagctgatatggagcaggtctgccatgtcacttgccattgttgcactttcccacacttaaacctgtggtattgtgttaattggattgattgcactgggttatgtgagaaaataaatagaacctgtggttatgtgttacattggcctcaaaacatgggtttttttgaaatttactcatatataaatgatgtgggaagttataaatcctactccaaattgctattatttaaccatgacaacttgattttaagcaaatttaagaacagagaatactgcaaaacaatctactcaaatttgtgatgtacgaccattttaaaattttatttgcaggttgaaatgacctattgctactgtaacgccccaggtagccacgtacctagagtgccacactaaaaaaacattcaaaaccactaactcccgaaattattagaaatttcggcagagtctctcctaaaaatacggacatccacgacacgtagttataagatagatcaataaagaattaaccaaccattgctaaccatcctagctccataaattccacgtgaaaataaagactagaactttaaatgaccgttacaagttctacgcaaaacttatgctaaacagaaacatagtctaaaactaaatttcaatagtgtgcaataataatgtgtagttcaagagtgctactcctgtcccatgccgatcaatatcattaggtacctaaaaaccaaattaaacacaagagtgagtaaagaatactcagcgagtacaatattgaactagtaaaacatacacaggtttaatgcaataagaaaaccaatatgaaacatttgacttcctttaatttaaaacgaaagaggcaaaaagtagtagttctctccgggcaggtgtgaatatcctcttagcattaccggtaagccgagcaagcgtgatcatcgcttctcaaggatcatgaataaagatccaaattgcactcccatgactacgcatggtacttgaataatgtaaacaaaaatttccggaagaatgaaacatgaataacgtcgtgaacttgaacatgaagtgaaatatgaatatgtagcataataccaaaaccacataattgataatacgaagcttcgaataataattgggtaaatgaaaccaacaaagcaacacggtttatccatcacacaagtccatcttgtacttgccttaacttcttcgataatccaactcaactcctccaacgttggaaccctccacacctgtggagaaaaactacgcataaaccactatatctaatgatagttacaagggacatttactaaaatcgaaacctagaatatataaaaaattttaccgatttatattaaataacctatagctgttcccttactgttttatgcgtaactcacaaaccgtctaacgaaatctatcaaataatataacttcggacatctatacaaaattgtctacaactttcatgttgggcgaaaattccgattatgcctctgcaaatcccagattaaggaaaacgaattgctgtcctgatttccggatccggtcagcagtactgtttctgttgtttctcctaaaccatttatcggaatcaagggaaaccagcggcgttagaaagatatcgacaatggctacaaactttatttagaacaactaacctgaatcccgacggtttaatatcagatttgaaaatacggtttcagcctataatcaataacctcgaaaattgcacaaacgactatcgaataaatttctatttgaatcaaatacttctagagagtagccaaaagtaccgctgcagtgtggatactagaatctgagaacaaacctgctagttgcaaaatcaccgaaatccccaaattccttcttcctcctgctctcctgcgcccttctcctccctaacagcagcagtcagcagcagtcgtcatcagcagaagcagtcagcaccagcagcgatatgaagagaccagatcgcagcacatcaaggcatcaagccatgcattagcagcagcggcaattaaaagatcggatcggcagcagcaacaacaggaatttggcagcagtagctcagcaagaggcagccgagcagggaatcgattggcggcggcggacgacgacggctgtggcgacgccgtcaccagcagcggcggtgcagaggcagggttggggaggacgacgggctagggctagctgctggtgtccttttcttcttgttttttttttcgttggttaaatagagagccgagagcctaatcaatatcgaacgacccatattaatttgatcacctggatttcgttcggactccgattacaataaatttatagtctattttgcactactcggcgagctctacgcattcacggttcctgattgcctattcgaataacagtttaaaagttaaaattttgcgcgtttgttctaatattctccgaaatatactaattcgaaattcggggtattacagctaccccatgaagtcacgagcctccataatttattagcttgaatatcagatactggaattgaaaaattaccagaaaatttcgtttaatggtcaatatagggagttcttaaatgggtatcatagtagtgcaaagcacgactacatggctagtatttctcgaatgggtctaacgaattaactgacgaaatagggtggtatctaagccttggtggttccaaaaggttgattaatgataatttaactaatgactaggaaattttaacgaaacagattttcttctaaaatttccttttgaaactttgctaaaactcttacgaggcttgctatagctgaagtaattgcattttccatcatgtctttcactaaacctcctttcaactatataaaaccaaatatatgttcctatcagccaaacacgttaacaataacaagaagagaaaattccatgtgtacccctgaaagttcgctcaatcccttctatacccctgagattttctcattcccttccatacccctaaatttcagtttggatcttttctataccccttccatcagttgaccgttaaattcatatcataaagtccattttaacatttggtataaaaaaatataaatttatgaattatattgatggagtttataaatttattgtataagtttattttgtgagatattacttaacaaaaataatttttatctcgcataacaagatttatcttataaaaaattttgtactactataacaaaatatgctatatatacagtttttaatggtaattttttttgttttatctaaaataaattttgtcatagataaaaattatttttgttttcccttcacgaggtaaaactaaaatattacttttgttaaaaatatctcacaaaataaactcataaatgtaatagtcgcatacaataaatttacacaccccatcaatatacttcataaatttatattttttttataccaaagggttgtcatagataaaaattatttttgttttctcttcgcgaggcaaaactaaaatattacatttgttagataatatctcacaaaataaactcatacatataatagtcgcatacaataaatttatacacttcatcaatatacttcataaatttatattttcttgatagtaaagggcaaaatggactttatgatagaaatttaacggtcaactaatgaaggggtatagaagggatccaatttgaaatttagaggtatgaaagggaataagcaaatctcaggggcatagaagggattgggtgaagtttcaagagtacacaggaaattttctctaacaggaaggtaaacaatagttcattaaaatggacttgatgtacgtacaagcaaggtttagtttggatgaacgcagtttatgtttcactcataatcccaaaattaggaacataatatcaacatctaagcatcacaacacgttacatgtgcatattgctttgagaactaaagagaacagaaaatatccagcaccaaacatgtcaaactagctaggaatgccaatatctacccatgcctacctccctcggtgtgcccacgggcatgcctgtttaccagccaccacaagtagtgagacaatgttgaaaaaagaagtctgcaagcattataagttcaatacacatgtacgtagcatatataattgagttgtaaagtcatcaacaacaagcccctaattacaaatattaagtcttcggaccattggaccttacatccacaacacatcacaaatataacaggatgccacactagtggtatggtctgacaatcagaccatatcaaggagatcagagttataagttttacccaaccgaaatctgagcttcaagactggccattcaccaataaccttagttattgccggcaataaaactgatagcaaacaaattccaatagccagccatagcaatcgtggggctaatacggtgtataaaccagttgcaaatgccacagtagttgccatgtatgcaaaccacatgagcttcttagtgaaggacctataatgaagcaagaactgaagatcctcccaccttgctatgatgcaaatgaaggcgacaacaagtgaggaacacattgccaatgtgtctgcaatcaagaatgactgaaatacgaattttcttgccatgatgggaaatcccaagtttccagcatcgctgctataccctccaggtaaggtgaatgcagcagcaaatgtaattgtagcaatcagtattgcaactaaagaagtgttgcttgtatatgtctgagttagtgacttagcatctttcattgatgatttatttaatttgtccttggcatccttatgaagattataaatggatgttgcgttttggggatcagcttccaacataagcattgacacttcattctgcattgattaaaagagaggtacaaatgactaaatgtgattggtataacataataaaaagccttgatatcctacctttcgggtataagtattagcaaaacatgaaacacctttgtaatttttctttgggaaaagtgagcttgtaaagtcgtttagaactcaacacgtggtgcaaagaaaaacctatttatatgcacctacaaatagcgcactatgcatagctaatttgcgaccataggtattatgggacacctttgcgaccataggtattatgggacacctttggctcttagtaaagcctcgagagccgaaaatcatgaatctttgggtgatgggattgggcttattgggatgctgttagcatggcttggccaatgcccgtccaatggcttggtcggaggacttttcaggtgtcatgggtaacccctgtattggctttagaagaccttgtcacgaacgtctctttattgtcgtatatcttgcaaacacgggttacatgattgaaataagttagtgtcatggggtacatcccatatcctctataggggttatctaatttaaccaaacaaccatcgcccatggtcatgcatgaaagtaaggtggttcctcctgtgatgcatagtcttgtttgcaaaggttttgaaaagttatgtgttaggtaatatttatagaaatagcttatggcttagatcgataacttgatagtcaaatacatgtacgtgcaacttgacatatctgtgggcaccatagatgggcttcctgatggaaatgttgtgttgccatgcctgacggtggtggacttttggagcatgttaaactgatgcagctctgggagactgggagccagtaattctagtaggatctttttttttttttgcggggaattctagtaggatctagaagcgtaacaacgaacaaatgactctaaatacgacttaggttaatacgtgagttgttgcaatacaacttagaatatgtcgatatgaaaagttgacagagcacgtacacatatagcagtttcaaaatcatttcaaataatagatttgcagaacaatataatctctcttaaaattaagcttgtataatatgcactgttccatagcttgtttagtacaaaagtagtcaatctacatctcatcaaaatccaggatggtcaacagaatccaggaacgtgaaaaaagaacaaaggaaaactagagttttatcttagccccgtgctgttggatgtggttttgggtgtgagatgtgcagattctattagccaatgttcggtagaggttatgagctgagctaatcagctagtgaaacaaggcaggttattaatgcatgattaattaattaagtattacaaatctgaaaaaaagatttagtgttttttgaaaaaaaaaacttctataaagaaagccttttaaaaatcagtagcagttcagcaaaatgtgtttattgaaaatggtaaagtagttcagcttacaagccaaaacaaatagtgacttgtatgcatacatacacgcacatgtacaaatggtgacttatatgcatacatacacgcacatgtgcagttatgcttactgagaattccttgtatacgccaagtcgaccattagatctttttacttgtacataagtgccagctaaaaagaataattgataacaaatttagaaacagaaaattgaattttgattatattcggaacaaatttaaagggtaatttctttttttttcctctccgatggatatctctttaaatttgcttcaagttgataaaaaatatattttggtttataagggaggaaaatagaaaaaaatggtgatttgtataatctctctctatgaaacttgagcaaatttggttgcaattatttgaaaattttatattttggtcttcaaaattagtcaaacaattttgtcccttaaaattttttataagtgaaaatttcaatttcatatataattaggagtttgtaggaagctagcacttgcggcgataaaaacatgatggtctaagttataggttatatatggtaaattaatggaataggtgtagaagagataaaaattcggtggtacatacagtggatatggcaaactcgagggcataaaacgaattttatgtaagaactcgacaggagaagagaagcatacgaaaatgtctctactaactatgcactcatcaacaaggaaaaacaaaatttagtacgcaaaaaggggtggtggattatattaactaggaagaaagcccgcgcagatgcgcgggaatcttgttaattgtttttgtaaaaagaatatgaaaaaagtcaccgttaccatttctacttaaatgattggaacatttctcaaatttaaataaaaacactttcaccaagtaacatatagatcactactactaattatgttttaaaagctaatatagatgaaactgcatatgcaccaataaaataagcataatacatcattaatacactataatatctactacctgggtttcatgtctcacttatttctaaattcacatataaatatggtaaaaataccgttacttctatccattaatgggatagcgcaattaaaattaaacataaatgctactctaatggataaaaccaatcgtagctgctaagactttctttctccgttgccttgaaatatgggtcatgcattgatatagccgtgttcctcaagatcagcttggagcacaattttaatctctaattcatgatcgcatgctcatgaagtattgcatggaaaagtacgaagttgagtacaattagtcagtggcggacccaggattttgctaagcccggggccaaatcttattgccaccgcacacaatgatacaataatagatgctacattgctagtttgctactaatactaatgcacgatcaaaatgtatggtacaaatttagttgcggtgcgaaaaagaagtacaaatacattttcaaataccttgctacgtgttatcttcctcggagtctatatcatcctcattgaattcttcaattgtagctccagatcttgatcctattggaaaaagaatcacatattacatccatggattgagaaaatgagaatcaaagttaacagtacacaaatttcagaacaagaataagacataccactagggagaggtagcttcatctttctggttctcaattcttgaaaatgagttaatatcttatcattatcaatgcttgcaaatatgtctctctcaatatagcagaccacgcgatgattgagccattcatcagccattttattccgcaactcagttttgatgatattcatagctgaaaaagccctttcaactgttgctgttgccaccggcaaaatcaaagccaattcaatgagccgataaaccaaaggaaaaactgtatgtctatcactctgaaccatcttcattgcaagattaccaaggtcactgcaacttaggaaatgtgggtctgctctcacatcagctataaatgtctcaagttggtcctttaggactatgcaatcatatggagagaagtcggcagcatacattctagcaagctcaattaacttatcttcatcaaaattggcaaaagaattcctaggatcaagacaagcaatgcatctcaataactgggtagatctctcagcaaaccgattgtttaactccacaataagctggtcatgtaccacattaaagatttcattattgaaatgatgttggtaagttatcaattgacctccacgaccccttgaacgacccctagtagtagttgtatctgacatatctggcacaatgatgttatacttgagacaaaatgtctttgtctcttcaaagagttcttgccaaccatgctgccttatgtggttaattttttgcaatgtggtcccaatcaatcctatagcacgaataatattttggtctttcttttgcaagcattgtgacagatcattagttttacccaatagtctaatcattaggtgcatgataagcacaaattcaaagctctccatctgttttagcaaacctgtagcagttatttttgtagtggggttatcctcacatatattttctaatacctctaggactgctttccacatgtgctgcaaacgacacaaggttttgtgatgtgaaccccaccgagtatccccaggtcttgcaaggttagttgcttggtttttccctcttcctgaaaatatctccccagtctctaaactactcacaagattatcatggtgttcttgggccagctgatcatgtctcttacaagaaccattgacagtgttaacaatcatgggggtatagttaaagaaatctgagacaggagaacaacattttgcaacagacacaaccactagctgcaactgatgggcaaaacaatgaatataaaaggcataggggttttcatccaatacccgtctttgcagcccatgaaattcacctctcatgtttgatgcgccatcatatccttgccctctcactttatgcatagataaaccatgactaacaatcatggcatccaaagctattttcagtgcaactgatgttgtatcaggaacatgttcaaccccaagaaatctctcaatcacctgccctttgctgttgatgtacctatgtgacataacatagaataataccattgttaatatggtcagtttcaaaatataagaacaaggaaaatgcaaaagacagcaactaacctcaaaataacagccatttgctctttaatagatgcatctcgagactcatcaacaagaatggcgaaatttctctcaccaatatcctttagaatggctttagttgtcttatttgcacaagccttgcacaaatgcttttgtatttttggtgaagtcaatagatgattcccaggagaatttccaagtaatttttgggcatctttatccttctccttgtaccattctatcatctctagaaagttccccttattgctagatccatgagattcatcatgaccacgaaaagcaagtgcttgcaataaaagaaatctcacaacacccaatatcatagttatacgaccataatattgttgctctaacttcttagatccactatccatcttatatgatacactttgcctttgatttttgaaatcctcacaatgttttctagctctattatgaaaactatctactttaccaacatgttcattaaaagatccagttgcatgtttccaattagtaaagcccttacttgtgaaagcatcaacaccaaaattatcaggtcttggttgcttgaaaagataacaataaaaacagaatgctgcatctttggcaatactatactccaaccaattatgcattttgaaccacgagtcatgaaagcttctttgtcgatttcccattaacttctgtggatatttatgaccaattggttggcatggacctcttgacaagtattcccttctaacagcatctctaatgtctatatgaaattgctcaattggttttctaagcccaggatcagcaactatgtcagccggattaagctcaactgtctctgaattgtgaggttcttgttctggttgtggaatattactccccactgtctcaacaatactaggggctgcctcacaagtactaggggcatgttgaacttgaatgttactagctctagctccagtttctcctatggctgcctcaacaacagctgctgcttgctgagtattactacctccggttcccgctgtttgtggaggatttgggtctaaattggattggggtgttgctggggcataaaaagatttcaatgtagtcctaggcctcttcatcttctgatctctattgcaagttaaataaattgattggaatcaatagatctatagacactgcagtattttaggcacttagccacttaggcatttgagaaaagaagtaaagaacaaattgacagaagaaaatagagatggaaaacttacccccgtacttgctgctccgctcatgagcacaaagccgcgccttggcccttggcccttgggggttgtcggctcgttgccgaccgccggtcccagtgatggcgcactggtgctgtccgcctgtccgccagggagccggatgaggagaggagttgaggctgaggagtgaggaggcagcaaggcagaggcaggtagggagcgaccgagcgagccgaggagacggcgtgccaggcgggcggcggcgccggcgtgctgtcgtgctgggtaggaccgtaggagcgagcctcgagcaagaaggcgtcgcgccacgccgccgctctcccatctctgtctctcgcttctaaggaactgaggaggggagttagggttaggttgatttagtgggccttgggccaaaatttcagaggtatatctaggtggggggtccattactacacggcccacgacctggtccgcggcccaggttgccccaggcctgggtccacccctgagagacgctaaaactttactgatctgaattcagaacgtgacacacctaaaggagcaggactctcacatatcagttggattttatgtagcagacgatagcctagaaaactttgagctgaaatgagcatttcaggtagtgaattgcaacctgcactattgaagtattgagactaaggaatgttgacctgtttcacatggttagttagcaaacttacagcagcaagtttaaaatgtgacaaactaaaggaaaatggtataagatggaaatgtcagataagatatgaacaaataatatttcaatggaaggtagcgtctagtgagacacatacttatgtgaacctaattaatggtccgtaaacatatgatgtataaaatgagcattataaaagcaaacagagtctgcattagttaaacagatcgagattatggttggaacaacagatacctattagtgttatcttacatttgaacccaatatcttggaagcaaggcagtaacatgagctatatatgcacagcagagagacaattaagaaggatttgagcaaatttccatagagcagaaaatgattcactcgttgcaacaatttgtctcaaggacatgaatataagaatgttagatctctatcataccttgggtacaatctggtcagaaatctgcatactataaagacatttgcccacttaaattaaataaataccttcagatattaggagaaaaacaattgtgtatgcagaagtataaaattgtgctaaaagcagcaaataccacccataagaacgtaccagcaaatcgcatcatatcatcaaccaaaaaatattgttcttcttaccactttcttaccggataactgaaacatttggtccacatctaagatcagatatgccataggccaggcctggtgactacatggtgcagtactttacaaaataatatcattgatcttgcattggccaccgatgagcaagaagaaaaaggcaagattgggatccatggtgcatggtgatgccgcagacgaacattggagagagagaggtaaggactcaaggtccttgaagtactccattatcatgtcttggcaataaatctgatgatagaggtcagagaagagtggcatcgagtgaggggggttaaaagaagataaagtgcaggagcgtcgagttgaatgctccttccatttgtagaagtggaggaggcagggcatgcgccatcagtttcacgcgagggagatggaatggggaaggtgaaacgaattagcgaaagattgggtggaagcgaggaagggaaacagccctgacggtcagggggagggtgggtgggtggggagggggggtgggtcatggggagggatgggggaagcgctacgcggcgacgatgctgggcccgcggctggctcgcgctaggaatgagaggagacgcgatcgtggccggctagcgggcccacgctggcgcgcgtgatgggggagaccaggagaggaagcgagggtgtcggcggagggccgcgtctggcacacgcgcgatggggagaggaagcagcgcgcgatggaggaggcgaagcgggacgcggcgtgaatgcggtggaggggcggcggcgcgagatgcgggagaggagcgatgcgcgcgtggggccggcgaagccgagatgcgggagaggagaggaggggagcgatgcggggaggggaggggagcgatgcgggatgcgcgtggggccggcgccgcagcgagatgcgggaggggagaggagaggagcgatgcggaggaagggctcgatgcgaatctaacggtggggacaaaaaggggtgacgtggaagcaccaggaagcagagaattgtagtagtggggatgatttgtataggtatataggatttgtttgagattaagattctcaaagcattttttggatattttcagaactatttgattggtatttaagaagtaggcagcatacatgatacatagatatgaaaaaaaatatcaacaatatttccagccaatgattttgctacaatccatcaatagatttatggtcacatatttttgtctttgccatgattttgaacaatgaagtaacatgctaataaactactcatgtcatattttcttatacttaaggaatttcactatgtcaggcataattgatagatatatgccataaacttgattgacgtgactataagtgtactccaatggattagttagtatatataaatttgggaaaaataaatgcattcttcaaattagtaaaattgcctcatgtcactatgaacaataggagtggaaaacaaactaaacgctaaattatatatatttgtcaaaatataaacaataatatggtgttctcgatattatcaaggtgctatgtatctttagctataatttttttaagtatcatgaaatgattaacctcactcattttcaaaagagagtattttatctaaatgataaaatttgagtagtaatgatgaacaccaaaaacaaactgtgtgtacactgtaccacaaatgtacttaaaaacataaaaaaaaactatcttgatatactccatcttctcttgtcctattctaaagggcatcaagggaacatatgactaagttaaggtggccacggtatatgccaccatcactaattgcaggggcggacccaggcctggggcaacctgggccgcgaaccaggtcgtgggccgtgtagtaatggaccccccacctagatatacctctgaaattttggcccaaggcccactaaatcaacctaacccta

SEQ ID NO: 9816 - DNA, 37565 bp, Oryza sativa
ccctccttcccggcacgcaaaaagaaacacctattattgtataattaattaagtatttgctatttttttaaaaaaaatgtattaatatgattttttaaagcaactttcgtatagaaatttttgcaaaaaaacataccgtttagcagtttgaaaagcgtgcgtgcaaaaaaacgagggagaggggttgggaaaaggggcatccgaacacagtctataatgttgattatagaccgtacgatttatttgaagaaaagttgtacttaaaactcctaagcgatttaagaaaatgtaatattaaaaaaaataagttacgatgaattttttaaaatcaactaaatattaagttttaaattttttttaactctggctggtgcttataacctgagccttgcatttagggctttagaaccattttggtttgaagttaaaatattccctaccaaattgtttggcatcttgaatagtattttgttactgtttggtttgttaccaaaatataccaatagcacacaaaaagttaccaaaattttggtattaccaaaacttgcctaggttttagtagtaccaatattttagcatggtaccaaaccaaacacacccttgttctaaacaacccgctccaactcaccaataaataaataaataaataacctacataaacgagtgatccagattgctccaacgatgcctaagcaccgcattctagaagcttaattagacaatggtggtccatatatgtcaacaccattgccataggtcttgaaaacatgcatgcttgttcgttgattgcacattggaaagctagcagacaaccaaaagttaattacaattagttggtctctgatttcatggcaattacacatggctacagtttagcgattttcgtatgtatgcaaaacacacattttcagtaaagtgattgatcacaagtgcactgaatgttttctctccctttaaattctcctggtccctagtaaagccacactctatgcatgaacccaattcaaagaatcttcagcgtcagcacagagaaaacatagtacaattagtgtatcacaggtgcactcttgcttgtttatcgtcgacagtttttaggacaaggaagcaagcgagttagttaagcagttagtttgcaaaatatcgacatcagattttttcatgatatatctctactattatatgaaagcagagtcatcctcctattcgatgatagttccccatgtaaaataaccaccctgcctagaaatccatcccacacacaaatatgtgcttatttccacacaaaaatcatcaaaaaaaaaccaccccagcccatgcataaaccagtgtttccacgcgtaaatcaacaaaaacaaatagacaaaaccgaaacctataaaaccatccgtacatattccttataatcctgttgcaacacacagacatgacacaatatctatgaaaatatgggctgctgtgaattacaaagcagaaaatttaattctgcaataagaaatgtgaacatttggtctatggggagtcaatcaagttttggatgtgcacatcttagatgcagagagtggatatacatatgtagtaattttctttctaaaaaaagaagaaaaaaatcatgtttgtactgtgttctgaaaaaagagagaagaaaagcagcaccagcaaagtaagcaagcaaatattacttccaatttgatcgtttttccgccacttttcattggatggatgattcttattttagcctttgacttgaccatggagaaaaatcgtgatatcaaacttatcttgattttaattttttcaaagtcctgtttgttcgatttaattatattcgcttgtcaatgccaatgaaactgctgcagtgctactaatttaatggaagtcaattagcatggccatatgacttgcagcctttcagctcttttttttttgaaacgctttatagtatcgtaaactactaactccaataccccgaaaaagaaaccctactaactccaaaataaattacagagtcattatgctattggtatcataatcctagtccaacatattcttaattctcatttcaagaacagatagttaggcaatgtctgcagaagtagggatttatcaaagaaagagaaaaaaaagattagttaacaacttagctatatctgaaaaaaaatatgttaaacctgatcgatatgatgttgtgtatgcaaattacaaccacgaagatgccactaggttcataacttcagctaggatctaattaaagtgcacatctggctgcttatcaacttgtaagcatgccaaggaagcttctgagagctagatttccagggttgatcatgtggatttgtcggcggaaaactctttgagttttgtatgcaccgacgggccatcagattcttgttctggaagaatggagtattttcttgcaatttgtgtccactttggtccttaatcgcaatctactgccagtaaagtacagcaggtgttgagcttatattaatccattcattttgatggtcattccagcaatgaccttacttgatacactctgtcagcacgtacaccaagaacaaaaataacctcaggttgtatgagcatgcagttgtagctttgcaataacctcatgttggacaggttgctgttttctgaagtgactggtggtagactggtagcatgcatccgcccaaaaaaaaaagttcattaaccgtctgtttatttgaaatatttgtgggtttatgttttaatatttgatcatccatctcatttaaaaatctattatctattatctatctatctatctatctatcttctatctatctatctatctatcttctattatatacttaaaagtccattaaactttctacaaacgctctcaagccgacacgtggactcctaaaatcactcttagattgccacgtggcactttaatagtaaaaaaatctctaactaccaatttttctttaaataagtggacccaccaaatctatcctaaaaacaagtacgtaagtactatccgcctcacgttagctgaacgatgaccaccccccaaattctttccctctcctattttcaagttatatattagatagaaattagaaacatatacaatcgacctccactccaactaaaagatctaaatcatatagcttatttgttatccatgtaaattattagattatttacaacaaattcattttttttgcccagaacaaatttaaaatttaagacccaaattatttaacaagtaaaagaaatgcattattttggaccgtcactcacgacacatttttaggggaaaatcatatgactaacaaaatgtagcatacattgaaacaatatgacgcccataaaattaattaataacattagcataataagtagtttaattagaaaatacatatttagcaagtaaaaaaatgccctattttggatctctaatattggataaaaatacgaataactcaaaccagtaaacacatttgttaaaagaaaatctcctcccctcaccaccaccggtggtaagaacatgcgcacgtctcatgtcaacgaccaacgaaaatagaggggtaaggattgatagttgtcttttccaattgtagatactacaaacaaacttatttttttccctgtgaatagtctatggatattatgtatgttttttttaatcgattttgctatatctcactcgaaagattttttcttatctctcactcgattttctcactcaaatttacagttcattttcttgtaagttacagtgtaatttatgaaacttacactgtaacttttgtaagttacactgtaatttttgaatcttcgcatgtaaattttaaattttgtattggatttggtctttttcttgaggatatggtaatttattgtctattatggtgtttcttaattgctttttgccttttattatatatatcggattttaatccaaagattaaaaatctgtgtgatacaattataaaaatctttcgaaagatgtataggtactcccttttttaatactgcatagctatttttcattaagtgcgtatgtacgtgcatgggcttggcccagtgaggaagaggatagggaggtggaaaaagtgcattaaatttcctaagaagcgcttctaggccaccgcactctaataggccaccgcactcgtataaattctaaaaaaaaatatctagccgttgatttgcacttaaattagtaaaccccgttattttggtcattggattagttctatcaagaacccctccctccctcctaatatctccctctcaagtacataataagagacaaaaacgaagcacagctaaacaatgcgtaggagataaaatacgtcatactgtttaccagaaaaaaaacaacaccaaagaaaaataaaagtacataataggatccgaataaaataaactgtctttaaattatgaatttttataatataaaaatatatattacctcaagcatacgcacacgtaaagcagattgtaaagttcgtaaattttaaatttatatatactatttatccaaatatatttcttaaattaaatataccattaataacatatgatggatatattgcagtgctaagtacatcgtgatacatgatgccaacatgtaataaataattttataataatttataataatttcatatcttaaatagtatctaattttactaatttcatatcttaaatagtatcaaattttactaatttcatatcttaaatagtagtaccaaattttacttgacaaatatactacacaatttaattgcgtttttacaactagattcaaagtttttggaatattttaatattttttagtgttatttgaggagtaataagcatacattataatagacgcgaaaacaaattaaattaaatttctgcagccagtgaccatgttataagacaaccccttaatctaccataacaattatggtcatgcgtgtaggttttttctctatcaaatagttttggcagcaaatggataattcacttagataaacattaaattgctcatgttataattttttataatcgatagaaattctaatatactcataattgacagacgtatgacacatacaccccactgaaccaactttaagtgtaccacaacaaattagatattgtaaatatgtctgtgaaaataaatacattcttattgtttagtaaatgtatctcatgtgattataaacacaacagatgttggaaacaaatcaaacgctgtactatatatatttgtcaaaatataaacaatgatatgatgctttggagattgtcaagatggtaactctcttcagctatagttttaatgctaataatcaacccctcttatatttaaaagagaatattgtatctatatcattaaaattgagtagtatttattaacactacaaataaattatgtgtactctataccacaattggactcaaaactttaaaaataactattttcaaccatatatcctccttctcaacaagatgtctaccatgtacaatagagcttgctatgatatcgtaagtattggacaacatacatatgactgagttgaggtggtgtaccattatttgaattatagctcatctggtctacccaccaatacaatcatatatgagtgtgctaaatcttatataagtgtgttgatggtgatgtaggcgttaaaattgtgctcaagatggtcgatgaaagacccatgctttaaggcattagagaagaaaggcttggtggctacggtcggctttacccattagaagggtattcatgtataattttaacggtgttatcttattacctgagggtagaagcaatattctcagacataaatagatttacaaataagtgagacatgaacacttaaatctgtagcgaggatgatttggaaataagtaagacacggacacttagatacgtagtgatggtgacttggaaacgctcttaagccgccacgtggcaatcctacaaacgctcctgaatcgccacatggcactatctaatctcaccgttgattttcacttaaattggtggtcccgatattttagactattagattgcatctgttattaaaaaataataccttccttccacaggagaaatatataactgttgcctaaaagataaataccttccccacgtatgtacgactaaaagaaaaaaaaagttgaaacatttgccgccgtacgtacgactaaaagaaaaaaaaaaagctaaaccattaattgtttgccgtgagaaaaagaagaccatgtgcatatacttataagatagagaaaaataaagaaaaaaagaacgtagtaccgttcctaagaaaaatcgatgttatttaatacaatttacaaattcacgcaaatatgcgtagttaaattacacctataatatataaatataaaatatccaatcaacgctctttaaacattccatcttttaaattgttttaaatttatatccaatttgtgatactattctattcctttacttaaagatgtctatgatccaaaatacatcacaacacatgggaccgacatgcatataattgatgttatgttatctatctattatctatttattatataataaaattctattaaacttactacaaatactcctaagccgccacatagcaaccctgcaaatgctcctaagcctccacgtggcgctataattatttctaaaaaaatcaaaagaaggcaaaacatctaaccatcgattttttttttaatttattcccggacccattgttgccaaccattagatctatttttaaaaacgatcaattaaatttatctccatcaatcccacgtacacgtgcatatatacaagcaaagcacatacgtatgtacggaaccagctggcctcatgtccctctttttcttttctttttctttctaaaataaaaaaaataaatacaccgttaaaaaccattagatctatcatgaaaacctaacagttaattttatcgctaaaaatcactaaatacacgtgcacataagcaccgtatataagtacgtaagcacgttggcctcacaaccctctgtctgttttttttttgtcattctgaaatccaaaaaaaataaatcaaagctacatttagggtttaaaattaaaaatcaagctataagcttccgattataggatagaaaaaacagtatgcaatttgaattccttattgataaatcattgtattatccttaggtttccacaaatatgtcatagcaattcggaaggaaaaaaaatcattttctacctataccatgcaagaaacacacacaaaaaatttaagtccattaaacatcatgcagaatgctcctaaaccactacatggaactttaataatttagaaaaatcatataaaaattataagaaaaaagaaaaatacttagttatccgttctaacttaaatgtgtttgtgtttctttcgtactccccccgtcccattttaagtgcaaccataaaatttcatgcccaattttgatcgttcatattatttggattttttataattagtatttttattattatgggataataagacatgaatagttactttatatgtaacttatgtttttaatttttttttaagttttttaaaagacggacagtcagagttgatcacggaaaatcatggctgcacttaaaaatgggacatagggagtagtaagtagatttttaaggaataagtttacattaatcactgcctttcttataaataatggaagtacagtttcaaccttttaatataaataaatggttatgttgctcaaatgtgctttattgcgcactcatatcaaaatatacaaattatcagtttgaagtatatattttttatatctttataaataaaaaaatacttagaacatgtgacgagttataatgcacgcataatgttatgatgccggactcagtcatcataagaatataattatgattttaatcttttactgcctaattaaatatgtcaatgattgttaggataactaacgctcaacatttaattttgaaaatatcaaacactcatattcaaaagaaaaagatatagttgtataattttgaacgatattaacaaagtgcccatagagtgagctataaatattaatcttggtggtttataaatctatacaatctagaaagtatcataactacttaaaaacatttttaggacaaatatcatgtatttaaactattatgaaataacatcttaagtaaaagtcgtcgtatatccctatggcaataaaataaaaacaaaatgtccgtgcatgttttattccttcacgtagcatctaggcaatcaagctgctaatggaaagtttgtttggttatgatttacgcattgatagatgatattttgatctaggtgggttaataaattttcaattccgtgattttctacactccattaaaacatccgttcttttcaatactctattttacacatgcattcctatcatatttttttaccttttctattctttttttttcaatcatgtgttacgaaggaacctttaatttttttttcaccgagaggcaaagtcataacatttcacaatcttaataacacaaattatgatggtttaaataacatgcccgcgcagacgcgcgggctaccttcctagtttataaaaaaaatataagttatgcatattcatattttatcatctaataacaataaaatattaatcacaaaaaaaatcacatgataaatctacatctcacatgaaatttattactcctattttatacatccaatccagtacctaaacatgaaccaattcctgagtgcttgcctaagttggcaacttgtgactagagaggctgatgatacctgcatgcatcctagtagtatcttgcaagttacaaccaagcatgcaaacatagtaggatttgaagactgcaaatcaagtatgtttaccattttgttagggcatggcttcttttggtaggtttgtttggttttggtcgattctataagtttaacggtttcacttttcacaacagtatctttttttttacctatagaagtttacttagagcatctcccaacatgctgaaatctaactctccaaatttctatttggctagcttgtcaaaaaaaaaaaatcagagagtcaaatttatctttcacttctataacttttcaattaccctcttcaatatgacaatggattcacttgtcaatctctgcgattcttcttcttctctccctcaacatctttccttaccccacccatagtgccccagacgatggcattgggtggacgcagtgcaaagggcccagtggggtccggcagcagcggagatgcaaaggagataatggatgaggaagttggtgtggcgaaggctgaggtcgatcagtggtgggaatgctacctccagtaatggcttatagcacatgttgatttgaatgtctacgacagggtacgacaaggtagcctcgagacaacaacatgcttctcatcaacatggagggaagagggagggagaaagtgtcgcctggtcacctccattgtcacactagccactggccagctctcccacaccaccaatgccaggggcgagctttagcacagccaccgcttcacctccaccaccgcactaccctagcttcgcccaacagccaccgtcaacgcctcctctccgtcaacataagagagagagagaagaggagagtagccatgtggggaggaggaatagtacatggggcctaccgtttggcaagttattttgggttgccaagttaggccaataaggggagggatttggccatccggttggaaaggttattggggtagtatctttttactagaattgtcaaaaaaaaatagtttgagagccatttggagaggatgttgcctgttagagatgctcttaggacatcaaattccataaaaacatcagaaaaattctctcgatgaagatttataaccactaaaactgccctcaattcgaagggagttcaaaacaattaaaatcatgttcgaattgagtttcaatttcactttaacccctttgaaatctcaatggtaaaacatcaacccgtcaggtagcatggttctttttattcctttcaaaaagagttaattacaaacagaatcaaaactaacagttaggcccaaggcccatccgagcaaacaatagatcatgggccaggcctgccaccaccctccccctcctggctcccgctcttgaatttcaaaatccaaaaatatcggcacgactggccgccgacggagcgggcggaaaatgacggaacaacccctcgaattctaccccaactacgcccaccaacccacacgccactgacaatccggtcccacccttgtgggcccacctacaagcgagacgtcagtcgctcgcagcaaccagtgggcccacctcccagtgagcggcgggtagatctggactcttacccacccacactaaacaaaacggcatgaatattttgcactaaaaccctcagaaaaattccgatattccaaaccagtacagttcctgaccgttggaggagccaaagtggagcggagtgtaaaattgggaaacttaatcgagggggttaaacgcaaaaacgccgaggcgcctcccgctctatagaaaggggaggagtgggaggtggaaaccctaccacaccgcagagaaaggcgtcttcgtactcgcctctctccgcgccctcctccgccgccgctcgccgccgttcgtctccgccgccaccgccgccgccatgagggagtgcatctcgatccacatcgggcaggccggtatccaggtcgggaacgcgtgctgggagctctattgcctcgagcatggcatccaggtaaaacaaacaaaaacggatctgatgcttccattcctccgtttctcgtagtagcgcgcttcgatctgtgggtggatctgggtgatcctggggtgtggttcgttctgtttgatagatctgtcggtggatctggccttctgtggttgtcgatgtccggatctgcgttttgatcagtggtagttcgtggatctggcgaaatgttttggatctggcagtgagacgctaagaatcgggaaatgatgcaatattaggggggtttcggatggggatccactgaattagtctgtctccctgctgataatctgttcctttttggtagatctggttagtgtatgtttgtttcggatagatctgatcaatgcttgtttgttttttcaaattttctacctaggttgtataggaatggcatgcggatctggttggattgccatgatccgtgctgaaatgcccctttggttgatggatcttgatattttactgctgttcacctagatttgtactcccgtttatacttaatttgttgcttattatgaatagatctgtaacttaggcacatgtatggacggagtatgtggatctgtagtatgtacattgctgcgagctaagaactatttcagagcaagcacagaaaaaaatatttagacagattgggcaactatttgatggtctttggtatcatgctttgtagtgctcgtttctgcgtagtaatcttttgatctgatctgaagataggtgctattatattcttaaaggtcattagaacgctatctgaaaggctgtattatgtggattggttcacctgtgactccctgttcgtcttgtcttgataaatcctgtgataaaaaaaattcttaaggcgtaatttgttgaaatcttgttttgtcctatgcagcctgatggacagatgcccggtgacaagaccgttgggggaggtgatgatgcttttaacaccttcttcagtgagactggtgctgggaagcatgtcccccgtgctgtcttcgtcgatcttgagcctaccgtgattgatgaggtgaggactggtgactaccgccagctcttccaccctgagcagctcatcagtggcaaggaggatgcagccaacaactttgcccgtggtcactacaccagtaagttccatctttactactatctgttcacaatttctggaaatgtgattgtttggatgtctaacatgtggtgccgttcgtttcagttggcaaggagattgttgatctgtgccttgaccgcatcaggaagcttgccgacaactgcactggtctccagggcttccttgtgttcaacgctgttggaggaggaacgggctccggtctcggttcccttctccttgagcgtctctctgtggactatggcaagaagtccaagctcgggttcaccgtgtacccgtcccctcaggtctccacctctgtggttgagccatacaacagtgtcctctccacccactccctccttgagcacaccgatgtcgctgtcctgctcgacaatgaggccatctatgacatctgccgccgctccctcgacattgagcgcccaacctacaccaacctcaacaggcttgtgtcccaggtactgccctgcatctttccttgcagcgctatgtactccagttatttgctgtaagatcaatgtaatgtgcaatttgtcttgacatcatgtggctaatgctaatgtgctgcaggtcatctcctcactgactgcctccctgaggttcgatggtgctctgaatgtggatgtcaacgagttccaaaccaacctggtgccctacccgaggatccacttcatgctttcctcctacgccccggtgatctcggccgagaaggcctaccacgagcagctctccgtggcggagatcaccaacagcgccttcgagccgtcctccatgatggccaagtgcgacccgcgccacggcaagtacatggcgtgctgcctgatgtaccgcggcgacgtggtccccaaggacgtgaacgccgcggtggccaccatcaagacgaagcgcaccatccagttcgtggactggtgccccacggggttcaagtgcggcatcaactaccagccgcccagcgtcgtcccggggggagacctggccaaggtgcagagggccgtgtgcatgatctccaactccaccagcgtcgtcgaggtgttctcccgcatcgacatcaagttcgacctcatgtactccaagcgcgccttcgtccactggtacgtcggcgagggcatggaggagggggagttctccgaggcccgcgaggacctcgccgcgctggagaaggactacgaggaggtcggctccgagttcgacgatggtgacgagggtgatgagggtgacgagtactagagaggttcagggttcttgcctggtgccttggcaatgcttgattactgctgctatcctatgatctgtccgtgtgggcttctatctatcagtttgtgtgtctggttttgaaaaacatttgcttttcgattatgcagggtttgcttgtagctttcgctgctgtgacctgtgttgtttatgtgaaccttctttgtggcatctttaatatccaagttcgtggtttgtcgtaaaacgaagcctctacttcgtaaagttgtgtctatagcattgaaatcgtttttttgctcgagaataattgtgacctttagttggcgtgaaactagttttggatatctgattctctggttcgcaatcttgagatcgtcgctgcttaggtgagctaagtgatgttcctaagtaaatgctcctcaccagaatacgtagctgtgtgaaaagagaacgcgtgaatacgtagctgtgtaaagattgtgtcccaagtaaacctcagtgatttttgtttggatttttaatttagaaacattcgactgggagcggctagagccacacccaagttcctaactatgataaagttgctctgtaacagaaaacaccatggcaaagtgcacataaactttcccgtattaacaccaactagtaaatttcaacaaaaattctagaaaaattactaattatgttatcttcaaattcattatatttagggagcaacaaaaaaaaagacaaaatgttcccgtgagagtaaggctatgtttagttctaagggtgaaaatttttgccatgtcatatcgtatatacggacatacatttaaagtattaaatgttgtctaataataaaacaaattacaacattcgactgtaaactgcaagacgaatttattaagactaattaatccatcgttagaaaatgtttaatgtaataccacattatcaaatcatggagcaattaggcttaaaagattcgtcgcaaattagtcgcaatctgtgcaattagttattttttagctaatatttaatacttcatatagatgttcaaacgttcgatgtgacgggatgaaaaaacttgccagaggatctaatcaggccctaaaattactactatatattggaggccaagtttaattccaaactttttcttcaaacttcaaacttttccatcacatcaaaactttcctacacacataaacttccaacttttcacatcacatccttccaatttcaaccaaattttcaattttgacgttaactaaggctgtgtttagttggatccaaagtttggattttggtttaaattagagatgatgtgactgaaaagttgtgtctatatgacaggttgatgtgatagaaaatgactgaagtttggatctagacacagcttaaacatatgttgaatttaccactgagaatctcactgtcatgtccagacaaaattttcagtctcgccaaacaattaaacaaaaatacctgtagtgtactcctacgtaaataaatatccgagttagttggaagtgcacaaaaagcttggtttttctgtttctgttacagatataggaattaggaaagcattgcaaaagggattctcacatcacattatgccaatttgaagtaacatccttggtaaaaagatcagaaagtattctccagctattctatgtgaactagatatggcattaggtacaaataatcatgttgactttgcttcctccggctgcaattcttgcactgggatcctatggaagcaagcaagaaactctttgttcccttccgcgccctttatcggagattcaatccagcccttgttgcagaatccaaactgctctacgcctgaaattatcctatctagcacctgtgaccaatcaatggaatatgttggtactccgatcagaactcaagggaagaatcgtgaagtaaaatgaggcaacaatcagacactgctgaaatgggatcttttcaggatataatcaaaggatttgtttggggggtcttttcttgcttacaagtgaaactatttgtctggtggaatttcaggaataaacagcaaccttattttaaggaagtagctcattcctatattcaatgtgaagctttatgatggggacgcacaaaaaaggcagcaaatcatattacctctttatgaaccagagggtcccgaacaatcccaccacctcctacctgaacaggataaaaaggatttgctgttagtggcttgcttatttctatcactgtgcatgtatgaagagatctgaaggctatgaaagtgattatacattcttttccaattgatattcaatcaaaacgttcgaaaagaaaaactaagaccatttgtttgatacctgagatcgacgagcttcaaattgaggtttgataagtgtaatcaatgtcgagtctgtcttcattactttgactacagcaggcataaccttgatttcacaggtaacgtcagtgaacaatggatagcatgtgctttaataatttatcgaagctgctgatcttatcatcttatatttggaaaagattgcagaacatcaaaaacatcatgaacttgaactacataggtcagtaggagcatcggcagccatggacgccaaaagcacactattttttcccaatgcactattacttcagcaagatgagctaattgactatacaagaactctattgcaatgatactttttttttgctgggtcggccaaagattggccggccaatttcattaagattgagggaaaaaaagttttaaatacaacgatatgaaggatgtcgcgccggtctcaagcaatgatacttagatcattatgcgctaaatactaaacattgctgggaggacaatcaagcagcgtcggttttctaaggagaccttggaagagaaactacaaactagactaaatcatcttcattgcttaatgagaaaacaatgccatcgttatacaggctagacgtcacaaattaatctaaaccttcaactgctgcaaataacattctaaaccagataagacaatatctataagattactagatagaaactgtaactacatataagataacagccatctagtcaagcaaccatagttaagataacagggcacatgaatatacattcctgcatatgatatatgcagcatacaatatatagatgcatttaagtactggaagtctatgtagttgattgggtcaattttactgtatataccagacaactttacaagaacacacagatcatgatcctaagtatatcatactaaccatacaaatgaatagtacaaggaatgttttgtgcagaaacaccaactaaagaacagaacgatgtaaaataacccagtgtatttttcaataacatagggaaatggtattctcagttaagaaacagtgacatattataagagctctgctaaaaggacttgtgcaagtggacaatcatgcagacattaaaaaggcagcaccaaatcataccaagagaattgagatgaatgacagatccagggtcaccaagtcaaccagctgtggcagttcagtaagatatcttaaatttgtacgttcaattactgaaacacgttcatgcactcgaattttttcagccacctgaaatgaagtggagcatattatagttctgctgctgtaatcttgtaacaactacctgcagcttacaaataatgtgatagcggttagattaaaaataaacttttaagggagtagcgcaacctgtccatagccaacatcaacaccatatacatgtgatgccccatgttggagtaaacagtcagtaaaaccgccagtggataaccctgaatcaagggctaccttttcatcacagtcaataccaaattctttgatagccgcctcaagcttatgaccagctctgaatttgatcaggacagatgacacaattataaactggacaaactggagttacttttgtttgatagcaaagtaagccaatcagttcgagcatcacctacatacatattttggaatttcagccttgatttctatgatcgacttgtcagatacttgtgttccagctttattcacaacccttccatccacaaggaccttacctgaaatttgacataacagagaatgctttattaggtttgctttacatacaaaatatacttatgtacatggttaaaaagtcatagctgaaaggtgaagtgtgcaatttcctggtagatgtcatatgtggcaatagcatgagaaacacatttgagtacgcatatcatacaatctgttgcagtagggagaacttctataagcttttcactgatgaaattcaaaggggggaaggggcaaatttatggtgctaatattttctttgttccaaactcagttactttgatatatttgaatatgatgtaaagttatattgtaaaagtgccatgaaacatgagggcagataattgttgttaaataatgatacattaagcttaaggtggcataagtgtgcctctaatatagcttccccttagaagtgaacagttcatttcgatgtccactgatcttaggacaaaatatatatgatcaagtgtcacagaccattctcatatgtcaggaaagttgaataatcatgacatgattaaggcatgcattgagttttgcattatttggcatgacatgatagctgagattgccttttgaagcagtgttattaccatatgaagtataaagtgccaaaccaattcatagctgtaaagatctaaatgcataaaatcaatgaagtaaaggactaaccctgaagaatccatgattggatgtacgtcctgctatactgttgaaatctctcaaggcacacttcatccaatcgtcttttcctgagtaagaagaccaaaagtgacaacgttggttgaacaaactaattgcacgatacaaaataccatcacaataatgatattgagccattgccgctactttctttacggtaattgagtctctgatttaacaaaactaggatattgaccatttaactttaagaaacaaattgttagatttaaagagaatttcttacacttcacacttctaaataaaaacactggagtataacctctcaatgtggccacaccatgacagagcaggcaccgcacgactgttgtatgcacaatatcaacaactagtttgcgaatgaagaaacacacagaaaatagggaatctggaaccaaagcctacataagcagagccacataacattttgctatatgaaccaaagcttaagttactcggcactagatatgaactacccggcattacctaacacaagcacataaaagcagatttgaacaaagtaaaacaacagtgcagtgaaaaaataaataaattcagaggccttacttcttggcgagctgaagcttttgggttctcaccgccgcgaaatcccgggacggagagcagcaggtcggcctgaccccaatcagcctaactgagaaagcaaaagccacaccttaattaaccatttgaaagctctcttccagaaatcaagaaattggaggcagcacatgctacctagctcccctctcaacatcttcccaactacgcaaaacaaacacaccacaggttcagggatgaaaagggataaaccggttaactagtactcctattcaccacttgattccccaaccaatacaccctgcctgccctgttctttgtttccgatttctgtaagagccaggctatccacagataacaagaagaaagatttggtctcgcaactactagaacagaggaggctagcgagagaggaggaggaggagaagaaaagcaggagagagatgggaagagctcttacgctggtggaatcggagcctggaagccaccatcatcatcgcctcgcctcctcctcctcctcccgctccactccccctccgagccaaaaccctaatctcagttaccctatctcagttcgccgacgagatatatatatgctgtaggagaaggagaagcggcgcggatggcgggcggcggcggcggcggcggcgccccttctctcctctcgctcggtcctgagaagcgagagagagagagagagagttagaagatgtggtttggttcaaccacagccaggggcaaaaacgtccgaggaaaaaaatggatgaaaaatgttttgcaaacgtatggagaaaaatgatactaatatgttaacttcaaaagcaggtttcggtcaaatgctattatgagagtgagctttgttaaactgtcactctcaaccaagggctacatgccagaatgctactttggacaaattgcccctgtctcctccatccacctcctccaacgccgtggatgaagtgtacgacctccttccgctggccttcttcatctcaatggtttggaggacgatgacgacgaacacacggatccggttgaggatgtcgatgaggtcgcagatctggcgtcgccactgatgagcgcatggatctgtcgtcggcatagatgagcacataggtctactgtttgccgacaagagcgtagttctgtcggccgccaccgacgagcgtgtggatccatcgccacagttgatgagcgcgcggatgtaatggctgataacgataagcgggtaggtccaccggccaccgtcggtccgtcgccgatgagcgcacgagtttgctggtcgtcgctgccgagggcacggatcaaacgaccattgccaacgaccgcgtgggtcagcgcctcgccgtcgctgtgtcctcgtcacgatggaggtggagtatattcggacaatatagcgtgtagccttcggttgggagtggtattttaacgaagcccactcccaaaattgtatttgagtgaaactcatttttgaagatgacataatatcaattttcttaaatggaagaaacaatgaaaatgacaatgtagcgaatgccagcaggttgagagtggcattcaagcgaatctcaacgataacattctagcgaaaccggtttttaaggatgtcacatgtgaatttctcgctgtaggatggctgcatcccgataggtgggacccacatggcattggcgctgcgccattcgccaatcaagccaaacagcaagaagattcatcaactttagatagatgcactttacattcagacattcatagtcaaccatagaagattcatcaaatgtcagcagttgacagcatcacttaaccagcgctacatacactttacattctctgaattccaaattaatgcctttggagaaagaaattatttagacaatcaatggagacaaaatgattatattattattattatttctaatgttgctttgaattgccatcatgaacagaaattttaagcgaaggagctaaacagttgtttgttacagaatatcatcgactgagttcgccttgattgatagagtcagcatagcagattcatgtcttcagttgacaggatccttaaccatcatgacagatgacaaccacatactctgaattccaaatcgacgcctttcggcgaagaaaattgctcagacattaatcaaatgaaaggtagaaaaatatggtatattactcatgttgctctgaattgcaaccactggattaaaaatgaacaagaagttattcaaaaaacaaatctatctaccagcgtaatttacatgaacaggtgctcaaggtttaaaaacagaaaactccatatgttggtaaaagaaaattaaaagtacaaggccgggaggcaaacacaaactcctgtgttcgcagtggttcttctcatgctacaattagtacacaacatctctggacagggaaaccccactccaattcagacaaactcatgactcaaacaagccattcttgtagaagagagtccaatccgagtcgtcggacgacacgagctcgaatccttctgctctcattgactctgcaactgaaactgggtttgaagaaggcttactgtcattacacatttcaccaccaccaccactacaactgaactcaaccgatccaaagccacatgctgcagccgtttggtcgccacattcctgcaggcaagaagggatgactgactgaagctcggtatcgcgcaaagcctcttcattgccttgaaaaactggcccatcctcatcatcagaccaccacttgcagcagtccagatcacccatgtcaaacatcctgctaaccagcccttctcgccaagagatccgggggtccgcaaggaccggtttctgaaaacttgcactcttctcccccttcaattctatgccacaaggtgatctcttaaaagaggtcaagtctatggattccagagacattggagcacctgcaaactggaagctaaggtcaggcaatggtgcaggcaaggcaccatttccgcaataatcggcatccccgggccttggggacagagccatcatctcgagacattcgaccaccggatccattttcgtcaaagggcgactgcaagtcctcgtcagccctgagcacttgctgctccatgactcaccggagatcgctgtcggatcagctgccgagccatagctgcagctgcctggtccttgctgggaacacaaggacttcagtcctctagaggacagtgattgtgatgccctcttcacaatgagtgagaagggactaaggctgtcaccggtgcttggcgtcttctgcaggggaagaaatcctgatgacggtgtcgtctcggacaattccgatgccggcgtgccaaggtccaatagaccattgagcacaggtgagctcaacagccccgtggatttgggggagatttgccagaacgcatcctccaaagagcacctcgggacaaagatctcatcgccgagaagatccacgccgcgctcctcgcgcggcgacggtagccagttgacggatgcctcgttggtgcatttcgtcgagcacgttccgggcacctcccccgacggtgaggacagccagtggatcgacgccctggacgggtcggggtcgagctcctcgctcgccccttccccggcgatggccaggatgcccctgggccggcacttgcggcggtcggcgaccccaggcacgacgtggtgccccgccgcgaagcacgccggcgtggcggacccgcacgccagcacctcgggcgagatcgacgcgtggatcggcggcgtcgccccggacaccgccggcgtggcccccgcgtccgccttcctctgcggcgtcagggcctcgccaagaagcggcagccccctcggcggcggcgcatgcttcctcgccgtctccgtctccgccctccccctcgtcatcatcttctccaccacccgggtcctcgactcctgatccgcggccgccaccacccggcctcgccgcccgatctccgggcggggcttcttcaccttgggggacgccacgggggtcctcgacctggacccggacgacgcggacgacacgaggaacctgaagcacccgccccgcgcggcggaggcgtcaccggagttgagatcggtgagcgggctacggcgacgctggccgccaccaccagcaccagcgacagcattcttggcggtcttgggcgccgtcccgggggagggggacggggaaggggaggccctcctcctcggcttggacgcggaggaggcgggcgctggcttggacatcctcggcatcatggcggcggtgggtcagggggttggtggcggcggtggcggcggcggcggcgagggcattggggggatttggtttggtttggagaggagaggagagaatcgaggagatagccgttggaggaggagggttaagtgtcaaccgtcgtcagatggaggcattcaaagttggtgtaacggtaaaaggggagaggattcctcgccgaatttaactacgctagcacggtttactcgtgagtcgtgacacacaagatttacggcccaagcgaataaatcaaacagtatatttgtaaataaaaaatatttttttactaaaacttttatatatatttttagtaatataaaagtaaaggctgaaaaaataagcatcgatgaaaaaaaaaacctcaaaatcaacctcaaaaaatttaaattttagctaataagtataagtataagcgaaaagatgaaccctttaattattataaattacggagtagagtccggtttatttggttgataatgtaataatctttgatcgggatgaattactctgtgtctctgtgttaaacaggtctccacagtattttcggagtaaaatttattcgtgaaatctcaggtttttggagtacgataatacaaaagttgtaggctaaaatgtttcatgaaaccaagattaatgaatgtatcgtatacctcgtataatattttttaaaaaaaacaaattaccattataaaagtactccgtatttgttatttttctaaaatacatagcctgtgtttagttcacaccaaaattaaaagtttagttaaaattggaatgatgtgacgaaaaagttgaaagtttatatttataggaaagttttgatgtgggcgaactggccagctcaataagtacggtaattcgaaaatttttaagtgagcctattactcaatttagtgtttacgtgatatgtcacgtcaacgtcacgcattattcacatcaacaccatgtaggatttttcttgctaatttgaaaacagaattaaatgatattatttaataagttttgggacctatatctatattttattttagagtacaacgatataaatgacacggatgaataagtttaggaccgactgtataatttaccataacaaactcaggttatgcattaatcataactattattagaggatttgtgtaatttacttgatatttttttattgaatttcggttttctgaaagatcagcaagaattgttactgacaaccgacgcaccgtgctaaagaaagaggaaaaccattatcctcgagtgttgtgaacggatcgtgactttactcgtctatcaatgacaaggtcaaattgtacggtacgccattgttaaattgttttattccttaattatatgtctccattagattggtaaatgagtaatttgtctctactctctaggatctatgtgcactaacgtacgaagctaaggttgacatgatcccattatcacgtttataaagcatttttttaatgatattattgatctggaattcatgttatttcagaaagatgtggcggccgagatccaccaacttcactgaaaattatcgaaccacctacaatttcttttaccctaaaaaactttgatttttatattaattgaaaaaagtgccaaagaaataatgaacagaacttcaatttcagtcaaaattcccccccaaaagttctgaaccaaatttattttcttagtgttaaattatgtggccattttgacaacaaaagattatttttggtttaactatcttaattaacaaagtgtaattatccttaaaaaagacagcgtaattctacgaacattgaactccgtataattttttgcatcctttttcaccgggctcggcgaagcggcagccaattatttttaaggatcaatacattaacaagtaagactcttcacagtgctcctagctggagggttacctcgtttgtcagtgctcctagctagagggttacctcgtttgtcagctagttcaaaatctgatgtggatgaaaaaaaggtggcgggacccatatctttgctaaggaatgcatccctagctagggtacggtttcctcatgccaaaagggaaactgtgagtggtcccctcacatgcttgcgtgcatgggagggagagatggaagtgaaaagagagatgagtggggcctactaatatatataggtgggacccactaacatagatattgtctaagacacatgcattgtgaggtgtggttctctaaccggtttctagtctagctggaggccttgggctcctcaagtgcgctaccgcacttctactgccctaacaacaaacatggttgtgaagtagtatgaactactcccaagaaaaaaaggtaagtgtgtgctggtggaattatggcccaccagattttaaatttacatatacgggtactctttcaatatatattttgtaagatcagacacatgctacgaatctccaactttgtaagtgtgataagaggcggtcttcattaagtggtatatatactcctacattttgtgcaaccgaagaaaaaaaaactgggtcccctcgataaaaaaaggggaaaatatactgctccctccatcccaaaatataagaagttttagagttagacacggttattaagaaagtttgtagaagtgagtggtggagggttgtgattggatgagtagaggaggtatgtaggaaaaatgaatggtggagagctgtgattggttgggaatagaatgttggtggagaagttgttatattttaggacaaatcctgagggctaaaagttgttatattttaggacatgggagtactaagttgcagggctcgttgcagtctcaaattcaacaacaaaattttcaaaacagactaatttttaaaaattgaatcttcaggcagacccctccccacacactaccaacccctactatatgcggaattactattgggcgagtgatcgcccagggcgatcggatccggatccctctccctccacctggtttcctttttttggcaccgtattactttactattttagtaattttatgcacctaaagtttgtaaacctcaagtttacacatctaaagtttagaaacctaaagtttataagtcaaaagtttatatatccgattcaaatttgaatttgaattcaaatatttttatatatagtatttctatacatctaaagtttatatacccaaagtttataagtcaaaagtttacatacttgtttcaaatttgaatttgaattcaaatattagtttatagacccaaagtttataagtcaaaagtttacataatcatttcaaatttgaatttaaattcaatttttttaatatatagtagttgtatttctatacataaaatttttccaactttatttttttattttttaaatttgtatggtgtactgtattaggaagagaagaattgggggggggggggagagaaaaggggagagaaggtagcgtatagggagaggggtgggccggtgatcgctaggagcgatcacccccccattagccgtcccttactatatgtgctgagttcttttctttgggttcccattgcttaacggtgtgtttttttaaaaaggttttctatacggaagttgccttagaaaatcatattgatctatattttttaaaagctaatacttaattaatcacgtgctaatgaaccattccgttttccgtgcagagtaactccacctcccgaacacagcttaatcgggcttcttacaaaagtttactttttataaaacaattgcaagaaatgtgtttgcacaaatgaaatgatgaatgtaatttagcttcacaaatgaaattgcaagaagtgtgcctccgcatgtactgtgtttaaaagtaataatcaacgaagtgagcgtagcttaactggcaaggtttctcgtggtggaaccatttttctcgcgttcaagttctacatttgaaacatgggtactcgcatgtagatgagcgatatatgcccgtcgacatcgagacgcctatggtgatttcgtgaatctctacatatctcgtcccagtattttggagatgcttatagagataggatctgcatgtgtgcgtgcgtttataggggtgattatccaagaacgttcgtgtaattgtccgctcacgaacacgtaattatcatggtagttattgtgattaaatttttttatgcgaaggatagtgtgattatcattcccttttttgagcagattttattttgcatggatttttggaagtgattaatatttctttcatcgaaagtggattagcgtttctgtttcacatcttatgtttaacatttttagacatgattttcttaacatattagcagctctatattcacaaagccggaccaaatttaacgaaactttatgttaaaattattactatctacttaaattgccaaactttatactcaaaaactttcgacagcaacgaaaaagactttacgcacgtaaactttatgttaaaaagtcatattaaactttctactcatagactttacacatatataaactttgcacgtacgattaaacattcggtatgggtagtttatacatagaaatatgaattataggaactctatatataaatttttagtatagaaaatttaaacatagaaatcattcaaattggaaaaaacaaagtttttgtttggatatgatggacattattataatttagtatttcaaaattatggtttatttcttatagtgaatatggtgagataatgcttttttaggttttttaaataataaataatctgcccgcgcaactgcgcgggctttcttcctagttcatttaaaaaatattgtgtaatcagcatctttattatcggtaaatctaattggagaggcctctccaattatatgaagtataggaacgggaccacctatacatttgtcgacaaattttcttctaaaaatttgacagatgtaattatagtacaatcatagtgtaattacactgtaacttatatgtaattacaccgtaatttgcatgtaactacagtgtaacttatatgtaagtttcacataatcttgaatcgttagatctattacaagatttgttttggtgaggaagaaaacaaatcatagcacacacatatgtgaaaaaatttgttcccacgacctccattttaccgaaataacatgttacggagagatttttgaaagttacatacaagttacactatagttacaatgtaattacatgcaagttacagtgtaattacactacgattgtactgtaattatatctgtcaaatttttggggaaaaaattatcgacagatatatagctaaatcgtagatgaaagattagaagttgggcttagaaaattcaaaaggggagtacctatacatctttcgaaagatttttataatcgtatcacacagatttttaatctttgtattaaaatccgatagatataataaaaagcaaaaagcaattaagaaacaccataatgaacattaaattaccatatcctcaagaaaaagaccaaatccaatacaaaatttaaaatttacatgtgaagattcaaaaattacagtgtaacttacaaaagttacagtgtaagtttcataaattacactgtaacttacaagaaaatacactgtaaatttaagtgagaaaatcgagtgagagataagaaaaaatctttcgagtgagatatagcaaaatcgattcaaaagagaacgtcatccatctgacccatcaagcccatatgaatcagacccatgttttttacgcagtgcagggggcgccgtctctggctaatcctggccttccttgtccgattcggattttcggacgcgtaaacggcagcatctcggatccgattccatcccatcaaaattcccttgtccgatttctattccgcgcgacgctttcccgccatataagggtgccatccatcacgcctccagcaaattacagcagccagagttgagaagcgcaacctaattgcgagcagctagcgagcgagctcgatcgcctcgatctcctcgccttctcggcatggcgatcgagttcttgccgaagctggcgtcctgcttccggccgccgtcgtcgtcgtcgtcgtcgttgtcggcggcggcggcgaggcgaggacggcgccaggaggcggcggctcgccgtcgcccagacaaggcggagaagaggcggtgggtggacgagcaggtggggcttcacctggcggcgagggtttgggacggctacggctacggcgccggctacggcaagggcggcgccgtcgacgtgagccgctacggcgacatcggcctggaggcggcgctgggctacgagttcgagcggaggtggtggttcgccgagatggcgcgcctgctcgccttggtcgacgaggacgacgcggcggcggcggcggcaggcaacagcggcgacaacacgccggcggcgaagggtgtgtctggaagtagtagtaattaattagttggttcgtccagctattgggtgtctctctctggaggcctaatatgttgttgttaatagtgttcatcttttaggtttctgtcagtatatattttgcagtgttcaattgttcatagttctgtaaaaaaataaaagttgtacgagactacgagtacacttttccaaagcggaactgctatccgactgtcgacagtttttacgagcgaaaactgtcaaattttttagccattgattccgctctaagatttgtgctaagatattttgctatcggatctaaaccctcttttcacaagctagtcccatcatcacatgtttatggcagatttgttctagttatatctaagttacatgctagttcaattgtagttacattgtaactatagtgtaactacactctaactacattgttatctctatataaattagatataaagttgcatatattattttaatacatatatacaagttattattattatagtatagttctaggaaaattatatactatatagttagatttgaaggtttttttaaaaaaaaaacactcgacggtttttcagctaatccctttccaaagtacgtatactatgaacagtcccttgttaactataaaaactggaataacagaaaacgaatttaacaaccacacacacatatatatatcgatgactaatactcaattatagtggaaaaactaaacatacgagctagaacttacaaaaaactgaagatgcgatcgggtccgtgtcgctcggagcctcaggagtttaacttcataatgtaattggggtgatatggcttagtgagagaagtgaaaaataacattaaatgttttcactgaggttgagcttagcctagaaacaagtaataagttcactattcccagaaacaattttcacatagcccttagcccctattctaaactacacttgcatgaaaacaatttgatttagttcatcgggcgaggggggatcaagaaccacacgtgataatcatgtataggatagttgcccatgtaacacatgatttttatagctaggtgactttcttaagaggccgctcatgataatgcaactcttttcatggcccattgtttgctgggtggtggctcatagttcattgggccatggtccaccacacaatggtcgtggcctatagtctatttattgggccttagctcaccatatgctaggtcgtggcgcacagtcatcgagtaaggtatttgccataagctaggccatggcatacaattatgcttggcctcggcccactaaatgttaggtcatgttgttctgttcctcggaccataccctattatatgttgagcctccagttatttgtgacaaaataagtagttggtaatggtttaccaccttagtgtgtgagaaaccacaaattacttcacgtcgtacccacaccatcaggttgtccacatagcggcactgaagtagccgattcttgatggttttggtttgatgagtgatagtctagagcatcactaatttatggcaatggaaaaattgtctaccatttattatgatggaggcagccttttgtcagataaggtgatcctagatggagcttttgcactggaaatctttcatcacaagatagtcacataatacgatttgtgacggaatttcgctatttctagcttgatgcaagtaccttgttaaggaagactagaaccagtgtagtgttatatcaatcctctcttcatatacaatcccttttaagtgttttcttctccatgctttctccaaatcccttatgttcccatacggtactttcatgatttgtatcatttgtttgcaccttttttctcttatagcagagttcttcacacccattttatttttgttccttgtcttcatcctaacccttctttataactcctcttcttccacatctgatcccttttctactacctctacttattattttgcttttgcaagccactgcattattgttgctgtttcctctccttcccccttggcatgcttagttctcatctcagtctcaaaaagtgcagattgtgcatgttctcttgctacatcttcctcaccctctcccagagaaatattactcgctacatctgttgcagctaaatactattacctccatattttaatgtatgacgccgttgactttttatccaatgtttgaccattcgtcctattcaaaaaatttatgcaattgccatttattttattgtgactagattcatcatcaaatgttttttaaacatgatataaatattttcatatttgcacaaaaattttgaataaaacgaatggtcaaacgttaatcgaaaagtcaacggcgtcatatattaaaatacggagggagtacatgatttatctactgattgaaaaaaatgagggtacaatgacaatcagtcctctgcgtcctgttccctatcatccttgccattcacgaacatagctctacacaacgtggacgtgtttccttcatcgatgaatcccctccaatctgaaagcatctcgccaatgatttgcctcatggcgcgttaattagtttgcccgggatcatgtcggtaaaatagatgtttggtgtctgcaaaatcatgctggaattcagaccgacatagaaaagctttccattccctacttacgatggtctgctggcttatttgtgataaagaaacacaagaattaatgtaatttgtaattgatcactagtgcggaataggtcatctatgtcgaacgggaactctcatatgtgttggtgagcgacttattcacggattattagtcagtgatgcgaaaattcatctgtgtcgggccaacaggagttatcgatagctgtcatcttaatttgtcgaatctaaataaaagactgtcatcgactagatttgaccagtcaaacaagccatcctataaaccatcacggacatgatactttggcctttccataagattggttggactcatcataagatttagttgggcttcacagacatgatgcgcttcccataagatttggaccatttggttggcctcctcttcgatcaacccggctaaaataactggataaaaataaggaggagaagaagattctaggggctagctacagctgggctcagaagatactgttcttttctctctgagcatgcaatcccttttctcctttgaacatgatacgtttagttccatttaaggcttctcttcttgaactcccagcaaacggtgatgctgtttaaatttatatataaaggctgtgctagctgtttagtttgtttacaactaccaagttatagtctggtggtcatatttccttccatccatacaaaacggattcaactaccaggtaattaagcaggtagtagctagtcaatattgaatccctgtttcacattataacatattttaggttttgaatagattcatgtatataaatccatatatgtgctctttatatatatatatatatatatatatatatatatatatatatatatatatatatatatatatccaaattcatatggatactagtggatctagatgatggaaagaccaaaacatcaagggattagtatgtactagtcattaattaaaactcatacatcgttggcgtatattttatttcttcatacttaatgtaatctagtatacagtgacaaacgctcctaagctggtactctaataaattagagacatatctaagaaattctaagaaaaaacaaaacgtctagccctgattttcacttaatataataaacctattattttacaccattagatttattttaaatgaaaaaaatactatctccctaaaatcctctccggctcccctgcctcatgggcatgagggtatcctctcctcctcactacaagtacttacatatatgtacgtcccttcctctcacatcctctctcttactcgtcacttctatcatccaattttctagataacaaataataatgattagataactaaataattatattttttacaacatattctatatatctatattggccatgttttgatatataagaaatacatcatttgatacaaactcctataaatagcaaaaaattaataacatatactatcatgtcatccaaataatttcatgttccctctctccttgctcactttggcctccttattttctagctagcaaatactacatccgtcctaaaatatactccatctatcctataatataagtaattttggatggatatgacacgtcctagtataatgaatatgtccagattcattgtactaggatgtgtcacatccatctaaaatcccttatattatgggacggatggagtagcaactcagaactggatgagacgtatcttagtccaacgaatctagacagtcccttatctagattcattggactaggatatgtcccatccagtcccaaattgctatattttgggacggagggagtaataaatatccattaaatattgtgtatataataaaagtccattaaacattatcttccatgctcttaacccaccacatggtacatataataaattagaaaattgtattagaaattctgagaacaaaaacgaaaatcaacttagcatactctcacttaaatcggtgaactcattacttttaaccacccatgcccctcccactcgcatgcgcatgaggtgcacacggcccctgcttctccctctacctcatgctctctcctccttccttaattttatatactaaaacgatcacaattttcaagctataaaatctcattcctaatctagaaataaaatattgaaaaaaatgacatcatatattgagtcatcatatattattctacaaacatacatacccaaattaaatctacattatccaaataaaattacaaattcaaatattaaataatattttattgagggacaacatctcaaccctttcatatgtcatgcgatttaacataaaagtataaaacaatttaataacacaggttgccccatcatacatagttttcaaacatttattactaattagatatagaattaataagtatgaataatccaagtcccaatacaattattcctatatttttatctactcccagtatatttatcctctactttcacaaatcccgatgaaatgattactaaaaataaacttatttagaaacaaatggggatgtgccaaaataaagttattatacgatagagggagtaattgctctaaaatatattctatgttactatctaatcgactttagaattaagctatttagtgtagcttcagaataattatgtaaacaatgttgttgagcagtattttggaaaaatcctaccttttaatcattggataaataatttggttgattatctacccgtataaacgtagcgtaaaatacatgcccgtgtattcgcacgggctacctttctactccctccgggttaataatacttgttgttttggacaaggatatgttctctaaaaaataactttgaccattatttttcattataatatgtataaaaatattaacaaatatatgatcttattaaagtactttttaagactaatatatatatatatatatatatatatatatatatgtagtcaccatatttgatagacaaatattttaaaaataattcataattaaatattttaaagtttgacctcacctttttctaaaacgagtattatcagccctgaaggagtagttgtttgcttaaagtatggatagaaatgcgctcagacaattctctgcatatataaaatgttcagtgtaagtatatatatatatatatgtgtgtgtgtgtatccttctcccaatatttgctatcaagaacctacaaaaagatatatagtccaacgagctacatgatgacaaacagtacatatgtagtatatatcactagtaattccagtgcatctgtaccaacattaattaattcagcagaaggagcagtacataacagacacaagctgtaaaaatggacggacggctctttgaagccgcaaagtcaggcgattgcaggttgatgaaggagctggtggctgccatggatccaagcatattgctccgcacaactcctcaggggaacacctgcctccacatatccactatcaatggtcatgaggaattctgccaggaggtgttgatgttagacaattctcttctcaccgttgcaaactcacacggcgagacgccgctgctcaccgcggtaaccaacggccgcaccgccttggcctccgttttgctcagacggtgctgcgaagcggggctcagagaagctatcttgaaacaagatgagaatggatgtaatgccctgcaccatgccattcgcaacggccacagggaccttgcgttggaactgatagcagcagaagcaggcctgtcacaaggtgtaaacaagtacagggaatcacccatgtacatcgctgtgatgagagatttcactgatatcttccggaaactgttggggattcctggttctgctcacgtgggttgtcatggccgcaatgctctccatgccgccgtgagaaacgggaatccaggtaagaattgcatactaggctgtctgacgagtcattaataattactccattattcgttaaaatgaccacaggcaggtgattcttgcatatatcattaaatttgttttcagttattgctaaagagttagtggagaagcgtccagggctggctagagaattcgacgatgaaatggatactccaatgcatcatgccgcaatgtggggtaaaacccatgttctcggagcattgctgcagtatgattggtccttggggtatgtcctaagtaataataaggacagtgtcccgctccttaattccgccgcataccgtggctatgttagtgttgctagagagcttgtgcatcattgtccagatgctccgtattacgacgctaatggttgcacatgtctccatcaagccgcattcaaaggtcatctggagttcgtggaatttatcctagagtcgccgtatcttcggaaactcgtcaacatgcgagataacggcgggaacactgctctgcattacgcggtgcaggattgcaacccaagaattgttgccgctcttttgtcccatggagacacggacgtcacggtacttaactacacgggaaacgaagcagtttggcaattagggggagccgccgattatgccaagacattaaattgggtacgtccttaattactcataccgtgctcctctacttaatttacttgatgaagcatgaacatatataggccgtgtttagttcacccccaactatcctaaacttctaacttttttcaggaactaaacacagccatattgcgctcttacacaacttaccatgcattacatggactgttactattgttactataagtattaaaaaataatcacatgataaatttacatatcattcatatctatctattatctattatatactaaaagtctattaaacttcctacaaaggctcttaaaccaccacgtggcactcctaaaaatgctctcaagccgccacatggcacagtctaatcttaccgtcgaatttcaattaaattggtggaacccattattttacagactagattagatttatatcttaactaattaaaagattagtatttttccgttcgtcatcccctctattcgtccgaattttcgcccatccctcaaatcccaatccgatttcgattttgtttctgtcgtccatctgtgaaaaaagtgtgaaaaaaaaatcaagtctttccgattccacaaaagaaggaaacaaactcaagcgaagttttcgtccgcaacatctgagttgagagtccaacacaaagaaaaataaatcatccagagtgcgcatcaacaacctaatgcccgagcgatccaacgaaacttcattgcaaatgtagatacaaaatccaataggacaatctagtaaaagagaaaacaaaataaaaacttcaccgaaagccgatgacgccgacgttgccgccggattcgctgccgctgtcgtagccatcggatttccggcgcgggaagccgccatcgccgccggatcggcccgcgaaccggatctagacgcgggtagccgccggcgccgtcggtaccaccggatctgccgtgggaagcagccgccgccgtcgttgccatctgatctgccgcgggacgccgccgctgctagattgggctacgagaagctgccgccgtcgtcggcgctgtcgactccactgcggaaagccgccgccacagccggatcgggccgagggaagcagtcggttccgtcggtgccgccggatctagccggcggtacccgccgcactcgacccctctctctccttatccactcaaatggagttgtgccgtcattgtctttgcgtcatgccggcgagacaggagggagaggaggagacggactggcgacaccggtggggagggggagtggg

SEQ ID NO: 9817 - DNA, 20053 bp, Oryza sativa
  unsure (1)..(20053): unsure at all n locations
ataggaatatagcttagatgacattctcttatcatatagcatgcagcaacgaaaagcacgcatcaagaaatttaaaaaaaaactgatatgtgtatagcaaacttgatgaagcaagatgaaagtgcatataggacccctaattattttggtgttaatgacaataaaaaagagggttactaatgaagtttgttgagatgttgcaaggttcaaagtgatcagttgttgattcaaatgaaacatatagtctccatttagcatcggcattttattttaaattgccttttcaatcccctctagtctctgaagaccctttcacaataaaaggaaaaaaaaactatttcaaccctccctccaccccccccccccccccaaaaaaaaccattacatatgagttccaaagtaacaagtcaattttaaatggaaaaaaacaaattacctcttgaactattgccataaaagtgccacgtggcagcttaggagcgattttaggaggctcacgtggcggcttgagagtgtttatagggagtttaatggacttttaatatataatagatttcggagtctctgtatcatcggatactctgatcacatcggatagtctgatctgaaaatcactcaagagaaataaaaagcaattcaagacagagagtgaagttctgagaaagttcagacaatccgatgtatcggacaatccaaccttatatcggatagtccgatattttttagccaatactcagaccaaagacacagagcaaagttctgtgaaatatcggatagtctgatcaagatcggatagtccgacaggagaaaaaaggaacacttcaaatacaggattttgagcactagtgttctaccaattatatgcatgtggtatccctcttaatagtacggcatcctaatactcaagaacacaatatatacatggattagaagacaattaccacaaaagatgccgcaatgcttttaaactcaagttccactcctttttatccttgcatccatctcaacaaagagcattagtgaacctctaattgtgttgatattaacaccaaaataaatgaggggtcctagatgcactttcaggttttatgtttttaattggattcatttaattcttttttgattcattgtgtaattccccttagttgaatttgtttatgtgattggttttctcttaggttagatcgaaagaggctagagataagagggtgaatggaagaatttagaggtgagtactgatttagcctataaaaagtctaggctttttctcttttcttttcttaataaactctctcttcaccattaatttggctaaaatttacaccgttacaattacttcatcttaggtagatatttcactaaataaactactacaacaacgtgcaattctataaaaaaaactcaaatattatccgtctctcccgtcatatacttatattgatttagaatccacggatggaagcacgtatttcacaagctcagttaccgataaagttatagccaagagaatcatcatgtaatatattatataaatctttctaaaacatctacttcaatgctaaatcaaaaaccatagttttcaccaaaacatataaaacatcttcccaaaaatttacttacattttaattcgaaaaccaaaattttaaaaatgaagggaaaaaaatagaatagaaatgacttgaaattgctggcacatgtccccctcctccttccctccatccttctctctcctcctctccacctctcctctttttacctacacaccctcttctctccaccccctctctctctctcctctcctctcccctcccctctctctcctcgcgctgcgctccccggccgaggcgcggcgagccagcgagccagccagccacctcctccgcgcgcgcgcgcctcgccggcgtgcaaggcccgagctcgagcgccccctctcccgcggcctggccctcctcgtcgcgcgacacgcgcgcgcgcgctctctcacggccggcgagcagtgtcggagccagcgccatccagccagcgcgtgggtgggttgggggcgcgtcgcggtgtgctcgccggccggcctcgttcccgccgcccgtccatccgtctcggggtcgaatcgaatttgaaggtgactctcgcttctttcttccggttcttgatttctttctttcttggtttctttgatttcttgaattggagggagatccattgggggtctcgggttgattccttctcccgcaccgattaacggagattagcccatccgggtttgatttgatgcgtgtgggggtggtgctgttctaatcggagtttgttggcgaaccaaaaatgatttctcccttttttttttcttcttttaattttttttggggggttcaggatgccccacgttaggtccgccgccgtgaagctgatggaggagcagctggattcatcggagatggacatggacgagcccggcggcgccgcggcggcggcggcggatgccaataatggcgccgggtccaaggactgccccttgccgccgccgccgcccaagaccgccaaggcttgcgccgccgccaagaagccgagatcggtgagctccgacttcggcgaggagctggacctggagcagctcggtgccaagcagcagcagcagcagcaggagaggaagctgtcgaggcaggaccgcgtcgagctgagccgctcgttccagcacgcggtgagctcccacgactgggatggcgcggaggcgctggtgcggagggccgacgcgcaggggctcaacgacgtgctctgcgtcgccgtcgacgccatctggttcctcagcgacaaggaggagctcgccgccgtcgtggccctgatccggaggatcgtgtcggagggcgccaacgacttcacccgcgccgcgctccggacgtcgttcctcgcgtcgtgcgtgtcggcgtgcagggggagaacgaccagcctcgccgacgctgtgagcttcatggggcaaaagtaagcctgtccaaaacatgaattgcatgttttgcgaccgcgaaacttcgaatcgaattcgggaattcgattcgcctttatgctttgtatttgaaactagcctgatacaattgtggtgattgtaatgatttgtttatgtatttatcaggttgaacgagcgccttcaagaatcccatggcgacgaggtattgaaggcagaagcaagcgcaaaggtgcacaagttcacagagtgggctctaaagtgtatcgggctgcattcgcgtgtgcgggagaacaagggcagaggaaaccatggcacgatcattgaggtccaacttcagctgtctgctttcaagacatttctggatcttgccgataatgatcttactgggaaggatttcacggaggcctttgacgcggcatgttttcctcttacactcttctcaaacacctttgaccaaggttgggcatcaggtatctcggcagctgcaatacaaggactcttagagttgttagtagagggtggtgccgataatgtgaaccagtgctttcttgaggctgctcgctatggaagcactgaactcgtgcgcatcttacttcaggtaataataaaaacaataattcacatgtgaatcttatttcagttaataataaatattagttgtactatttaggttaatgactcctactgagcaaacaatataaatgcagcacaactaagtggttcttaatagcctgcaccacacattggtccccatgataaccaggtcatgaatatatgaatatggaaactatgtagagctaccacctttgctattaattcagaactttgttccttttgactggaaattgatcttttttttttctctatggagctttactgctcatgtttgaattatacttggtgtaaccgtcttcaaccttcatgccttcgaacctaccttaacctattactatactttccaaatttctggagatccatataatctgttacatagagtagctgggggactgttttctgctgacttgcttcatccagattcattacgacataactatagtatacatgaaaaatctggtgaattgtataattctccccttagagaagctcataaattttggggtggtcattaatctcactggagatacatagagaatccccaatcaaagggaaaaaatggtgtgatcaatctattcgtgatggaagactttcctgaactgcgctgattgatcaggtcctaaaataggttaatatattggagttgttttgactttagacagctggtgcacagatgggtttcctttgtaattcatctctactttgggcagcaattggaccaattccattgtaggtgcactatgcatgtatttagtcatgcaaaaaaaaaaagaacaatgttttgccatgcaccttttcatggttagaccatcactcaaatatggcagttctcgaatttaattgagttagataacaattgattatttgatatatttacaaatgttttcctgtctgaaaaatgtacaggcattataggtcttgtgaaatagaagctactcaggctgtttgaggaatttttttcctttttatttcatactttctgatattttgtctgttggtgcaaatatatcatgaaacattagcagcgttctaacatatctgttgtttgtatcttttttttagattgctcgaaggaatagcttggacatcgatgtggatctagcccttggctttgctgctcactatgggaaactggataccatggggtgcttagttgaggagggtaatgcggttgcctttcttggccctttaatgcgggcagctgaacggggatgccttcaagttgttgaatggttcgtcaaccttggttgtcgggatatggagctttgcttagcccttactgctgcaacctctagtagccaggttgcagttgcagcctatcttctccctctagtcccaaagcatgttcttgcacccctcagcgtcgaaattctcaaggctgctggtgagaggagcaccggttccctgcatggtgtggacttccttctccgctcaaacttcctcaatgacccagctgccacatatgctgtagcagacaacattgcaaaatctgccgatgaggcagtggatgcaaagcttagatctttcatgctcgagcattggtcagaggcagctttttctgagggattcgcgtctgcgcaagagcacttcgttaacttcatgaggataatggaaaagggtgagtcgccgatctgcctgagggacctcccacttgagctggtgattgccatggcctacctaccactgtacagggaatgcgtggagtcaggtgggcggctattgccgcagaagctgagagggcagcttgttgaggcggctggtagactcgagggccggcaactcgacagggctagccaaggcacagagctcctggccatcttggagcaccacctcccgtgtttcatgatccagacttgaaaggtcagcttccacatgatctgcattggtcgctgcaagaagcaaagtaacaagggcaatgcaccatcttcagtgttttccagtgctgtcatgttcctgcttggggacaatcatctgaaacgatggcaccttgaggtctctgagagcatagtgactgaagaactctcctgctggcgctgttcggagagtatataattttggggagaaaatggtgtgtaccttcttgtcgagccaagtgttgagtagatcttattgggatcataatcttgatgaaaatgatataagcattgagcaaagtgttctccagttttttctgagtgctagccatgggcgtcatgtttttgttttggactaatgagtttttgaacatggactagtctcatctttcttggcttcacaaacataaaaatgaatggacagtaagtatatgctttatatgcgttgatgatgccttgattgagacgcgagacaggaagtatagttttatactagtatattgatcttgctgctgtttcttgtcaattgatttttccttttgtttgaatgcttccaaacatcggattatcaagcatcatccatggctacgcggccataccatgagctgtgacatgccagctcaaaatgttcaatctgccaaatgtcacccctggtgatctctgattgaaaaaaaccctgaaaattgtttattttccaactagaaaattctctggtgattcctaaattgttctgcatgaacatgattgcagcctgtttgtgtctggtgatttaccacagggcaggcactgtgtcgttctgatggtttcagggcatcatcaatttggatgttgcaaccatgaaaaccagcaagttaatactcctatgtcaggcatcagacctggaccctagattggtcaggcataaatgttcttgtttagtactagtaactactcctatgtcaggtatcataattccaagggccaattgaacaaaaaataatagacttgatgaatttacatttgagtagcaaagtccaacttttgccataggggaaagcaagcagtgcatctcatcatttttttagtgtattgaatgaatatgaatggtgttctagaggaatatcccttaaaaatgagaaatgaagttaacaaatacttagaaaagcagggaagaaaatggtggttcttgtcaaacttcagagattttttttctttatattggttcaagccttttagttcacaaacaaaaggagaaaaaatatttttgaaggtgcatatgatgtgacatgatattcctttttcagtgcacaagggggtgcgcacaccactaatcatggtgttattctgtagttctactgctaacgaatcaagcatgtgccacatgtcccatgatctggcaattttttagtgtcaagggggataagaatatgttctctggttctatttcacagagagatattataatttaataagaataatgagtgtaaaggaaaacataaagttatataagttctcctaattgaccttaataatagtggattggcgaaagctcattttaggtctctgatctatggttaagtttaaatcgcttaccaggttttgcagttgagggacgtggtttaaactcgatccttggtgagggacccaaagtaaacttttttctatgggattgatgttatgatttcggcccatagggtattgaggcccaacaggtgatagtctgtaaccggaattttggcccattaggcacagcataaaattgtcagctgctctagacatgaccaacacacagtctgcccttactccctaattctctggttccctgatgattttcagaacactgaagccaattaggtgtggcttgactggagaaatattgctttgtcgatttgagatctgaagttcagtgtccagtctccatgtgaagacatgctgaaaatgagttattcgtccattcttcagttaaagtttataagttactccttccgtttcaaaatgtttgacaccgttgacttttaagcacatgtttgaccgttcgtcttattaaaataatttgtgaaatatgtaaaactatatgtgtacatgaaagtatatttaacaatgaatcaaatgatatgaaaaaaataaataattacttaaattttttgaataagacgaatggtcaaacacatactaaaaagtcaacggtgtgaaacattttgaaacggagggagtataagtattcttgtcaactgatattcagttattccaatgatagagggtagaacctcgaagtaaaaccgcattattgcaatgtattgggggtgaaagttatattcatgaactgtcagtatcagggcataattttgagtgttgatattggcacggtagaacgggatttgcaactgaaattatccaattctctttgtgattttatcggtgaaagtctaaactatcatggacttcactctgcataataccctacttaaaattgtcttatctcaaaaaagatacttcagttgcttagtagtgatcaattgcctctgatagcgttcatcgaccgaatctgcagctacatgtttttttaggacagaagtttcttctaaaatgtgtgctttcttaggcttcaattttcacatggattgtatttcagactacttatatgataatgacaggaaggaaatggaagacaaccatgcaagcttgggtaacaatgctcctacatgggcttatttgttattggaaaaaaatatttagtgatttacacttcaatatctgatcatctgaaagctaaattagtaatgaataaaaggtatttgactaggtaagcgaacctattctgttcaaacattagtaaaaacatggacacaaacattgttaactgatgacctatagactgccattctaatgcagcatgggcataaacattgtttactgatgacttagtctgccattctacttcacatataacttaggaaacttacatcgccgccctatccggattattttgtatgcatttctagggtcaaccgaagaataccgtcgcttgcgaagaactcaaaacaatgcccattctcaggtggagactttccagtacagctggagaatttgatcacttaaaagattgatcctttgacagaaaaaaaaaacctgcaaattttttttgtcaggtaaggtaatcacaccagaattcccaaattcagagtttcagaccagtaacatatgtaacctctaaacttcagcattcaaaatctgtctggaaagtgatgttttacagcttgcttcgtcgcgctcatcttatgtcgaatacaaaaccaaaaccaaaataacaaaaacaaaaataaattcccctaggagatgtatttacaagtaagaggaagccatgctccgcacatccgttggcatgaaggccagcacaaccagcaggatgagcaggcagactggcagcagcagcagcagcgatggcggcggaggcaatgggggaagcaccaatggaagtatgagcaatgacatggtgaggaagacgagcacgaggaacgcctcgatactgaagtaattcgatgtcgcggcggtcttcttctcggcagcatttggctgatgctgatgctgcagatgcctctttgaaccgtttggtctgggtatcagagggttcctcctctgcctagcacctacaccttccattgcaacaaaccccaaattcggctagatgttttgatctgtgattttgtctagatcagttggcaatccaagaactgagatgtgtatgagagttcttgtgatttctgatcagatctgaagtctctgttgcagacttgcccatcatctgaactgcaggcaaagtgacaacatctgaagaaaaaaagaaaagaaaaaccctttttagagttaacaatcatcatcctaataccaaatacacccatctgaaattatcaagaaaggcaagtaaaaagttcatgcctttccccccaacaattcaaagaaactgactaaccctaacaaagactaaattaggctgcaaaacaaaaaaaacatcaagaaaccgataccttcgatcctgaacttggcattgctcccatgtccggacttcgcgtctctcccaagaacgccctttctcgctccacccaacaagccaagaactcctctcctccctcaaaacccacaacacccccaaccaagaagcaaatcaagaactgcacagcccaagaactccaagcggcagggtcgcaaagatgtcgtcgcaggaggaggaagaagaagaagaagaggacgaagaggtggatcctcccctgatggcgaagcagaagatatcctcgaccctttcggtgatgttgcggtgatgaggaggaggaaagattagcatggtgacagggaaggtggagccgattttatgagtggggtggggtttggcttggcttcaaatcatgggaggtggaggaagaacacaagagaggggaaggggggctggatgcaatgcatcaaggaccaacttgtggggggcaaccccatgccatgcttacaagtggaggacgacgagtagggccccccaatagtccctactcctgcaattggaactaatagtactttatatgctatctgttttactccctccgtcccataatataagggcccctttgaatcaaagggtttatataggaatttcataggatttaaatcctataggatttttttatatttggtcctttgattcaaaggattgaagctttccaaatcctatgaaattcctatggaatggcacattgcatgtgaattttagaggaaatttagcaagagatccaacctcttggaaaatttcctttgagtctatctctctcatccgattcctgcgtttttcctacgctccaatcaaacgaccattcctgtgtttttcctgtgttttgcaattctctgttttacacttcaattcctgtcaaaatcctgtgtttttcctattcatctatttttttctaccctgcgattcaaaggggccctaaggtattttgagtttttgtttgcaacgtttgaccactcgtcttattcaaaaaattttgaaattattatttattttatttgtgacttactttattatctacagtactttaaacacaactttttgttttttatatttgcaaaaaaaaaataagacaantgnncnnnnntngcaatcaaaaactcaaaatcccttatattgtgggacggagggagtatatcataagtcgtttgattttttttcttagttaaatttgtttaattttgattaagtttgtagaaaaatatactaaaattttcaatacaaaataaatatattatcaaattatattcaatgttaaaattaatgaaactaaatgttataaatgccgctaattttttctatgaacttggtcgatcctaaagaacattaactaagaaaaatgtcaaatggctcataatatgaaatggatggagtaattgattatttagggttctttgttggggtttgatttaccctaattgccattatcatttgtctctccttgttttttttttggcctctttgctaatgtggatttctttttgaggttctgcgttgttcggctgaactccagatccccagatgcacattgatctagagtgtgtgttggttaaattataatagtataaaattttatattttctctatgaataaaataaattatccaaatgttatgaatataatcaaaattttggacctatagatttgtacagcttgaaatgcatatcttaaagaaaatactagattaaatagacgttagatgtgtagtaaagtgctgtggtgttcatttgaggtgtatggtaaaggttctttttactagttttttttaattcgtctttttactagcttctcgtttaaagtggtttatggggtcttgaatgcagaccttttactgttatctttttaaaaaagtgtgttactaaaagttattggaggtatcatgatgtgagctcttttcttttaccgagaaatctggtaatatcattttgaacatgacaaacccgaataattggatgggtatgtatggacggcacatattctaaaacgtcactagcaaaaaaataaaataaaataaaataaataaaaacttgtcgactgccttaagtcttgtttagaataattatgctctttccaaaggctagcctttggtggatatcgattagaaaaaaacagacggtttaggaatatctatacattttctgatatttggtatgttaggattgacctggtatttggttcatagttaaatacagtgacaatgtatgtaaactacttttagtatctcctcttctagaaagtattataatatgcttgttgtaatgatccattttggcagttgatgattaagaatcaaagctctctccaagagacaaactttgacaaagaggactggttggtaagattggctcgactgttcttcaactagatatacagaagtctgtatacattgtcactgtatttaactagtattaattatcctgacgaggatccgtcaggcaaattaaaatttcgctgacaagccagtcttgacgggatttccctgacggtacaaagtcaggacgtattttcctaacgtgataatggattttctcgacggtttttggctgtcagaagtaatctggtttttggtagtgactacataaatctacaaccattgtttattttctaaaactattttatgataatgctgcattttttcctggataatatttttgtgctaaaatagctagtcaatattagattttaaataacaaatagtctagtcctctgcacttgtatatgtacatgcagtaaagtaattcatatttcctaataaagtaaaatcaaattaatcaagccctttagtttgcattttggtcacaagtattgggtcccttattagagtgtggtggtgatattcttccaagcacttttgaaaagggagaggtgttgctgttcaagggttcttctcccctagccaccttttttgtgtccatatatgtgaaaatcaatcacccacttgctctgcaaagtccttatcaaactcctaacaacatagacattatgagcaaatcacaaattcacagtcaatattgctatcaaagaaattttgttctagaattgcaggtttgtactactttcatatacattttttccttcaggatgtttagtcaccattatcaagggaaaaatagcagaatttagcattgttatgtcaaagaatttcagattgaatcaggggaaagctgtcttggattagtgataaagacacactttcatctctgctcaaagggtcaccagtgttgcagccatttcagctcctgctttgtttcttttaattttgttgtagtggtctagtcagcatgcaaacgtggcaaaaccgtcgagtcagtatgccacataagcaaaatcattttgcgaaacaattaagggttatttggatcagacaaaagaattacagggactcagtatcttgcttaatattgatttgagatgctagaggaactctcggcctcagtttagggttgcatttggacttttcgctattgcatttaattgaaataatcttgcaaataaataggagcagatacgtcgtcagaggtacatatttattttgttcaccccatgcatgtttgagttcaacatgtgcctctatctattttctcatagatgcattcagcaaagccgactagtcattttcacaaagatcgactgcacttataatataggcagaaaattagagtttaatatattggaccaccaaaaatatattttttaaaaaatgtcagcttgcgttgtgcattggccaaaattaatgaacaattggccacatggagttgtgcaaattggaagggagcagaatacgacagggcaggcaaggctcaaagaccagggattccttactgtaggttgctgtgcggcttgtcgtcggggtgcagtaccgttaagggcccattaacctcacaaaattccaaagaaatttaaacaaaaaaataattttatagtaaattttgtctgattttccactaaccattgcggtaggcggtagctacgccattaccgtgccttttgagcttatcgtcggagagtgataagagcatctccaagggtgtgttcgctccctagtacgtaaaacgaaacaacatttagtacctaattaattaattattagctaaaataaattttaaaaagattaatatgattttttaaagtaactttcatatagaaagttttcgttaaaaaaaacactgtttagtagtttgaaatacatgtacacagaaaacgagggaggtgagttgggaaagtagagataaaaactcggtccaagagtcttttcaaatcttactctccatttgcttcctaaaaaaaatcctttttttttttactccaacaatcccttcatatcccactctccaaattatataggctctactccctccgtccaaaaataaaccaatcttgtacgggatatgacacattctagtacaacgactctagacataagggcatctaaatttatcgtactaggatgcaccatatctgaggttaatttattttaggatagaggagtacatgtcagtgtcttcctcctttttctctctctttaggcccatgtataatagttacaagcaagagagatgggagaaagatagacagaggatgcgggacccacgtttgacaagtggaggaggcgggctatattcggaaatatcggaaaaccagaaataggctatacagacataaacatattggtattgatcgaaagccgataataaatatcggaaacattggattgtaaaatcgcacaattaattttgcataactataatataacaaattcaaggttacactatgtataagttataagttgtcttcttttaaccttgaactatagttagggatttggttgagaagttgatgggctctaaactatgaatcaaataaagaaataggccataaatattagtgtatttagaaatacgataattatcataatataaaaaaggtaaaatcatttccatttccatgtgtttttttaccattttcatttctgttttcatcggtaatcatttccatgttgctcggctggtaaaaatcggaaatgaagcatcggtcgatcaagaattttcattaccatttttacccctaagcgtggctacgtggggattggtttggctagccgaatggcttggccatctggatagcaagtcctttagtggttttttttttggggtcaaattttaacatggagagctaaatagtcactcttttggagttgctctaacccctgaactccgttagtaaggtaaaatcctactcacaaccttaattcatgttggctcgtcatgcccttgcagtttgatcttcatcagatcatcgtgccacatgcatcacttgaggtctgtatcggacgtggaaattttcctgatttatgtaagaaattttcctgaaactcttacgcaaatttctgtaaaattcttgcatttaaaatgggatccaagtcctgttaacaaagcatcaatcatgtacaaagtaccaagtatttttacacaacaattggtccaattcaattaggaaattaccggcctcggagaaggcctattgctgtgtggtatactttacaagtcgtgttattcaatactactagttatctttcgtgctagctagctttatcgatgttgcccacgttttattcaggctgtctaattctgtagaaaggcatagttgaaatctcataaaaaagatctccgtttattaaaaacgaagaattcatattcctttttctgatgtaaagaaagaaccaggcaatcggaggatgaaccgttttcacgtctcccaaaagacatggatagtggatttggaacagacctattctgtattccctccatcttttgttacttccattatttatttcagaataagtttgtttatagagtaattattgcatcgaagtttataaaagtagagaatgattattttgggagcagataaagtgagaataattgtattggaatttaataaattagaggtattttaatcttttaagtttcgtattggtacgtgtgggatgggttaaagataaacttattttaggacagagccgtgttatcttgttggtcccttctagattctactaaccatcatatacaacctattattacaataaccttgtcagctagggttgagtttgaatcaacttttacgtttggttaccaccctacttttcgtaaatacacattttgaattgttgaaaggtgtgtttttttttaaaaaaagtttatacatatattttaaaaatcaaataaatcaaaatttgaaaattataatagttaactaataattcgataatacctcttctttcatgtgccgtggaaaaacccggtagttatgctgtatccaactcagccttaaactcgagtagagttagcagtagtaataatgaaaaagggaagcaactcatttcgattcagcaaagcgaggattctacgcaaactcattaaactcaacgagaaagcaagagggagaagaagaaaaaggaagaaggagcgaatcatccatgggccatggcgcatcgcacccaagcaagaaggcagcaggttcagtgcatgcacgcgcctgacctctggcggcagacagacaggtagaggcaggcggtttgggggcgtgtggtgtaggaaaatcgatggcgctgtaccccttgcacgccacacctttgccactcattcctttatcttttctcctttccaagtttagattcaaataagccaaaatgcaatactcttatatagtactccctccgtcccgtaatataaggaattttggataggaaaaagtacaaattaccccccgaattatcgtggttgaccgaattaccccctgaacatgaaactaggtattgctcacctaaacttttaataccagacgaattacccctggatccaatctagagcggttttgtcctacgtgacgtacgcgtggcaatccagtcagcattttccttttaaaaattgtgggacccacctgtcatacatcctcttcacctcttcctattctctctctgtgtggcaggtgcaggtccgcacagccggcaacggtgtgtgcgattgggtgggtgaggcgagcatggcgggcagccgggaggctgcggcggggaggaaggcggcagtcgcaggcgtcctgagctctgctgccccctccaccgcccaaagggttggcgaagcgtggcgctgcgccaagaggaaggcggcggttgcgggcatcccaagctccgccgctccctccaccgccccaagcgccggtgactgtgagtgcccccttcgccgtcctaagctctgccgcccctgcactgcctcaagcgccagcagagcgcggcgctgcaccgagagagaggcggcggccgcagcagccgttgcgggcgtcccgagctccgccgccccctccaccgccccaagcgccggcgactgtgagtggcccctttgccgtcccgagctctgctgccccctccaccaccttaagcgccggcggagcgcggcgttgcaccaagagagaggcggcggccgcagcagcggctgcgggcgtcccgagctccgccgctccatccaccgccccaagcgccagcgactgtgagtgcccccttcgccgccccgagattcgctcgccgccgtcttcagctcacctcgcagccccctccatccactcaagctccggcggctgcgggcatcccctctgttgcctcaacgagccgtgcgccagcaattacatgcgtcccgagcttcaccgccctgagcaccagtagctgcgggctcctgcttcgccgcccgagctctgcccatcgccgttctcggctccctctccgccgttgcctctcgatgacagagagagatggaggtccgccacccggcactcgtcattggcgaaaagagagagaagaggggacaagctaacatgtggggcccatggacttttttaataaaaattagttgaccgccacatgtacgccacgtaggataaaacgacttcgaattgagttaagggggtaatatgttcggtttacatagtttagggtgtaaaatatctggttttcgagtttagggggggtaaatcagactgacgcaatagttcaagggcggtaattcgtacgttttccttttggatgaatatgacacttcctagtacaatgaatttggacatacggtcacatccacccaaaatcccttatattataggacgaagggaatatcagacgttcgcttccactcctaaaaccctgcccgcacctcacaccatcttcatggtgtctgagttgcaccctgctcgccactctcccaaccgtagtatgtacgcattgcgttccaatctcttgagccacggcttccacatattaatgccacgatggtctcttccatctgttcaatatgtgatctgaattttagacttacaatatatttgaaatagttttttaatagaactctatatgtctttccatatcatgagtcttttcttatatctcctctgtatactcttgtaagatatacgagaagggggtgacgttcatattgttattaccctatgttcgtaatcaattcctaaattatgatcattgttgattggtgctcgtgatttttttcccgttacaggttttccacgtaaaaatccatatctcctttctgcatctactttcatagcaccatcaccgttgctactgcgtcttctgcatcgatgccgtgcacgatgcccttgctccgctatttgctcggctttcttctcatgatgccggcttcgtcttacgtaatcatcctttctagttaccccttcacaagaagtatatgttggtttctcccttcgtctgttttgtattgctatgttttaaacaataatagcacatagttcttaaacttggccaccacaagtccaaagaatgagttataaatcgctgcctcatccgtctcaaaataagtgcagccatataattcaaatttaaaatatacggttatattaattttgagacagatggagtactacagagtatgttcactactagagaaatgatcgaaactgggactaaaaatatctttagtcccggtttgaaaacccacgggtatttttttaatctttagtcctggttggtaacacaccaaccggggctaaatattatttttaatcccggttcaaaaacatgtcagacccctattatttttagtgccggttgtttataacaaccgagaccaaaattaaaaaaaattgctaaaatccctaccccgaaccgcgcgcactgcctcgtccttatcccctcctcttctcctcccccctttcattttctctcctctacctcctccccttcccctctcccctcctcctccgatagtgatagcgagcagcggcccggcggaagccgccgcggtggcgcacgaggcacaagcgggcggcggcctcccctccgccagatccaacgggaggggaggccgggcagcggaggcggcgcacagccgagcggttggcggcggcgtgttttgtgaattttttttgggaatgatttgtaaattttgttgtagattattttagatttgtggatgattttgtgaatgatttgtgtattgtgggcgattttatggatgggcttatgaatcgtggatgatttgttatgcatgatttgtggggattcgagggtggcaataaatgcaagcaaaaaaaaaagaaaaaaaaagcctaaccgatgatgttaccatcttttgttccggttagtgttatcaaccggaattaaagatccattttacttctggttattttaaccgagactaaagattgacatatttagtctcgaattggacgtcctggtttgcaaccagggaaggggttgcaaaccggattaaagagcccttcccagtagtggttacatgtaagagtagccgtagccatcacaatttggctataaatcgtgtcatcaaatcaatggaatattaatggcattgtcagtttgtcacttcaggtggcaggcattctgagtcattttcgcataaaggtgctttcttctaaaagaactccctgcttgtgtgtaagtaatttgggctcatttcttccgcacaaagatggaacaaaaaatttatttaacatgatgatttacttattaatcaggagagagtgagttttcggtccatccttcctctgcttatttgcaggcgagcgttctacaaaactcctggttggaataaaaattttgccccaaattaattccacatttgttctgaataccgaaggttgttcagtttagcttaatgattggaaaagccaaaccttaaccaaactggctggatcttacgtatctggagtacatttctttaaaaaaagaatcgcaaaatttcacatagattatatatatacttctgtgtgttcttaagccacttacttattttgtaaataaaatgaataaataattatttccgcattcgatcataacttaatttccctgtcgtgcccacgtcacctgaaaccatttagatctggtccaaagttaaaaataattaaacaattttaatagtttaagtttaagggtaaatactgttagttttaatgtttaaggtccgttctttgaactttcattagcaatttattgaggacaaacctgaaacaaaatgcagtcctgtataagccgtataatcaaacataatcatcagttagcttaggct

SEQ ID NO: 9818 - DNA, 7295 bp, Oryza sativa
aaggagacccaaagcctttggttcacatgtattttcaccttgacagcgagcaatatctgctcctgccctctatcagtgagaaaggagaaaatattacctcaagcctagttaacgcattaggtggccaacaatgtagcctgtatgaaactaatgagaacatgttcatagtgtttgattactcattgagtccatttcctctgctatcttattattgttcagaagtcagaacattttccttgtcagttttgattggtgctagagcaactactttttatcttataatagttttcagtagtcattcttggagctgctaagcttaatcgtaatgttaaatactgacaaccactgttttgcagatgagatgttggtcttagatgtcttggagagtttagtgactgtacccagtaaaatatcagagcctaagattaatattccttcaggttggtaatattatttcagactcctggtatatctttttttcataacatacgttatctcatgcatgttgcgcatgtgtcttttctgatgtatattgatcaggtacacttggaagggatgattctgcattgtctcacagaagggaggaaggtccttcagttaagagatccaaacaagggaagcaagttggtgaatgcagtgcctccaagacaaggaataaaaggagaaagaagttaatagctgaagaggtaagatatcgtaaatagtgagcttatgttgtatgtacagcatgaatatatatattttttaaaggaaccctttcttgctcatggggaacaaaccaaatttgatgaattgacgcctatatctgagtctactgtactgtcaattagatgcttccattgcatctaacatttagtatatcattgcatccccataaactcataaagttctcggcttggtgtcgatggaaagtcaatcccgtttcatttttatagggtacattttatcctttaattagatgctttcattcttgcatttaaaattagtattgccgtcgcatcccttaaaatcataaaattctgggtttggtgtcaatggaaagccatccttcactttattttaatagggtgcattttgtcagtgtgattataatttatcccttctgagatcgaagtgcaccttaaatcagacagcatttgtgttctttcccgtattgctctcttcaattagtctgatggcacttctattttcacacttctttttgcaggtgcctactgaaggagtcacttctaatcatttagatttgccagaagagcgtcaagttgatgccactgagtgcgccttgaattctgatctggaaaggggaacagttgatttacctgaatcaactgcaaatatttctaccaaaatccctgatttgccatcacaattaaaacctgagataaatatgtcgagaaggagcaaaagaaaatccaaaagtccttgtggttctaagtatgtcgtttgcaatggagcagataatttacaggtacacccaccattcatcaatgctagtatgccacagattgagttcaactgtagtcttaattctggcttactttcaggctaggagattgcagcattgcttgtcatctgagtcacttcgtagatggtgtacatatgagtggttttacagcgcagtgattatccatggtttatggataatgagtttgtgaactacttgaattttgcgaatttgagccatctgtcaaggctcactcggtccgagtggagcacaataaggaggtattgactagcaaactctggaagctatatcattgtttttctttgtcctcacttctttttgttttcgctatactaagtatttttatctgcagctcacttggcaaaccccgacgtttttctgatcattttctggcagcagaaaaagataaacttgaaaattatcgcaaaaaagttaggcaatactatgctctactaagtgaagattcgtgggattctctaccaccagacctagctcgaccattttcaattggtcagcaggtaatcgttcgtcacccaagtacgcgggaactttgtgatggtaaagtggtgatgatggaacaggatcgttataatgtccagtttgataggcctgaccttggtgttgatgaagtaaaggtacaccttttcaatatcagttgcatttcatgattgccaattgttatactatgtaggatattaggtcctttctcataattgtttcttcatatatctgttggaacagattttttttgttcatttcataagaaggaaactactacccatacaaacaagggctcacaagccctacacccaaaacacacccacaaggcgacacatgaccaaaaccaccctacgacagcctagtacaaaggaaaacttggagcgcaagagctccagctaggcactaaagactaacttctgttgactctgcctgcaacatctccattacgtttggattcactcagttgaatatgcagtcatttcggtgtttccaaatttcccaacatctaggataatcaatgaattcagccactgcaaaagatttcaaccattatttttaactataggcagggaaaaaactttctagtatactaaacactgaccttgcaattgaattctgtgattttttagttagtaattcatatcaaaatatgttatcaagcttttgaactacgagtaaattttacatcccagtaccacaaccaccacacttgagtagaggatctgcccttttagttccagtagtgttcataaaattgtagtcttcctaaggataactaatcacatcccacacagtatgctgaatcatccatgcatagttgccaggagttcatcaccatcagtcatgcttcgaatttgagttatccatcttttttaaacaaacaaaaaaaatatggcccaacacaaagctgtcaggtacttcagttatttatatcatggaaataaatttatgagactcctcacgtttttatttttcacttggtaaccatttgtttaacaacaattcacaacttattcatttcatattcatataatttatattcaagaatcttgagatgatattttagcataaagatatactgttatggtagttatatgattatgtcaagacatgtaattgtttctttttcaggacactgattgtatgcctgtaaactggttggataatctgcctgatgacctcaaaaagaggagcttcctttcaaataattcacacaacagagtagaggttgagcaaattccaaagtttacttcaaaagagaactgggatcatatcagcggagaggccgagccatccaaaaccatgcacataacttcagatgaacaggttgaggttttgctgtccaaatctatttttaagaagcattacgatcatagtctatctatccatgggcaggttacgagttatggccatgcagcaaatgctgcctgttccttgactgctccatgaaatgcaaccggccaactgctcacgtttgtgaaatgttctaatgctgattaatatatttactatcacaggttgaaattgctgtggatattgaaagactatccaacaagagtacatctggtaattgtggaccattacagccgctccagtctgttgatgacaatgtacggagtagaggtttgtcagagcacaggaatggtcacaatgatgagctagattcttatattacttcctttgtccaaatgtcattggcacaagccaagcagatggttgacgaagccatgaaggtaggttaaagtttagctgatcaattccctcaaggtatctaattttgcatttctcactcaatatgttatttgatgttttgccaggaaatctctgagaatggtaaaagttctctagaagaaacaggcatatcaaatgaagcgacggattgtacaggcccagaaccggaatctgctgctaattctgaacttccgcgcaacctgatattcaactgcattgccacgcttcttgcaatcaaggtaaaacattcacctgcttcactagcactaatcctccatggttactagaattattccaattcagtacatcttccttttcaattatgcagcattttagcgagggccgacatccacctcctaacatagcaggcgtcctggagcgtgcttgcttaatgctgcgaccaagctgtgcagagaacctgcccatctataacgaaatagagaattttatcgctgtcataaagaaccagatactagctcttgtgccatcggcatcaagcaatgccaggctacccatgtacatgtaaatacttccaggcttccagcagacgaagaggcggtgcctggttgcttgatgtcgagaagaattgatgaatccatagcgtctgggggaggtttgaaaatgtatgagcttggatctacagcatcagaagacggcgggtcatcgttgactgtccagctctcttctaaactgtgtataaactctttagaggaataagctcttacagtttttagtttcatagatttctcaatatggttttaggaatggaggaatcgacattccagttgtagttaataataacgattcctacagtcatgaatacattgtccagttgattcacagagaacaccatcttgatagttaatagattttacttaaatgaaaaaaccatgtgtcacagaaggaaaccatgtgtcacagagaagaacaccatcttgataaacggggtcaaataagcccctagattttactatatgtaaataatgtgcagtgagtcctgggcatgcttacaaaatggctttgacaggtgagatgaaatggaccctattcctgcctccaaacaaaaaaaggtaagacaaaccatgaactctgttttttttttctgtaaaaatttcctgtgtctgcctacaataatatttactatccaaaaatccctgtagtatccgtatgtatcaatgctgtgatttcctgttcctcttgtactgtatatgtatagaaatgtacatgaatgtttgttagtacagactacagctttgagtcagcttgcagagctacaaccactgatcatcatcatcttcttgcttggtcttgttcttcttctttcaggacggtgaagtggaactcgatctgcagccggcggtgcggcgcgtcggcgcagcccttcctctccatctccagctcctccctcagcgggatggccgccaagaacctcttgatgaactccctgcagcactccttcccggtgacgatcacctcctcctccggcgacggcgacgacggcggcggcgacaccgagcgcatctccgacgtggcgtcgaaccggagcatgtacgccttgtcgcagccctcgaagagcctctcgccgagcgtgtccacgacgtggtagcagtcgccttccaccttgagcacgaagaagtggtcgttccagctcacgatgtacacgtcggcgcgccccggctcgccgccggcggcggcggcgatctctcgccagatgtcgtcgaacgacatggcgccggagagggaggcgaagctctcgggctggaagaagccgacgaaggccctgtcgtgctgcacggcgatgggcctcgccctcgccgcgagcaccgtctccaggtcgaagtgcctgttcgggaacgccgccatgtgcgcctcgtcgtcgcagagccgcctccactccgacgagccgtccctgatgagcgcgtccagctccggccgcgtcggcatcgtcgggtggttggcgtgcagcgccgccgccagcacggccaccagcgccgtgcacgcgctctccccgccggcgctgtcgtcgcgctggtcgatggacgcgaagaacaccggcgtcctcagcttcgtctccgagtccctgctcgtgaactcccgagtctcccagcttcccgccagatcatcatcctgtaagacacagatcaccatctcgatcaatcaccaattcaccattgccaatgcaaacatgattccatgatcagaaaaaaaatgctaatccaattctcaccatgtatttcatgggcaattcttgggagagcgactcgctgctcctcttgtcgaagtcccggctcttcctcctccacggtagaagccggcgtttcgacgacaggccgggctccgggctggcgccgccgctcgagctggcgctgctgatgctgatggtgctgctgctgctgacactgctcatgctgctgacgctgctgctgtccgaattcctcttgctcctgctgtacacagccaccttgtgctccctgtcagccagatcaagcagctgcttcaggtcaaggacctcatggtacgtccctgcctccaagctcttcctattgtcccgcattgtcggtgccggagtcgtcgtcctcgccctgctctccctgaatgaaacagtccttccgatgttctcagaaggcgtgttcgcgtccacaagctccacattcacctgaaatcaatcatcacccatacaactcattaaaaaaatgcacaccaaacattttcactagaaatatagtaattgggaggcaaataaaatggagaagatatttgcttacataaagcatggcatcacttgcccatccatctttcctcaccctgatggggacaaccaccagctgctgctgagttgccccccttttctgctgctgctgcagttgcatctcccagcagcattcctccaggcttatcatggctgtcccaatctcctcaagcttcaccacgtccttgcctcttccttgttcttggaatccctgcatcacaaagcaattcttattgccagcctcacttggcgaaaaagcctaagaaaagatgcttgattgctacactgattcctctgtaactttcaagatttttcctgaaatcggcaatggttgatcaccaaggaacaacaattccctgtcatgtagtaagtactagcttgtagacttcctaaagggtgttgttttacaaaggaacctaaaataggttcttattccaatttgggttctcttccagggggggtaatagtaaaccagttccggaagttttctaatttacttttaaaagaacttattaccaaaagatttggtgggtgaagaatgggcgaaaacccattacccccccccccaaaaaaccccctattcattgttcccaatttcaccgttattatgaaaccaaaaattcagaagagaggcattaatgaaaggcacttttaaggaaataaaagcaaagggtctggttcaaatttacccctcaaactttaatatcatgaaatagttcttgccccttaaaattaattaccaagaataactgaagtcaaaacctcctgggccaatcggagcgtgccacgtggccacatcaacctctcctcaatttcaaacctcgcattactcctttagacaaaatgcgc

SEQ ID NO: 9819 - DNA, 17421 bp, Oryza sativa
tcctgccgccgccgccgccgctgccgctggcggccgtggaccccgaccgccgcctgctcgacctcggcggcagcttcacctcgctgctcgcgccggcccagctgcacaacggccacttcaccaccggcttcctgctgggcaccatgtcgtcggcgccgccgccgccgccgccgccggccacttctacaccgtctcccgcgccggccgcacacccgccggtgtcggacagcatctgggccatggggtggccgcacctctccatctaggatcgtcgtcgtcgtcgtcgagctctgatcaccattggcaacaactcgccactaatctagccatcactcccaagtttcatctggtgtgttcgtagttgcaccaaaagttatcttttttgagaggtttcggcccagtagaagaagtcattagcatagtgttaatcgcctaggttaagtaatcaaagagggttaattaggagggtttactcgaattaagatggttgatgcatgatagccatgtcaatccgtgtcgtctcttgtatcaaagcttcagagcttgggctatgaacatgatccatggtggtttttaattaattgccgtcccttttttttttttgtcgtggttgagatgatgcatgcagttcatttcgatctttgaatccatggaattccggtttactgcttgcgttgaatgctgattgcctcaggccttcgagcccatcagttggcctaataagccaaagcaaatatcaaaatgatgtcaaaatattaaaatttgaatttttaacttgattttaaatttgattttaagatattttcaatgtatttttttattgttgacttttaaatcgctacgaataaatatataaaagttttaccatgaattaatttatactctctaataaaatggcttattagaaaatatggacaacctatacgactttttcaatattgttaccactagattatttttggatgattttcttaagtttggggttagacttgtttgatgtacagggcaaaaaccgcgattcaaatctgggccggatcactagtatagattgcggcccagactgcatatggactaaaaatccttccaaaaaaaaaaaaaacagcacgagctgcgctatcttggtttggttcaaacagcacgatgattttagtggctttgttggcgcgagttgggtggtttcccgcgctcgtagcgtggcaatgttgcagcgtgacgagtcaaccaaaaatagcttgggggtctcgaatcgtaccgcactttagccgcaaacggccgaccgactcgactcctccctccatttcgactcggggctccggccggcctcttcttcttccggtgagccaccgacaattcgattcttacatttcgtgatcgatcgattgatttcgtgttgtaatcttgcgtgatcgatcatggtgtgtcaattaatggcaagggcgtggtcatggagccccagcccggctcgccggagaccgccgagctgcccgcgcctatggtgctagagccgccgccgccgccgtcagatgaggcggcggcggaggaggaggaggccggcgttaagcctgataggcaatcatcttcatcgtcttcgtcgtcgtcgtcggaggaggagaaggaggtgtccaaggacgtcgcggtagagaccagcgtcgtcgtcccgtcggtggtcgccgcctcgccggacgatgaggccgccgccgtcgcttccggtgacggcggggacgttatcaaacacgacgatgaggccgtggtcagaccggacgattgggcatcgtggccgcagcagccggctcagaccgtcgacgacgtagcggcggcggcgacgacgacgccgcaggcggcgccggagatccagacgatgtcgctgcagccggcggcggtggcggggttcgatccggagaggatccccaagtccatcttccaggcgaagcccccggggtcgtcgtcgcaggcggagtggagcgtggcgtcgaacgagtcgctgttcagcatccaccacggcgcccggccgtccggcgacctctgcggcttctacgccggcgagagcaggtcgcatttcgactacttctacgacgaggccatggccggcgccgccggcgaccacacgtcggactggaagctggccaccgtcgccgaagggtcgcctggtggcagcgcgcggtcggacgccaccgacggcggcggcggcgcggccaagcaaaaggcggccatcgacttccgccgccacgagagcggctccgccggcagctcgagcaacttctccttcgccttccccatgtacgccgccgacgacgccattgtcgtcctcttcatcatcatcatcacgagaaagaaaactaacccccctcatctccattgcagattggcggagacgacgacgtcgccgaggaagagggactacggcgggatgtaccatccgctgaagaaggaggcggagcagcagcaggcggcgtcgccggcgtcggcgttcgaggagatgacgccggaggaggagcggcggcggcggcggagctggtggtgctgctgctgcggcgagtgctgcggctgctgctggttcgcctgctcgtggtcgtcgtgctgctgctgctgccggtggcggtggtgcagccgctgcagctgcagctgcccaaccttctgccgccgcaactagtgcctctctgctcctgaccaagacatttttggcgggaaaagatgaagggaaaaaaccgagaccaactcggctaatcctgatacagccatagttaaattaattattgctaccagattaggcatcactgcatgagaggatcatatcatatgtatgcatgtgcagatgggtaaaaagatgaagatgatattgttcactgttgacaaggaaatgttatgctaacctgcagatgggctgaggtaacaaacaatatcctggtatccaagagaaaagtacatattctaatgtaggagtatataattccaacattaagtaggatgtacaagcacagaaaacaaccaaaagttagttatcttggcacatttgcgcacagttgctatgggcaaacaaagccctatgagcaaattgagcatccatctgctcaccaacattaatcagtactactagcaatagcaagcctaacagaataacagcttgcaatactttagaagaggctactatgttaacaaaaggtgcgagatgtagtgttagtcctgtcacatgtgatcctttatcttcatgttgatgcacatatgcagggattagttccaggtaccccactgccatctgatccccggataccttagcgtccaaactgatgtcgcggcttggcggatatcatcgctggagtcggcatggaaaagaatggtcacctcgcaagatggagcacagttattaaacaagggtgcaagatgaggaacatccttcaatggcggtagatgaaacaggagtctcctcaaacagcttctaaactggttgctggtgcataacatcaggcaatgcgtcatttcacatgaaaaccgaggggccaacttgacttcgctgatgccggcaaacagctgaagaagatactcgggcttcactgcttcaaaaagttcatatttgtttgtagaagtgggcagctcaagctctaatgtagtgatatcatgattctctgcaaatacttgcaagagggactttagatccaatgactctatccgcagatttttcaaactcacaaggccatcggcttggacatttggtccaagtttatcaactgttaacttcagagtaaacatggatggggtatccaaaatgagcatatctggtcgaacacatttcagctcaagacgaaccaagttaggcgcacggattgttaatgaccgtggaacatttgatacctcccagtggcaagtctttagttgatgaaggtgaatcttagggtccttgagccctccaactccaataagattgaggatctgaaggcaagggaagcactcattcaatttgttgagatcctcatcatctaatctaatgaactcaagtgtcagatgagtcagattaggcattatctttagcccgtcaacggatagccatgcgttcttcagacgcaatttcaaaagactatgacctgcatgtatagccgaagtttcaatctgagaccataccaaggtggaccaaattgactgttgaaatatcaagaactggatgacatataaagtgtatgcacatttactatgcattccagcatcaggtaagcaagatcaagttttcacatgataatgttatgagtacaatagattctactacttgtttctcatcgttcatggccatctttttattcaaacttccaaagtgggctggtgattggcgagcagcaagaataagctaaattttcggaggataataagccacactttcttaagcattatgcacaagtgaaatacaattgcacacacaaactaaaatctaatataagagcaacaggtttaaccataaatttcctttgtgcaagcatttgcttatgtgagaagctaactctaccacgagattttcaaacaaacagagcaatgatatcatcacaacaaggaacatgaaacaagcagtaaaaaaatgcagagataagagagaattacagaagtgggagatgacaggaagcgcctccgccttccgccagcacgactgcggccagtagtcggcgacgtccacctcccggagagcgttgccggcggcggtgtccgcccacgccaccacggcctcccgggccgtgaggtggaggtcgccgccctcgtcgaactccccctcctccacccacgtcgcgtcgtccgggtggccccacccctcggacgcgtcgagctcgagggagcggaggtgcggcccgaggagggacgcggcgttcccggcggccgctcggatggcggagccgccggggggcccgcccccgccccctccggcgagggcgacggagcggcgccgtgcgagcgcggcggcgcggaggtggacacgggagcaggcgtaggaggcggcgaggaaggcccgcgaggcgaggcagtacgccgcgatgtcggccccgtcggcgacgcggccgaggacgtcggcggcgatcgccgccggtagagaatcgaaggggtcgccgccgtctgctgacatgtgtagcccgctttgccttctcagtttctcatatgttcggctcacggagaaaacgaattccccccgtttttaaatatacgttattattaattttttatatgacttttattgattgtcctatttaaaatttaataaaaatacaacataagaaatgatatatatacagggttcaatttttcgttttcagcgtttctattggaaggtgccgatacacctttcggaagttttggtccgaaattttaaacaaaatttagtcaaatttaatcaaaatattaccacattcacagtaaatgaaaaaaaattaaaaatattgaccgaaattatatcatatggggaggggggggtggggtttcgaatagaacctttccagaattttgaacatgtacatatagtcttttaataagatgaaggggcatgaatggtcaattgtcatatccaaaagagctggtaaatactacatatgtctcaaaaaatagaaatatttggtaatgaatatggataaattcttgtccagataaaagttggtgtattttggaatggaaacatccgtttgttaatatttttatgtgcatatgttcactctttttatgtcctcttatggattgtagagttttgaacaggtatgcaaaatatatacataatcgcatctctaatttttttctagttatttccgtatagaactgttatccaacactatatggactcaagattgaatacgagaaaatatatagtatccaaatctccttttcttttttagttcatatattcagttattcacacttcaggaagaaaaaggtttgcgataaaacgtacatctattaaacttgttacttttactcagtaaatagtctactacaccaatttactccgtaccaacaattaaattataaaatcatccatatagtgataaaaggatactctgacatagaaatttatcatattgagcggtgctagcattacttcctcaaacaaaaaaaacaatcctgagtactttcgtagtatcaatcaatttatcaatgacacagtgattcgtgtatcttctgtataatgagtttgtaccttaaagcttcactaatttatcaatctggaaatttaggggattcgacaaaaaaaaaatgcatactttctcaaactatcctgcattttgcttctaattttgctccctacaaaagtttcaaaaactcttcggtatagccatcagtgatagtttgagaatttagcattagctacaaattttcacacaagaaaagatctgacaacatttcattgacgcatgggtagctccaatcacaattgaggatgaggaactacatcaactttggtagtttggttgcctcttcccatctgcttgttctttaagagaacctctcttctcttccgcatgagatatgtcaattgaagaactcattcagctaagctgcgtcctccacaactataaaacccaatgtgggagtttcagtaaatgaatactctatatcttgtaaaaacaccaacaacatggctttgcagactgcgatccaatttccgacctgcaagtctaccataaaagagaaataaaaacaggtttctcaatcaggtgtgcatcacgcaagtgttcatcatctatactactattaaaagaaagtagtggtggtgctgagtcttcaaccatcactgacatgtgggacaagatattgggatttgggtgagtatagtcgaactgcagctctttaattttctaagcatagcatttttgtttgttctttaagatgaaaggtcttgtttcaaccaattaaaaatattttcaacaaggacttaattttgctatttttaataatccgttgcgatcaaagggcatttggctagtattggaaatgccagaacaaatacatcagtatgcaacttcgtgctttatatcacaaaggtgaaaagaatgttcttttccagtatatgaaaatctctgcaatcaaaggacaaaggacaacagtaaatatagagcaaaaggcataaataatcacctagttgtcaggaaatgagggcaagatgaagcatttgaaatccttgtggtttcttttggatgaacagaactgacaatcaacacagctccagcacgcagatacattcgatatgaggagtgtgggggaacatatctacaggtattacagtcttcagctcgtagcatcctttcaaatctttttcctcctgtagacaaattaagtatttaattgaagtggctatgcactaagaactaaaataatatgaagtaatgggtatcttcaataataggacaaaaacataccacaccatgacataagtaatccaaatcccgtgcacaggtagctggattacatgaaacgtacactattcgaggggctttaacttctagtagccacttgattagcttcatatgcatccctggccgattaggatctgcaaatttaatgatgtctattaggatctagcaaagcagtgaaagcattgtagattctactcatcagggataactcgaattgctacaaaaaatatgtactaacagatatgtgccaagacaaacctgatatgattatgtcaggtttcggaaattccttcccaaatgtttcattgattttattaaggtctccctgaacaaatgtagcattgctgataccattcagcttagcgttctttttagcatctgcaatggcttcaggaactacttcatatccatagacatgctttgccctggtcaaatcagaagaacatctactaatcatgcttttcaataaatgggtaaccgaatgacgaatgctcaaagttttgtgctaagacttgaaacaaatgaaaaaaaatggcctcacatagtagcaactgctctccaacagcatgataatagtgagaaaatttaccttctagcaagggtaagaccaatggttccggttccacagaacaagtcaaggataatctcagagccatctcccttaagcccagcagattccccaataagcttgtacagaacatcagcctgcagtacatgcaaccatgcaggaaaaactgttggaaatgctcaagcactagacaccaaaattttagcataacgtggaaataactgatacatgaactggaatgtaagtcacatgacatagatatgtcaatacttcgaacctaacagagcattaacaaacctgttttgtattagtctggaaaaaggagttggcagatatctggaatgtaagtcctctcaacatctctgtaatggttggtttcccatacaaggtatattcttcttcccccacagatgtattgccaacagacgtattcacattattcatgatactgacctacatcaacactacaggcatatcaatattgtaggaagaagtaattaattatttatttggcttaaaacccaacgggatttctgtacagtagaactctgagtgacataatagtcagtacatgaaaagtattttaaacattacactgttcgacatagtacacttaaaatgagaaggcaccaattacataccacttctggtatttttgtgatattgttaacaagaggctccaatagctctggcttataacatgatgtgacaaaattaaccatgacttctggagctccagtggtgatatttctggaaaattaacaaaaaaccaatgttcaaaagtgttcatcatgcaaaaaaaaaaggtaagaaaagaaatgttcaattggtaacaaaaggttaaaaatttatttgtttggggagggaaacaacatgacttgtttggtcatccctgtcctatcaaataaatttacttttaactgaacaattatagagaatgtgtttgtagaccgagatatttggcagcagctaatgaagccaaatgcactaacttcagtaacatgtttaaataccaaaatgatgctgtaccaatgatcgaaagatttgctctgttgtaaaagaagttcatcaatatcctagtgctagaaatatagtgcccatgactgtaaaccgaataacatctgcatgcactatagtctttatagatatactgctacatggtaaaaatgcaggagggcatcatacattcataggtggaactcacaatcagataggacaccataccttccagttcttatcataagatgtttgagaaatccaacatgcttgtgcacatcataaggtgtgagaccaagagctggatccaaccatgtttcttgaacaatggcaagaacctgtaaaaattagcagataataaattaaacatcaaaaggaaagtcctcagaaccactctgctcactagtttgacaattgcttccaactccaaataattagcacgatggtccaggcaatgtatctgtgtacgtacttaaactgactctcaatatgtgtagctttatgcggcatgacacaagcaatttagcttttaaataattatcatgttacacagttctacttatatcattttgtgacaatcataaacaataccatcctagcaacacaagtgaatagtgtttgtttgtccaaagtatgttattccaatgcacaatctcgttaattggtgtcaacagcatgctgcctaagctgctcttgttgggaagttatacaaaggatgtgttgccaatgcaacttcaagctagccaaccaaatctaactataaatgttaaatagtggtgatgctgcaaccaccaagtaacacaattcaacaaaatctaaattttaaatctacaacaaaatggacataatccaatacatcattattgaccttttcttttttaccttatctgccggctcgctctgcagcaagcatttctcgacatgcagcaccttgtcgaagaaccctggcgcgtgcaatccaagcgaatagccatcaccttcaactttttcctccttcaccacctcatcatccttctcctccttccactctctttgcatccatctctttgttccaaaagagaactccatctggaaacaagagaaaaaacaactcatcttttgcgccaaaaaccccctcctaaaccctcctaaacccccacaccagaaattcaccttgttcctgtaccgaaatatctcgtcgcacggcacgatgggtttcaagatagcatcgggctccgagctctccatcttccggggatcgaacttgccaaagttcacgagcagctcgcggacctggaggtgcttgtggcggatctgcgcggcgtacgcgagggactgggccttgcagccgccgcagtcggcggcgagcgggcatggcgcgtcgacggcgtcgcggtggggctcgagcgtccggagcttggcggcctcggcgaaggcgccccggcggatgcggcggacgcgggcgaggaggcgctccccggggagcgcgccgtcgcagagcaggacgaaggtggagccgtccaccctgcagacgcccttccccttgaacgcgagcccctcgcatgtcagctcgagcacctcgttgcgcttcgggaagtagcccttgcggggcgggggaggcggcgaggtggtgggggtaggcgcggggggttccggggagagggcggccgcgacggcgagaaggcggcggccgcggtggtgaagcgggaggcggcggcggagcggggagaaggcggcggcggcggcggcggcggccgtggccatgagggcggcgggtggtggcgcggttcggatggagaatggacggtggagatggcgcggagggagagaaaaccgacgatgatgctggtgtcaccggtggtaaggtgctctgtccaagagggcccacttgacagaatcacagaagtcacattatggccatgaaccctgctgtttagcaaaatcattactactcggagtactaccttttgaaatggggaatcttttcaaatactccaatttggattgtttaacgtgaagattccatgaagttacttgctcaagttttggtcacgctttctagaaacctctgctccctccatctcaaaatataataatttttaactctagaatttatcccaaaaatataacaatttatccaccaacattatcttcccaaccaatcgcaaccctccaccattcatttttcccagttcccacctacctccactactcatttaatcacaaccctacaccattcacttctatctactttcttaataacggtatccaattctaaaacttcttatattttgggacggatggagtaagtgagtttgagaggagaggaaaagagaagattgagaagatacgcaaaacgagatgagctattagcgtatgattaattaaacttcaaaattagattaatatgtttttttaagtaactttcgtatagatttttttttgcaaaaaatacaccgtttagtagttcgggaagcgtgcgcgcagaaaaacaaacaaactttctcacaatctccttgggccgaacgcagtagatttatcactaaataaactatcgtaaaacttcttagatttctcactatcgatcatgtgagaatgatgttactagatttatcactaaataaactattgtaatatgctacaccgtttattaaaaataattctctccctcccttcccatacgcatgcacgccagcgacgacaaccgaacgggagaggtggtggcagaggcggagagggtggagcgggagggtgtggtggcggcttgtcaaccaccatggcgtcgcagccacgctcgtcaccttcgtcgacatcaaacgcccatgtcgcacactctgctgcggtgtcctcgttgtctcatcctgcgtcgccaccgccatgctgctagcggtttccctcgatgaccacctcactgatgccgccatggagacggtctacactccctcctgcaccttcgtgtgctgctccggagctattgtttgtgcacaccttcggcgccgacctttccctttgcttcttccccgtgacggttggttggtctgcaatggcgttgtcgtagcgattcttggacggccacaatagccacgtcctacttgcagtagctcaccatcgccgacacgttggctcgtatcctgaggcgatgtcgctgctcggatttgacatcgtggagaaaggggaggacgacggcagtggccgctctacctgctcaccatgtgctgcttatgtgtcaaggtgtgggctggagcggaccgtcctcgcggctgtgcaaatccggcagctcagcgaaggatccatgctgcggcggagaaggaagagaccgggagattggccgctgctcctttcccgtgggccaccgcacgtcgctcctcttccacaggtcaccgtgcgccgctacctcttctcccgtcggccgcctgcgtgacgcgccctgtcccctcgccgatgaagagccggaggaaatggaggtagagaggggagatgtggaggaagtgggactcactaactattttttaaccttattagtatttgcctgacatgtgggtccagatattttgttttattttttaaattgttaaattttacttcatgtgccacgtaaatgcaatgtcagatgaagaccgagtcaaattagccatgtagataccacgtcagctgaaaccgcccttcaagccgtcttaagacttgttagagcaggtacaatagatgcttcaagccggtgatagctgtccaccgtggcttaaaaaactgagttaaaagcaaaagatgaagagagagagagattcagccgacgactaaattatcgtcaactcctcacgagctccaagacagtgcaaagcttcagtgattggctagcaaataggtgagcagcagttggccttgctatatgcaaatgaagaacgtgcaatgcaataaataaaatgaaaagtaatattcagaaatgtgtttactgcagcttacttttgtataatacgtctctaattatggctgtagatgacatgggattttttggagccaatagctagctatattattgaccttgctcttattttgcacctattttatattttaacagttgagaaacccgctgtatccgtttttccgattgaacgacgaaattcgaaattcggttttcgtaaaaaagaaacctgcctattacctgcgcactgaaacctccgaagacccacggcccgcacatcagcccagcaaggcccacgccacgccgcgtccgggattaccatcctactccttcctttgctcaacctaattttcaaaaagcacatttacacgtagacccctagaacaccacccacctcgcaaatccgtcccccatccccctcgtcgtcctcctccctctacttgtatccagcgcccgccaacgccaagccaccacaaaggcaaacgcaaccgaccaccaccacctccacctccgatccacccacgccgcgggaaaccctagcgccccgtcgacgacgccctccacctggtgcacgcgcgcggggtggcggcggggggcggagggacggacggcaccgcgcggtagagggagagcgggagcgggagcgcgcgcgtcgcaccggtggccgagccgggccgagctgcgtcgcggtggtgctcttccgcgggcggcgagattcagccctgatccgaggaaggtgaggggaattcttcgtcggggtgggggtttggtgcaatctgtgggggtgagatgcggtgcggggggatgaagaaggcttttcggggtttgggatgtcgcggggatttgggggcggtgggtggtttttcggctgggaattcgcggatttcgcggctgctcgtggtgttcccgtggtttttacgagcagatgtatgcttgatctcgtgcggctttcccctctctctctctctctccatggtttgctcgcgttggggggtttcgaaaatttttcctctagtgttagtcctcgagagaagagtagtggatgtggatggggggaattgagaactgcgaggtgcggctttgggtgggtggtttgttttctccttctccccccgagcagatgcttgcttcgtctgcttggatttcaggatttctggaagacgatttggtttccctccccaagttcatcgcgcaaggcgttcttctgctgcgaatctgtctgttttttttttggtgcgccgtgatccccgatgcgacgcttaccggatttcatctctggtagtatcccttaagatcgtggcttcgattttgcttggccttcccctcctcctccttgacttgtgctgcggcggcgtgggacttttgggggttcttcactgtagcttctccggttggcgtcatacaccacctttacctcgctaatcgggtctctaattaggtatctgctgcagagaattttcatttcccaccatatttctcatctcgtggttggggatccgtaattccgttatctactcactggcttgtctaacttgttccatgcaatgctttgaaccaacacgagtgtttgtttggttattgttggttctgcaaagtccaggctttcgctatgacttgtcccctggaaaggtctatttacttggatgtggactgagcggcaattttatatttcttgatgtttggatttgttggcatgtcaaatatagcttatgtgtaaatttcgatgatttttggctatatttataatgttctactcagagtttatgtgaagattttaccaaagtttcttgcttttctactggctgcccggaatctttttctttatgaagtccttgtcacagttgatgacttgcttaatctgattactaaatgggccgcatcatgagttttgttttaatctgacccttgtttaaatttcgtacttggacaattgacattctctttgcagcctggcattagtttagtttgcaaagtcttattttgcattattagagttaggatgtgaaacttagaagctagattaatataacttactaggagtaatatagttcatgttttagttttcgttgtagtctatagtccaatgtatatatgctacactaattattgtgttagtgagctttctttgtttttttgttttttttgggaaacatagtgttagtgagctttctctctcacttgcagcaatatttgttgggcctcaagtcaaggaagtctttttctctctaaaacaagccaaggaaaatttccatgggtccagcaaaaggttctcgcacaattaccaagatcacaataaaggggtatgacgatcgacagcatgacgaggatccaaatagttcaagcaaggttaaactaaaagtaagatgaattgatactttttagatgacacccagtaattgtagtctcttaaaatatcatccaactcagcaacaatgtgtagacatgatctttttccgtttcactaaaatgttttgattttgcagaagagaaaaatgtcagatttaggtcctcaatggagcaaggatgagcttatgcgcttttatgaagcctaccgtcgacatggaaaaaactggaaaaaggtttgctattcaattttccgaccaccattttttgtgttcatgtttcattggtgtctttggtgccaaagtaagaaagttgtttgttgactctgcaggtcagtgcatctgtgggtggaaaatcagcagatacagtagaagccctttacagtgtgcaccgggtgagtttgtgttctataattaatatgccctagctatttgcgaactttaccaccttgcatcctctacagtttacttggttttgtgaactaaagttgataatttgctcatctagaagactagaacaggacagtatattgatgatatattatttatgcagaagttcaagaatatttagttataatatataattcaccttgcagccatgcctagataaatgtaataggttaaatttgataatagaacctaaagtatttacacattgccatttcttgctgtagactttcttatctcttccagaacgtgaaggtactgccatgggatttgttgcattggtaactggtcatcacaatgtttcggtaagcttatgatgggtttacttgttgaatgttttattgagtatgcttctggtttctggatatgccaaatttcagttgtttctttttgagagttttcaatcatgtgcgaatatttgtactatttgaagctaccatgcataggtcagtttcgttatagcaaaaggccaagtgtgagcactcctgatcattgtggttcttttggatttagttataatttttattataacagtttttgccatatgatgatgcaattagtatattgtgacataagaataactatatcatgatgatggacgttactaacattgaaagaacaagctaacagccaatctagagtgcgttgactattgatagtggtgattgttttgcatttcctacatcacagtctctgaagaatgatgagtaccaatgctttgttcttcttatgttcgattctgaattaacctatttactgcaaggtctgaattatctgaatcgacatacaaattgccctactttttccttaaatcacttgaaattcttaaaatagcaggatgaatccaagagtcataaaggaagtgatcaaacagttagagcatctgggaaggtacggaaacgtgaagctacagggcagaaagagaaggaagcacctcatgctcaccgctcctatcatgaaagaagaacttctggattatcttctttcaagaaaagatactatggaggtaagtattgtaaagcaaatatatatatatatttatttatcccttaatcttctcttggcctcctcaaaatgaaattaccaaagaaagaagcaagagctagttgaatgcaagagaacatttctattggataataacttactctactggcctgcattgttttactaatttgtatgcttttccagaacttgtcaagaacattccaagacatccttcagggaaacgtactcctcgtgtaccagttatttttcctgcagacatgaatgttgctcatgctggcataccagaaacagaaaatgccatcaactgtaccaaaaaggctagtggagctaccaataatgagcttgaatgctcatctcatggaagtcctggaatctcagaatcagccaagtttgttcaagggcagactttcctggaagctaaaggaactggaagcttgaaaaagagaagaattgagcagagtatggaacaaggtcagacaattaaagatgagcataaaaccgcaatggtggctaaagaagggaatgaccttactgaatatcagagacttaccaatctattttccccaggtactttgagacatttctccccatcattgatgtcaaactcattgtttcgttgagttcatgtaaatatacgagtttttggttccattttctgttcacaaaactaagcaatatattttatatgaactacacattatttactctgccattgttatatacaatctgttcagcattttacattgtggatagtttaacatcttgatagctactgcaaatagtgcctaagattatcct

SEQ ID NO: 9820 - DNA, 27789 bp, Oryza sativa
tgtcctcaccaaccccaccgcgctccgcctgctctgccccaagcacttcgcacggctacccaaggatgcctctgccaccactgctcctgttggccgcacgcgacgaccgccgccggccggcgagctcgctccctcggctctcctcgccgcaaccatagccagcagtgacgagaaagttgaggagttggagtgaggaagatgaagcccaagggcagattggtccatgatggcatttcagcgtacacgatttggttaggagtggtattctagcgaagcccgtttaagtgatgtcattccagcgaatccaatcttttgcgatggtatatatgcaattttttctgtgtggatgtggtcgatcaccatcaacccggcaggcaggccaccgagccagccgtgggtcggcgtcgatcgacgcttgttttgactgatgcggcatgtctcgccataactcagcagtcaacaacaatgagtacttgctttgaattgcatatgctaaacaaaaaaatttagggggtgtttgggagagagaggctaaagtttagtccctcgtttctaaacaccaccttaaaacactgtttttcttagaaataaagcatactggtagtacgttcattctcgaaaattcatactgtacgcaagattgatatgaaggctaaacaaagttttgtgcttccagaaacgtccgggaaaacaaagaagattctggaattccagatcggagcaactgagcaagcaactatccaaactacgcacacaccacccgctacagctgagatgcccgaaactaggcgttctcctgcacgggaacatgcatgtcagtcaccacgcagctcgctagcctggccaaccttgggtctgaagctacagggacagcaggcatgcaagaggatctgcatttgtgcagttaaagatagagcagggggagggggatagatgcaaaggagatggaggagagatcagagccacagatgtgctgcaatgatgggtgcacactaggtagggaatgagggaacaacctaggcagggagcaaagccatccaacccaacccaacccaaaccaagcaaaaagcaaaggctatgtgcatcatcccttgctcttgcttgtgctgttggccattctcgagaccgcttggaaaagccaaaggcagcagctttggacaaatcctctagcggcctacaggaacgccagggttcttcatgtcacattgtcacgtgactcgcgcgtgcgagatggcgcgccacaccgggagacggtggagagacccatcgaacaagcaagcaagctcgttcatcaagcatggtgtggtgtcttagcgtgcgtgatggccatgcatgcgtgctgctccccagcgacccacacttatcttgaacggcccggcttatggcagcagctagcacgatgtgcccattgaaagcattgattcgtctgatatctcgcctagcctgttgaatggcctcgcgctcgatcgatcgggtcaagcacgcatggaatgggcaaagatggcgcggcgctactacagccgctgtgctactgtgcagtgacaaagatggcagcacgtacgaccatgtcgactagtgtagctgccacaaatatactatttccccgtctttaaaatataagaagttttagattgatgaaatatatcttaatagtatgaatctgaataaaccttttatctaaattcgtagtattataatgtgttttatttaaccaaaactttatatatatttgggaaggaagtgagtaggagctctttattctatcttgttatgtctaatgtttgatcgtccattttattttaattttttatagttagtactttatacgatgatttatttgttttacttctttataattttttttaatataacggcggtcaaatgttgaaaaaaatcaattttaaatgaggtggagatagaattaaatttgaaaatatattgttcactcaattttttaaaatgaatattcgggatgcaaaatttttacgaaaatataccatcgatcttgcacaaccgttgcgcgaaaataacatacacgtgatgtcgtgggcggtatcgcgcagtaaaagtgcgagaccgcgcggtctcgctgaatggaagagcgagaccatcggtctcaccaaatcaaacaacgacattatccaacggtttccatttgatttgtggttaattacttcattaacaattaaataataataataattagtgattaattatcctaattagcatttaattaataactaattaaatcggcatggcaccggtatcgctaattgcttgaccgagaccgttcggcttcgcttttacatcccgtgggaccgtgcggtctcgcgatgttgctgtgcgagtccgcgcagtctagcattttcaccgcgcgatgccgaccgcgatgtcattctacgccatttccgcacaaaccgacggtatattattgtaaaaaaaaaagtttgcatcctgaatatttatgagaaaaaaatagaatgaaattatatttaaattttattcgacggagacacggagtgagttggacttttttagccatcggatcgatcgatgtggaccgggcggcgctgtagacgcagtgatgatgcgcagcgcgcggcgtcggcgtgggcgtcgggggcccccgccccggccggcggtacgcgagccgtacgcgcgcgcgccccatctcgtgattagccaaagcccccggacgccgcgtggagctccgtcgtaccacctcccaccctctccacccaaaccacgattccttcccatccgctgctgctattattccaccctccttttccctcgtctctcctcccagatctcaatcgcacgccgtacgttatcactgtgaatcaggataagatagcgtacacgtgtaacagtgcccctccataatctcagcctcccacccccgttccatttacagcaacaaatatagcacaataaagtaggagtaaagattttcagcataataatctcaccgtgatcgtttatttccccgcgaaaaaaaaaatctttatcttgcagctgtgttaatttggccgctctcgctgtgcaacgtcgccatcggtgcacgcaatcagtagtactgcgcgctgcgctatgggcatccgcttggccgttaccaaaatttggaggcgtgtgcgagcggtgtctcccatttccgggccagatacgtgccattttggcccccgcgcggttgcacgtccactttggctgacctcacgccccgattaattgcgacccgctgcgttatttctgcagcgtccgtttcgtccaagagcagaaatttttaattaaagaaaccgtcacgcctggatcgcgccgaattgaaacaacggagcactatacgtggctcgctcgcgtggggatcgaaccgtgtgtgtgtgtttgtgtttgtcgcgacgcgtgacggcgagaccagcggccgggaggagccgggacggcaagggaacggatccgtcgcctcactcggtcgctctctcgtttctgtgatttgtgactgtcacgtacggctggatcggtcgcgtacgtgacatcacatccagcttgcgcggttaagagtttttcgatctgccaaagagaagatcgggagaaagatcgagaggtagtagggtggccatacgctacgaccagtaggagtgtaacgctagagttaaggaaagagacgtccagagaaaaaaatgaaaatccttttggatgaatttgtccgtagaccagagagattttcttggattttcttccccgagaaaaaaaaaagagaagagcccatagtacggcaatgtgcaatactactgctactactatctttcttccaaaggagaaaaacgggtgtttttgtttcaggcctacaggtggggccgaccacttcgatctccggcgttttcttctggtcgtcgccttgcgagccgcagccggcggtggcccgagcgaagagccagcgtggcgtgtgcatgcgcagggcgcgtgactgcgtgtgcggtgcggtatggccacccagcaaacgtggcggagagccatgcgagtcgcccgccgggtggaggtccatcgtggtttgtcgctagcatccgctggctgaattgccgtacgattgtatgacacctcgctaaaatctgaggggcatctatgcttctccttattcttaaagagttaaattttaaatttttaactttaaatttagagctgattttagggtttttttatcgaaattcattttttaatatttgcttttagatcgctaagagcacgtatataaaaattttattcacagttactcttcggttaaaaatatggtatttggcttattacacgaataaacgaaacgatggggccgtatctttcgactactgctcatgcatttacttgaaaataaactcatttgtcttcattttaagataaactcatttttcattcatcccatgctccacatccatataaaaatataaatatgaaaaatttaaaactagaaaaaccttactttaccaaatcataatacaattatttatcatttatctacttccaatacaacttttttaatatatttttacaaactccgatacaagcgttttttctaaaataaatttattttaagattaatagtagatagcatagatatatttattttgggacagagagtagttaaatatctcagtaatgggaaaaagtgtaacctatctttttctcaaattggaactcgatcaaacggttttatctctatcaaaaggaaatgaagtgagatgaaatattcccacaaattaactagggaagcaaaacagcattcagattccttcgaacttcactcctggtcaaatttaggagccgaaactctgtcagataaacctcaacagtatttgaatttgtatatgtgttagttttataccctcaatcttgtaaattgcatatgtcaatatgtaatcgtaattgcctagggcatcgaagccctcatgttgtctacgcgatgatcaaagaatatcagcatgtcgagatgcttttggtgcgatgtgctattggtcatgggtgtagaatctatggtagaactaattgcaccgtccaaagcaccacggtatcatcatcctccttatcgactgcacgagggaatcaaggtgggggagctcgggtcgaagaatggatatctacaaatttcaattttcgattgcaggggcttatagagaagtctggaagtaaagtttcggcctacgttgagagccatatcaatgttccggagcaaccaaaacaacatttgtaaccatgagttcggatttaatttcatgatttataagattattgtctaattgatactcctcatgtccttaaaaaaagtaaagttaaattctaattaccaatataggcatattactccctccattcctaaatgctcgacgccattgactttttaaaacatgtttgatcgttcgtcttatttaaaaaatttaagtaattatcaattctttttctatcatttgattcattgttaaatatacttgtatgtatacatataattttacatatttcacaaaagtttttgaatgagacgaattgtcaaacatgtttaaaaaagtcaacggcgtcaaacatttagggaaggagggagtatatgtctagatcagaagttggtttttttgaaagacagatgatgtagtttggttcaagtttaacgatcgatagtgttttttaatctataaaattatttttttagtactccatctgtatttttttaatgtatgacgccgttgattttttaatcaacgtttgaccattcgtcttattcataaaatacttatgtcatgattaaagaacatttgatgataaatcaagtcacaataaaataaatgataatgacataaattttttaaataagacgaggtcaaacgtttattaaaaagtcaacggcgtcgtacattaaaatacggagtattactaacatgatcaaataatcactcgattcaatgagttaccgtagaaaggtacccgaaaaaaaggaaaaagggaaaccgataatgcaaaatcacaaagtgcgatatcgcgaaacaaagaacgatcaacgggacagtgatccacgtacgggaaaaccacccatctccggcgacagtgatccacgtatgggaaaaccacccatctccggtgaaccatcggccaatccgcggccccgctggcccacacgcatgcgtccaaacagcccacccccccccccctccccctcctctcccagtcgctacccaaggtttctagaacctacaggaatatgtccaatccctgacggaccccaaacctaccacagtctagagagcctcacgtactagcgttacccaaaacaaatccgtagggcacccctaccccccaccgcgcgacgtgtcctacccccgctgccctctcgctccacctcgccccccgcatgcctgccaccctcctcccctcaccggcacgtgtccccacctcctgcttgacgcccccgtctcgctggaagtgggcccgactacgcgtggggcccgtgctgtcagtgagacgtggcgctgcgcccaccgggatgtggggagcgagagacggcgtcagttaccggatgcgtggtactactacgacccctccgcccacggcggaaccgtggttggggtttaacgcaaccatggttcgactctatcccgaggtgggagaccgtggttagtggagcagtttataagcgcgcaccgcttcggcttcgtcctcctcgccttacacatcgcaccactctctcttactcgtccatacgccgagtccacgagatctcgccgtagtccatacaccggttgatcggaggtcgtgttgccgccggcggtggccatgatgatgatgggggaaggagtcagcagcgtcccgccgtggtctcacctccccgtgagcggagtcgatgtactcggcggcggtggtggcggtggggatgagatgacgccgtacgtgatcgccgcgctgcgggattacctgccggcgaatgatgtcggggtgggggctgacgaggaggaggaggccgcggcgatggccgcggcggtggacgcgtacgcgtgcgacgagttccggatgtacgagttcaaggtgcggcggtgcgcgcgcgggcggagccatgactggaccgagtgccccttcgcgcacccgggggagaaggcgcgccgccgcgatccgcgcaagtaccactactccggcaccgcgtgcccggacttccgcaagggcgggtgcaagcgcggcgacgcctgcgagtacgcccacggcgtgtttgagtgttggctccacccggcgcgctaccgcacccagccgtgcaaggacggcaccgcctgccgccgccgcgtctgcttcttcgcccacaccccggaccagctccgcgtcctcccggcgcagcagtccagccccaggagcgtggcgtcctcgccgctggccgagtcctacgacggctcgccgctgcgccgccaggcgttcgagagctacctcaccaagaccatcatgtcctcgtccccgaccagcaccctcatgtctccgcccaagtcgcccccgtcggagtccccgccattgtcgcccgacggtgccgcggccatccgtcgcggatcttggcccggcgtcggctcgccggtgaacgacgtcctggcctcgttccgccagctccgcctcaacaaggtgaagtcgtcgccgtccggcgggtggagctacccttcgtcgtccgccgtctacgggtctcccaaggccgccaccggcctctacagcctccccaccactccactggcttccacggcaacggtgaccaccgcctccagcttcatgcccaacctggagccactggacctcgggctcatcggcgacgaggagccggtccagagggtggagtccggaagagccctccgggagaaggtgttcgagcgactgagccgggatggtgccatctccggcgacgccacagccttcgccaccgccggtgttggcctcgacgttgattgggtgtccgacctcatcaactgaggcttccaagtcgctattggaagccccttttgtgagcatcaaggatgatggcatggaggaggagaaggtggcggtaagaagaaaatgatggcacgacaaaaaaatccttcattttcttttgtgatttcaagtcaagtttctactaattcctgtacatatctatctcccatgtgaatattcatggttggtggagaggaggcaagtatggaaagatgggtggatttgttttggggttttgaggtagtagcaaaattacccacaaaaaaattaggtgaaaaaaaaaagaggagtagaaatggaggtgattcagtgtctcctgtgtgcatagggtgtgtggaggtgaaggaagcacggaaggaagaagatcatggcggaagaagatggccggatttcggccgccgtcgcggcggcggccctgcctatttcagtgatttctgggggtttatcctctgttcatcgtttgttgcatcatcgactagctgatgaagatcgtcgatcgatttcaatcaagccccccctcttgttgatttcctattttgttgatgtaatctttgttttgttaagaacccccaacagcatattttgtaccttagctttaaatctgaaaatcttttgctgactcatctacctatatgtggtgatgaagcccccctcaatgtattgtaatcacctgcttcaagtaaatgatccaataatattatgttgctatatgtttcattacttccttgatccaaataacactcatcttaatatctctgttcattagtgacgaaatcgatgtgttttgtggagctgagcggggggcgatggtgccggggaacctgccgtgacagagaccggcggagagtgcgacggcggcggagtcgccggcgagtcgttgtcatctttggtggaatcgatggtgcaggattggcctgcacatgctgcagctctctgcttcttccaccgcaccgctgcttggccacaaaaagacacgtcctctttattcgagtatgtacatgtactactacccggtagcgtagcgtccgctttgccttttgcaggcagtgcgactgttcatcgcccgtacacgtcgccggagttggggaagacgacgatgacgccggcggcggcggcacccgaatctgacccggatcgatcggatcgcggcgactccgtctcgagacgaatgggttggtgggttgggtcgcgaacgcatcggtcggagtcggggtcggggtgggggagaaaatatcgggtgcttgtgtgtccggttcccacgagacagcgggcgtggtggtggtggcttcttgttgctccgtttcgtctcgtacactttcactttactttctttttttgatgggcatgtctagtccttttcgacccttcctgtttacgtcacgacctcgcacagtccagcaagctccatacacagtatcccgtagaaaaaaagatggcgtggactacagtatatatactgtaccgaatacttagagcaagtttaataatatagtcaactactagctctaaattcatctataaccaatctaatagctcattcatacaatagttatatactacactattaataactggtctcacatgtcatacacacactgtgtcttagagtccgtactacagctagccagctgttcttctctctgttaatcttcttaaaatatgtttatagctgacttatagtctgctattgtacctgctcttagagcaagttttatagccaactactagctccaattcatctatatagctaatctaatactctctatgtcccaaaaaaaggacaaaccgtgagttcccgtgccaacgtttgactgtccgtcttatatgaaatttttttataattagtattttcattgttagatgataaaacatgattaatactttatgcgtgacttatctttttatttttttccataatttttttaaataagacggacagtcaaacgttggacacgaaaaccagggtttatcttttttttgacggagggagtagcttatttatataatagttatctatgagcatatactacaccgtttcttataatctagaataaaaaatgcattgtttgggtagtttccgattcgacgagaaactaaaaactccctcaaacggaccctatatgtttgtctgacaaagcagttcgtgttgctttatactccgtattatactcgtaatcgtgatgacaaatttgacgtagtaggataaaagaagaagacgattttctgggaaatgatcagatcaatttgacgaagatattactatatgctgccaaaaattttctgggaaaataatactactagttgccgcttcatgtccgacaaactaggagaagaaaaagaggcggagagagcctagtatagcagtacagctgtagtccacacacgcgagtagagccaatccagcagcatggacccccttccttactcaaagcgagggttggactagcctcgacgttatccatccatccattgccatccacacaaacacagccgcatggatcgccttcctccgcacgtcgccgccacgtgacacgaatcatcaccaacgctccagtcacgtagtacggcctagcagcatgcgctgttttggtttggagtgtgtttaattagttcacactaaaattataagtttaattaaaattaaaattaaaagtttatgtgtgtagaaaaaaatttaatataataaaaaaagttgaaagtttaaagaaaaagttagaaactagatcaggccttgctttggtttccaccgcaaaaacaacgagaggttttgatttgcgggacaaatatcacgggcgttccaacgcgtcgatcgtcactgtacatggaaatcgacgtgtggctgcgttcgttctggggtagggagtttgtttgtttccttgtctgcgcacgcgcttcccaaagtattaaacggtgtactttttacaaaaagtttctatagaaaaattgctttaaaaaatcatattaatctatttttaaagtttaaaatagctaatacttaattaacaatgcgctaatggctcacctcgttttgcatatgttcctaatcttctctatctccttctcctcgaacacaaccctactcgctctttactgtatgtgtgtgagctcgatttaggccatctccatcccaattttgctggcgattatggattgttcagaatgttcagtccaattatttgttcggaatgttcagtttgttgttatgcgtggcaaagctagcagcaggacgtacggcactagtggcaggtggtgagagccttgcgacacaaaagttgcaagggagtagtaataaacacagctaatctatgtttattatgcacaaggtacggacccgaccgaaaattggctttatggatgatgaagcaacttgatcaacttgaagaaatatctttccccaatttgcgtaactgcggctacaaatatcttcttcctccgcgcatgcatagctgtaactgtaactgggctgatttttcgataatatttctcctctcgcatgcttgtgtttagatctgactccaactcagtcgtcaactaatttgctcgagttaattagagattaacgtatagcggtggaaatgtacagctctggatccaaatcgatcagcgcctaaactacgactccgcaaaacgcaatggcaggtcggaactgctacgcccatctttcttccacagtatattcattgctatttttcacaaaactagctgggtggcccgcgcaattgcgcggctagcacccatataaaattatatattttttaatatgattttacttaaaaattattaaatagttatctcgttgtcttaagattttgaaagaccaaaacttatcattcccgtgtttctaattttatagtttttaaaagtcacatcagtggctaccccttacttctatcatattattctttattagcttgctcgatctatcaccgtttctattcattcttagaaacctttaaaaattagatgttaagacttatagtttttagagtttattgtcctgttgggctttttttgtataatttccagaaatcctgtcaaatgttgtcattatactcctctacgaccgtccactgcatcttctctttattgtcattgctattttaaaaatcgaacataattatcgtttaggatcatttttctaccttctagaagttttgccaaaacgttagcgactttgtcattgtactcctctacgactccctgttgccgctcttctttattgtcattgagattttaaaatcaaatatgattatcattagggtttatttttttactttttagaagcccgaaccattaaaaatttgaccttatagtttttagagtttattatcgcattgggttcatgttttttataatttttagaaatccctttaaacgctgccgtcctttacgacccgtccgccgcgtactctttagtatcattgggattgtaaaaatcgaatataactattattgaaatttatttttcaatttcgagaagacccaccaaccattggcggctctgttattgtactcctatacgacccgctcgttgcctctcatttttattctaattgagatttcaaaaatcaaatatgattatcattggggtttattttttttactttctagaagttcctgccaaccgccttgaccgattgcttcacaatctgtctgtcatcattccttttaatcgtcattaggattctatttggtgttttattaatagtttttagaagtctcatcaaccgccaccactctgctcctctatcggcatgttacttaattaatctcgtcatgtgttttagattgtcttttctttcaatagttttattttctttttcaccaatattagttatttataaattgtatttctagttgaaatcttatttttctttttctaatttcagaatttattttattttccgtattgtgttcttctgttttttttattttttattttcaatttcagttgtttcaaaattgtattcctactttaactctctttttaatttgcctaatttcggatttttattttattctttattctaaattttaatttatctactattgggttcttataagtactcttatttcgatattgcttatatttaattccgaatttcagttaattttaaattgtattcctactttgaactcttctattcttttttataattttgattttttttattttttattctgaattttaattaatctcgtagtggattcttgtatggactcttcttttaatattccttatttgtaattccaaattttagttatttttaaattatattcctacttgggatcttcttttttttttaattttggtttttattttatttttatttcgattttgattaatctcgtattgtgttcttatatggactcttcttttaatattgcttactccgtttgaatctttagaacatgtcaatatatttttgccaatcactttgcattgcttaatatatttatcatattttattcagtcatagatggacggggaattctgtaattagtaattagttttgtattctaattatctattcggctccaacacatactatatgcatgcaacgtgcatgtccgattcctcatcaatgaaaatattgtaattacttctcagtttcctattagaattgaataagttagagcagtagtttctattcatattcatattcttcaaattaatctacaccgttaaaatctagtcagtttgtgatctaacggtttaatatttttttgttttttctctgattaatgtaggaatttctagcccccatagcgaacgtggtgcctcctttcaaagctgttttaataatataatagatatatatatataaatacttatctttcagaacagaggttgtatttatcaccaaattgttatctttcgtagctctcaatcgatatgatctgctgattgcctcccgtgttaaccttttatctttatctaatatactatatgtgctttttaataatatattataccattgactttttaagattattcgttttattttagaaatttaaagtaaataattttttttgtcactatagaaactttaagcattacttataattttaaagcaggaagaacaatcaaaggatataataaaaatcaatgacaccatatattaaaaccggattgaatatctcatattcaactgatgaaaattcataaccgataaacacatgtatcaatagatacacaacttgcaaaatattgctttgcaaaaaaggacttgatggcggtagggggtaggcgtaaaatatctggtttggtttgggtggtaccaccatgtatgagggtgcgataatatattttcttgcggtagatacgcgcgggtccggccaaatcgatcgattttagcctcatctcctccccatcctgtggataaggcagaccgcacacacagcactcgtactcgtgtcgtatagtacatagtagtactacaagttgcatgcatgcacgtgacgtcgtacgtgcactgtacggcgaccgtattagtaactgccacagcacagcacagcacacacatgcaacaagtcaaaagtagagagatactgtcgaaactagatttcggcaataagaaaaggggtggctatcaagctggagaagtgaatgggtttggagacaaaggatttatataggttcaggccttcttattcaagaagtaataccctactcctgtccggggatgaatccgccgagtatcttattgattgtatgatttggggataatcaacacatgcccctagaggcacccggaccccccttatatatgggaaggagtccgtgttacaaaagataatctatatccctaacggaatatgcagatacagataaaatacagtcgtaaccgactaagtctcaaggtatttccttgatgtacaagttgagaaacaaacccgagatacaaataagatattctatctatattcggtatcctatattcagtccaaatatcatcgccgtgtagatatgggatatccataatctccacagtagcccccgagacctttgcagtcaaccatcatagccttctcaaagataataatccgaatgcttcaaacttttcatgccaaggcctgccgagtagtgaagacgaagactgtaaagggcgaaaagataaagaatatggtgcatcgaatagatgcacctaattaggtgtacctcccaactatgtgattagttaacaaactaaacatatagttgagaacaaaataatagcacaatcgtgcatcatatgacaaaagcatacacggcgcctaaagaggcattcttagccgactgctttttagccataattaaaaggaatccgagtggttaacactctaaaaggttcacgaatgaacacacttgacaggcatcagaatagaaaactctaaagattacccaccaaatattataaaaattatggtaatgaataagtctaatagcctaggctatgactatttaccataacgaaaacaggcatataacataccgaggaaatgactatggtaaaaacaagttatcccaagttaacccagacagcttttgtagcctaaaaaagcttacaaaaacagcataacacctttctgtcgggcaccttttaatttgcattgtaataattccaaagaattatatgaccgcgtaaaaaggattttatcagcattgggcaacactattgtgcgcataaattgccaaagcaaaaaatgcctaagtccctaaggagcacaatgggccacgctgttaaaagtactgggctgaggtactgttcaggcctaaacccattcgtacctccgatacccttaacaagaaatcccgagatccaagcgacacttcatcttccccgccggaactctcgccattttccccactccctgctacagtacagagctgcgccggcaaactagggttcaccattccactcgaatccaccttcgaaaagttcatcaaaatccttcccgtgatccaccgcctcaatccttcacctctccctagccatccctcgaatcaaatcagcgcattcgaaaaaaaaatcaatggcggaagagaaggaaagctttgaaggccaatgggcgccatccgacgtgacggaggagaacctgaaggagatggtggcgcacggcgttctccctgccaaggaaatcatcgggtggcggccagcgtgcggtgaggcttttccgacccccgatacacacgagactgtggtcttctcccatttcttctatggcggcttcgctcttccgacctcaaaatttttccgcgggatattaagcttctatggaatcagcttgcatcacctaaacccaaattccatagttcacatcgccaatttcatccatgtttgtgaagccttcttgggaattaagccccacttcgctctgtttcgccgaatcttctttctcaagccccaaccaaacaagagtaagccatgtgtagtcggaggggccggatttcagctgagggggactctgagccagaagtacttctctatgcccttcaagacctcaaacaaagggtggcacgcaaactggttttatattcagaatcctgagcctgctcttcccgagtactcttgtcttcctccggcgtaccaagatacctggaactctcttccgattggggatgaagcagcccaaaccttggagctgatgaatcgcatgctaaaactcaaagaacaaggcttacaaggagagcagattactcggcacttcatcaaatgccgattggcaccaattaaagaaagatcccgtatggcatttgagtttgacggtaagcatgatcctaatcgtgaagaaccagattctctggattttaaaatcatgaaggagagaatgtataaaatcttctcaaatgccattgtcgtcagctattcacatcagctgccagttgtgccatataacgcattcaatccgcctccgcaggtacgtatctgaaatcttcaacccatgaccaaaacataatcttgtcttcatgttgagttaactaaccgtggaggcatctcactcaggaatatgtattgatgaagtctgaccccccaatcactcagcgccggtctcctcgccagcacaccgttcagggaggtggagggccgacaatcagatcagatccgcaacctcaaacctccaatccgactgggcagacaggttctcgcaagagaaagctggtgcttaatgacgacgaaggcgacgacggcaacaaatctggggacaaaggctcgcccaataaactcccaaagcataccactcccaggaaaaaactggctagtcgtccaaggccaaagatcagaacatcttccaggtataaaactctcggtaccatttcacttcgacatgcttctctcatggaaataatactgaatattgaaagaacactttgcaggaaaccatccgacatagatccaactggaaaagatcctgatccgactgtgacagaaccaagttcatccaaggattctgagccgactgccgaaagccagccgactggcgcccatacttcaggtgataaggccaatccgagtgaccagcctccgactgaaaaccagtcggcagcaactgaaactacaacaacccaagagcccccgactggaaaccagtcggatgtaggtccagatcaagaaactcccgaagttgaagcgcagacgacaacttctcaaggaccagaggctggtaacgactcgttgattgggtctccagataaagaacaaggatcaccccacgctcagctaggaacatcctcaagtaactcatcttctcaagtgatgccgatttaaataacttcagcttattcgtctaatatcttggaaatacatcaggaccaccaggcgatgacgaagaagaaattcctcgcataaaggcggctgatgactctcgtcctcctatcttgctcaaatggtgggacgagaactcacaagctaccggcatcgtcataaatcgtcaaaaagaagatgaggaagtgtgccagctgaagaaggcacttggagaagccactcgcattgtgaatgtaaatcttccgggtgactgcctttgatgactttgttttctcttcagcaaaactaaaccatgaaccatcatgcagagaatccatcttcgcaatgaggccaagaccgcaactttagaaaagctagttcctcatttgggaactcttgaagcagttagggaccagctacatgaggccaaggagctcgccaaaaagacagagaaggaattaagggaccgaattgctcagctccaggattcaaacttcgagctgagtggttcatcaaaaggtaatctctagatctgtcccattaatttacgctgtcgtaactgtatcctcaaccatttggatttcaaacagcgcaagccgccaggatggctcaaatggagaaacaaattgaagccctggaaagagacaaggtagaactggctgcgcaaagggactcggccttgaaggaggttgaaggtactgccagctgacaatctgaacttctctctttttaatgcagtagatttttatcataaatgtgttttgtagaccgcaaaatcaaatctcaagctcaatttgacgtcctagttagtaagatcaagaggcttgaaggagcaagagatgaagtcgctaatgtcgctataccactcgtccaagctatgttcctcaataacagtggtccgagtgtactcgacgcaaccgaaatcttcgacaagctgagagttgctccggatgtatatttcaagaatatcaagaaagctggaagtatgggagctagcacggcattggcgatgaccaaatccttgtacccgaggattgaaattgacgccattgatggctttgcagacaggacaagcgtagaggctgctcttgatcttatcagcaatgctcaaaatgcggctgacaagattgcaagtgacgtcgtagatcaattccgcaacaccgatcttcagccgagtagtaataactctgatgatgaaaggactgattctgactgagcataaatgtagcaaatggaggcataacttgtacaatactggtgtatttatgctgtgcttgataattctagccaagtctttgatttcttaaaagcttttatcaagctttgttgagcctaaaacccaaagaagctattaaaaactttcagtcctcgcagactaagtagaaaaaatcaaacaaggcaatgataaaccaaggaagcaaattgaattgataaaaaatcacactccgttattatgatgatagcccccgactgacaacttcaagaagaaaacttgatgttgacagtcaagatagggaagtacagtgataagcttaagcgtagaaacgacgaagatgttcgatgttccaagagttgtcgacgagtgtaccgtcttcgcgcttgagtcgataggaacctggccgggtgactgcagagatgataaatggcccttcccatagaggagataacttgtgccgatctcgtgtagtttgaattttcctcaaaacgaggtcgccgactagaaaggcacgggatcgaacattgcgattatgataacgtcgcaacccttgtaagtatcgagccgactgaatcaaagctgcttcgcggacttcttccagtcggtgcaagtcatccactcggtcctcctcgtagcgttcttcgcggaaattacgaaagcgcaaagactcgaattcgacttcactcggcaacattgcttctgccccatagacaaggaaaaaaggtgactggcctgtggcccgactgggtgtagtacgcaaagaccaaagtactgatggtagctgttccacccatttgccggcatagggttttagccggtcaaaaactcgcgctttaatcccttgaagtattatgccattggctcgctccacctgtccattgctcatgggatgtgccactgaggcatagcaaatcttaattccaaagtcttcacaaaagtctttaaaaactccgccagtgaattgtctgccattatcagtgatgatccgattgggcactccaaatctatgcacaatgttgatgaagaagtctcgagcgttatctgctgtgattgtgacaaccggtttagcttcaatccacttggagaatttgtcaatggccacaaagaggtgcgtgtaaccgccgactgcctttttaaacgggccaaccatgtcgagcccccaaaccgcaaacggccaagacagtgggatggtctgcaactcttgagctggtagatgaatttgtctggcaaaaaactggcaaccttcgcacgtgcgcacaattttgtcggcgtcggacactgcagtaggccaaaaaaaaccctgccggtaagctttgccgacaatggtgcgtgcggcagcatggtttccgcatatcccagaatgtatgtctttcagcaattgtctcccttcctctaaagatacgcagcgttgcagaatccctgaaaggcttttcttgtacagctcagcttcatgcataatataaagtttgcttcgtcttgaaatccgctcggcttcatctttgtcttgggggagttcttgagaagtcaagaatcgtatgaggggctctcgccagtcgacttcaaccatagctacgtcatgagtgcccgcaacttgagtagtatctttgtgaggtactgtcggcgtataaaggtgttcgacgaaaacatcggagggcgccacctcgcgcttggatccaaagttggcaagtctgtcggcggcttcattattgtgtcgaagaacgtgactgagctcgagtccatcgaacttgtcttccaatttgcgtacctcttgtcgatatgccatcatgttgtcgtcaaggcaggaccactccttcataacttggttgacgaccagctgtgaatcgcctcgaactattagacgctttatccctagggagatcgcaattcgcagtccatgaaggagcgcctcatactcggcgacgttgtgggacgccgaaaaatgtatccaaagcacatagcttaatctttctccagttggggaaattagaaccactcctgctccagtgcccgaaagtctttttgatccgtcgaaatgcatggtccagtgctccatcttctccgcaggggtatcctcctggcactcggtccattcggcgacaaaatcagctaacgcttgggacttgattgaaattcggggcttgaatgatatgtccaaagacatcaactccaaagcccacttagcaatccgtccgtttgcttcgcggttgtgcagtatatcaccgagtggaaatgatgtgaccaccgttaccgagtgaccttgaaagtagtgagatagcttcctggtagtaattagaacaccatataatagcttctgaacctgagggtacctcgttttggagtcggctaggacctcgctgacaaagtaaatcggtcactggactttctggacatggccttcttcctcacgctcaacgaccaagactgtgctcacaacctgggaggtggctgatacatacagcaacaacggctcctgcgggtgtgatgaggctaagaccggtggctcggtgaggagtttcttaaaatcttcgaaggccttctgtgcttcgggtccccattggaaatcatctgttttcttcagtagcttaaagaagggcatcccccgctcgccaagtcttgaaacaaatcggctgagcgccgccatgcatccagtcagcttctgaacatctttctgggtacttggcggtttcatgttgaggatagcagtaactttctccgggttggcttggatacccctatgagacaccataaaaccaagcagcttccctgacggtactccgaaggtgcacttttcagggtttaatttcatgctgaaagcgcggatgctcgcgaaggtttcttctagatccgagattaaatcatccttttgtttggtcttgacgactacatcatccacataggcttcaacgttgcggccgatctgcgttgagaagcatctctggatcatacgttgataagttactcctgcgttttttagtccgaacggcatggtgacatagcagtatgctccaaagggcgtgatgaatgaggtcttcaagcagtcggatctgatgataccccgagtagcaatccaaaaaactgagaagctcacagccggcggtcgagtcgattacctggtcaatgcgaggcaacccaaaaggatctttagggcaagacttgttgaggtcaatataatcaacacacatgcgccattgccccgttttcttccgaactagaaccgggtttgccagccagtcgggatgatggacttctttgatgaagcctgccgctaacagcttggttaattcctccttgatcgcgtccttcctgtcttgtgcgaatcggcggagtcgttgtttgataggcttggcatcttctttgacatgcaaggagtgctcaatcacctctctaggaataccgggcatatcagatggtttccacgcaaagatatctttattgttctgaagaaaggtgatgagcgcgctttcctatttacaatctaactcggcgcctattacagcagttttagtaggattagaaggatctaggggaatcttattagtcttggcttcgctttctccactttttgaagtcttggtagcgggcacttctccttcgcttgccgtggctgcagccagtcggatatcctcccgggcagacgccgtctcgcgggtttgggccatgtcgcaactctccttgtcgcatgtgacggcttgcttgatgtcgctccgtagggataggactcctcggggaccaggcatcttcatcatcatgtaagtgtagtgcgggacggccatgaacttggctaacgccgggcgtccgagtatggcatggtatgctgtctcgaaatcggcgacttcaaagctgatattctctgtgcggaagttttcccgagtgccaaaagtgaccgggagggtgatctggccgagtggagttgcggataatcccggaattactccgtgaaaaggcgcattgcttggttttagctcggagcgaggaatctgcatatcatccaaggtcttggcgaagaggatattgagtgcactgccaccgtcgatgagggttctgcgaagcttgacattacggaccactgggtctagtaccagggggtaccgccccgggtggaccactcggtcaggatgatccgagcggtcaaacttgattgcaatctctgaccatcgaagatattggggcgtgtcgggctgaacagcattgatctcccgttcggtcaacttttgcttccttttagactcataagctagggggccgccgaagatatggttgagctctttgcggtggtcttgaaatcctaccggggtgtcgccgtcgtccttcttcctcgacgtgctttgttcatcgtcggagttcttccgtgtagtcttggtgtattgctccgcgaattgcttgtagacgaaacaatctttggccacgtggttggagttaggatggtgcgggcattgggaattcatgatcttgtcgaacgtgttgacgcgcgaacgctgtcgagaagagtgaatggcggttgcaacaagttcctcaggcttacgcttgcggtccttatgattgttacttccacctcctcccgtagccggcgtatccttttttggcttccaactgggacccgactgctttgatacggtgacggcgtcttcggctttggcgtactcgttggctttttcaaacataagtttgactgtcctgggaggtttacgcccgaacttgccgaccaattcttcgtggcgaatccctttggtgaatgcggcgatgataacgtcgtcggtgatgtcggagatcttgttacgttgttcagaaaatcgccggatgtaatctcgaagggattctccggacttctgaacaacgttgtagaggtcgaattgtgtgccgggacgctcgaaggtgccttgtaagttggcgatgaagtggtcgcgtaattcggcccaagatccaatcgtaccacggagcaatccatggagccaagatcgggtggaatccgctaaagttactggtaaatagttcgccatggccttgctatctcctcctgctgcgcggatcgcgagaccgtagacggtaagccatgattctgggttggtggtgccgtcgtacttctctattccagtcggcttgaagccggctggccaatccactcgacgcaggtcgtcggtgaaggctgctactccatcaaggtcgtcgtcgtggcggtccgacgaatgatgatggcctcgagctgctcggcgctgtatgattgtgtcgcgaagatcgacggggcggcgacgaggtggtgagcgaggccgttccactcggcgctccctatgatggtcgggaggcgagtgaacggaccgctcgtcgtgacccctgctcctgcgattggatcctgcgccagtgatgctgaggcttggataacggtagtcatgagatcggaagtgggggagtcggctgccagtcggcgtgcggacgctttcggagttaactgggaccgaagccgcaatcatggtctttgtctggttcaagttgttgacgacgtgatcagattgattgagctcgttttccttgaggagggtgtcgaggagggtgatcgcggcaaccgcgttctgttgaggggtgcggaaaatcggtgtcccttcaacatcttgttggccgatgaaatcacgtgctcggcggcctgcttccaaggctcgctgccgtcggtcctcagcctccttcgcggttcgctcacgctcctgctgctcacgccgtagccgttcttgttcttgtgcttgacgctcctcctccagtcggcgacgctcagtctcgcgacgtgcttcggtttcccgggcttggcgttgctcctccgtctcgttatcggccatgaagacgccgaagtagagaggggtgtggttgtcatctaggcttccgtcgaagtcgtcgagatccgcgtcgttgtagcgagaactaaactcgtcgtactctacgatgtcggtgggacgcgagtcgacggtgggagagctgtagtagccatccagctgatccgtcgaaaccgtgccgagtggttggaggataacgccgacttccctgaagctaggcgaaatcggtgttgaagccgacttccgtctaggcctacgggatggagacgctgtcgtgatggagacggccgccaaatcgtcggggagcttcatcaggatcggtgggtaagcctcatcatcttgatctggtgacattggagaagatgcgatcccgcccgagtggtttgaagccaactcgattgagacggtcttgaagtaactttcagccgcgtttgggagtccaaacgggactgaaatccggttctctcccgactggtctgactccgagtcaaggagagagatcttgccgaagttgttggtgacgaagtcgaggctgccgaaccgaaacgtctgcccgggtgggaagacgaggtcgtcgatgccggagacagaacccattgcactgatcggcgaaaagcttgacggacccctacctggcgcgccaactgtcgaaactagatttcggcaataataaaagggggtggctatcaagctggagaagtgaatgggtttggagacaaaggatttatacaggttcaggccttcttattcaagaagtaataccctactcctgtccggggatgaatccgccgagtatcttattgattgtatgatttggggataatcaacacatgcccctagaggcacccggaccccccttatatatgggaaagagtccgtgttacaaaagataatctatatccctaacggaatatgcagatacagataaaatacagtcgtaaccgactaagtctcaaggtatttccttgatgtacaagttgagaaacaaacccgagatacaaataagatattctatctatattcggtatcctatattcagtccaaatatcatcgccgtgtagatatgggatatccataatctccacagataccttttccttttttgcgtacatcgatcaaatctacgctagcttctgctgctgtacccgtaggtatatacccgtaaaatctgtattacgtattatagtacggtttatgtacacatgaatgaccaggtggtggtgatagaaagaaaaaaagagtagaaattttatcgggtggcgaatacaacggggagagatgggagggggtgtacataccagcggcgccgcggcggcgtgagtgcgctcgcgatcgcggcgtggcgagtggcgatagatatcgcgcgcggccgaagcggtgtgccgctccaacggcatggataagaggaagggatactgggatagcgtgtgaccgtaacgtatgtacgtctgtggcatggccaactttttttcaggtttcattccgttccgtggtctcgttctgtatacttcctggtttgtgggtgattactgtggcccaaagagattagtgactaataaactgatgaagcaatcagtagtccaaattaccaatttaggccctgtttagttcacaccaaacttctccccaactctcaactttccatcgcatcagatcacatccaaaactttcctacacacataaactttcaaaaaaaatttcaaactactaagaccttattcgttttgaaggattcctaaaggaaatctcaattcctttggaataagcactattcatgcattcggtttgtaaaattcaaagaaaaatttttcataggaacactatgccaatccttcaaaatgtactaattccataggaatgaaaatatccaatctatccacttttgtttagctcggtggaggaaaaattcatgtgttccaatcttttgttttgcatgtgcattcctacattattcctacgtttttcctattcctgtgatttgaaaatcctgtgaaccgaataagctcttgactttccccaaacttttttccaattctaggaaagccttaatagagagagtaactatttttcacaatccgaagaaagctatagggacaaatttctgtccggatcgaagttttcatttcagcaaacgcgtgaatccaaccaaaacagacacgctggttcccttgttttgctgaccctccctatctagctcatctatcaaatcaaatgccctttcgctgtaggagtactgcacacctgaaactgcacccaaagaaccatgatctcctcctgcttgtacttgagctccaggaggaactgctgaccgcaaacttctcaacttgtgtaccggcagcagtagcagatcgacgattctctgggattctgagcactagctactttcgacaagtaatccatatgttgccaaacactcacgtgcccctatggcaagaaagcgatatatgagtatacggttaacaacaagtgtaatactcactagcgccaaatatctagagacggagcgcggagatatttaaagctaaaaaaaaaagagagattgtatttttatctacgtactcgtagtattatggtatatgttctcatatagtcatcgtaaaaaaagaaaaagaaaaaaatgtactagactattactagtcgtttgcccactgctcattataagacgcagcacttattagaaaaaaaacaatttgtatgcaaaactttaatatatgcgttttactgaattaaaagcctacagtgaaaaataaactataataagaaacataaaatataattttaaaactgaactttcgatttttttttttgttgcgtctgctaagcgcgaaagattatggggctgacaaactctctcttaagcaacggaaccacctctaatcgggcggcctggcggctccatttgcccatgttgctattatgatattatattggccatacgtgtgaaaaattattgatctgcctagcaaatgctcttcgtcgtccgggcttaacaatatcagcggatctgctatattgactctctttaatcatatttaatgtttagaaaaaatgatttagtcaaatctta

SEQ ID NO: 9821 - DNA, 56834 bp, Oryza sativa
gtcacctgcactcccgccgccgcccatgtgctcccgcaatcgcgtgcaacgaccgccgccacccacacgctcccaccgccagtcgccgagctcgctccctaagttctcctcgccgcagccgaccactgagctcccttggttttcctcgccgccgtcggccggcgagctcgttccgtcagttctcctcgccgccaccatggccatcggtgacgacgaagacgaggagttggatggaggaagaagaaacccgagggtaaatctgtccaggatggtatttcagcgtacacgatttggttaggagtggtattatagcgaagcccgtttaagcaatggtatttcagcgaatccaatcttttgcgatggtacctatgcaattttctcatccacatgatgagggacgcgtgaaccgtgcgatcgagccacaccgcgtgaccccacccaggcacccacccatcccgtccgtccgtccaccatcaaaccggtaggcgcccacgcgaccacgcggcgccccgcctgccctgcctcctccacccggggcgcgcgcgacaccggcacagctcgtccggataagcgcgacaccgcgttttcgcgtagagtacctgggaatcgaagggatcggacggtgtgcgcggctggaccacgcaccggatccatccatcatccgtccaccgctcatcgctgcagcctatcgatccgtgctcgtgcacgtacagtgttcctctgtgcctctgcacagtaccaattactgctttacttaaaagcgacggagttggctataattgggacgaaagccaatgtgcacgactcctccctggtctggtctcccggtttgggttgggagatgctttattttgccaggtttgttcgtggttatctgctgcattggcttggctgcgtgcgctctgtacgacccggcctagagtacgtacgtacggcgtactgtttttgtttttaatgcagcgagtaaactctcaaatccgtagatggcgtacaccacgtttgacaggatggggacttggctgctgcccatgctgtccatcgatccctctctaagctagcgcacggcgtgttgcctgccggggggtgcatggcaagctcgatcggtttgacgccgtgtaagcatcatgtagccaagatgggaggccatgggggctagcatggtacgctactatacctatacgtaggaactgcctgtggtgtcaaaggctctaggagtatatgattggtggacctaaggcccgtcgtcgactttgaacggctggtgtttgaatcctctagatatgtagataaaaattactacctctgtcccaatatatataagtatagtcatggatatccgtgtccagcgtttgaccgttcgtcttatttaaaaaatttgtgaaaaatttgaaaatatttagtcacatatatagtactattcatgttttatcatctaatagcaataaaaatactaatcataaagaaatttcaaataagacgaacggtcaaacgttgaacgttaacagtttaaaagtgcacttattttgggacgaagggaataagtgtttcacgtaaaataaagtggtaataacgtgtgattaattgagttttaattattacaaacttaaaaaatagattaatatgatattttagaacaactttcatatagaaagtttttgcacgaaacacaccgtttagcagtttggaaagcgtgtcacgagtatccaaaatttatcctctccctacagaagaaacagatgggggtctaaacactactcccttcgtttcaaaacaaactaacttagaagggaatgtgaccattcctaccaatctggatgtcacttttctagatttgtggtataaggaggggtcacatccgtttttaggttaggttttttttatagagagggtagtaaatagtggagcatttgatatttaattatggtcttgttactagttatttaaaaattctataattaaaccttttatatctgttgctaacacataaataataggcaaatatcgtgataactgacttgtcaagataggtgatgaacaatatgtttacaaattactatagtaaatagtaggatgctagagaaaacggttgtcacgcataggctaaagaaaaccttgaacctgtggaccaaagtaaactccttatatggtgtttttacgtaaaacgaagtgttattaacatataattgattgagttttaattattataaatttgaaaaatatattaatttgatattttagaaaaactttaatatagatagttttcacaataaacacaccgtttagcagtttgaaaagtgtgccacgaaaatcttaatcttcatccaactctggttggagaaaagaatgggtagtcttacaaccgcgcacaagacgactaatcttctggagattgaaaactgtgctaatagtaactcagtagggatcaatccaatatggcttgcatcaagtcgaatctattgctctactgtactctaaattaagttgttttatataaacccacgttctcaccaagcccttcttctcaaattgaaatgcgttatgcctatgtaaccatataccttttactctatccgttttatattgtaagactttttgtcttatctagattaatctattgatcaatttatatgttttccatacgtctaaatccattagcatttatgtgaatttgggtaatactagaaattcttacatttggagaatggaggaagtattatatattaagatatacgtagcaacctaatactcaaaatgaagtggtactagtctaattaatcaattttgagtattacgtaggtggctacatttttgcacatggagagcagagaaaaatgacttctccttttactgtttgaaagttatttttagcctcagcgtttcgcttattcatatgtttatccacaccgcttattagaaaaagaaatatggtaatacttttacatacacgtctttagcgatttaaaatatctaaaagtaagtgatgtaaaattaactacgataacactacaaaactagcttcaaaattaatctttaaaatttaaaattttgactaagcatcagtgaaacaatgagaccctttatatggttatcatatctcttttaaggttgtgttcagattaagacttcgcacggatgtttttcaaacggttaaacattttatagaaagatatacatagaagttacttttaaaaattcatgttaatttattttattttttaaaattataataattaaatataacatcaaccatactaatgattcacctaaatttaggtatttttttaattttctttttccttctctcgaacgcatccagactctactactgctcttcgatacagggatagatgtcctaaaaggtaagcataggagaggaggtggtggattattttaggaggtctgacatggtgcttagagcctaaggtttgaccggttccttccttcaccttcagttccttccctccccgtatgcgataaagatcagtcttctcctgaccaagcgcctttatcctctttgtcctttgggtttgttgccctcacatggccatgcttattccacaaccgcattcatctctgcttaaacacacccaacaaagcaacctcagcactatcacaccagctaaataccctagtattagtagtttttttctaaatcgtgtactactaaattaattaaccattcgtctcggtcgcctggagtggtggtggtttgctttccacttcgagatcctgggcgtgtcctgcacgtgtggctttggcatgtgagctttgcctagcttattttagctttaccttagctaccttaattatttgtatctgtctgggcgtagcaccctgcagattcttccttatcctcctgtagtatggtctaactatatgatggtcatagctaacccataatcatcaaaataaacaacaccaggttagtacagttgctgtcgatctcctctttgattaattcttggatggtacgataaactatagtactcctatgtaggagtagcctggtatctctctctagcttttctttgtgggctaagctaattaaagcaatattcaaatgtccacccaattaacaaacccgaccaagtcgttaatctccccagactcaaccgcataaaatactgttctttaggcttgcaagttgcaacatctttccacccagaagtactgcacagggataaaaaattttgcgtcgcgatcaggttaagcaaagcccgtaatttgggggccgctgtatatacacatatatatggctcacggtttggggcaaagttagtaactccccgtctctaaatatttgacgtcgttgactttttaaaacatatctgattgttcgtcttattaaaaaaattaaaaaattattaattcttttcacatcatttgatttattattaaatatacttttatgtatatagatagttttatatattttataaaatttattgaataagacaaacagtcaaatatatttagaaaagtcaacgacactaaatataaatattaagggacggagtgagtaattaatcggcagccgtggtgacaaatcgacgcatccgaaacgaagtccaagttcgtgcccaatgggtggctggccctgtttgtgggcgcaattatatgagccgagcgcatgcaaaattttcctgcggaatcgcgctttttcagctgcacggggaggaggtgaggtgatgggggaggaggacccctgtgtgttgttaattgtggagcacgtaacagcgacgtgctgatgtggccggtttggtggtcgcattatcctcccccctgatctagcaaccgcgacatgatcaataattaattagtctatgtgctcacaaattaagtagaatcttgtgtgtgtggagcaagcagacaaacgtacatgacgttaacttcgtactagtacactgcaaaaacacgatcatttgctagccgcttacaagatgggacagctacggagtgagtgtggtttaaatgactattttcttctaaaaagattagaaataatccacctaaatttaaactctagacttaacacggttgtatttcaatgataagtgacgtattcgtgataactttatcaatattataagatatactagtccaatctttcgaagatgcttgtagagataagatttgcgtgcatacgtttataggagatgcatgtgcatgctgaacgtctttctatatgtaaaaaagatgagattgctaaatgaacgatcaatcagttcatggccgttgattgcagagtggaacaccctctgcatcgatcgatctcgccatctttgtcgtccttgatagaatgacacgataaccagtcgaacgatcgtacgtagcaatcgtaacgaaccaactgcttgacgtttccctgttttgggcctatatatacagaaatatcctcgtcagcctcctgatcgccaaaagaccggccctagctagctcaccggcttttgttggtggcgacggcgtgcctgccggttgaccatcgccggccagcaagccaatccggccgtcggcgtccgacaagtcaatcctacctaaaaatgaaccgatgcgagtaagaacggcccgaccggccgacgtggcacggcaacgacggcgtcacaatccggataagatcagttcccatccacggcgtggttatatgtggtggtcggaacatgaagctagctagttgtaataaaaaaaatttagttagggcagataattaattaagacgctataaaagcgtcattatggccgcattatggattgcaacccaagcaaagtatatacagttaagacaaaaggttaaggccagtaaaggttactccaggattacatctggttaactaataatcggagtaattaaattaaacagaaagcaggggagcttgatggcgacgtggcggtctggtggacagatgcatggataagaaagtgtgatcgatcgaaccggctggcttaatttggctaatgcacggctgcaggttaagctagtggacaaggtgcggatggaatgtttggatttcttttgtctcaaggctatagctttttttgatcgatcgatgcttttttagttgtgtggctgagacgaaaggctaacatgtgcccaactcgatgccggtcttgccacgtacgtacaaggagggtagattgtatatagacagatgctaaacaaaaaaaagggctgatcgatgagtgtgcgtttgactgtttgagccgtgcccctcctgccggtcaattgggagttggtaggggacagtttgggtttttcttttagagatgactgatgagggagaggcagcgagggcgtttggttagttggttggtgcgcgagaagattggatgatccgagagtcgaggaggtagttagttagtagtaacacgtaatgcggttgagtcatcgacggatcagatggagggtgggacaccggtacgcacccctacgtggtgcggcgcggcgatctcccacatgcgacggcatgtgcgcccgcgacgcggcgcatgcaggcgagaccccccccacacgtcgctgaccctccctctccaaggcgcgcgtcgcgcggggggcgtttgcacgtgaaacgcgagtacgtggaggtggagagagcggaagacgatgggatcgtggatggcgtgcggcgcgcccgggacacgtacgccgcgcgcgcgggggaccagcatatgccggcgtggtactgagtcgagaccgacacgatcacacgagtgtccgccgcatgcacgcagttactagtgccacccaacccaacccaacccaacccactgggtgtacgtcatggcccaggggttggttaggccgtttcctcggcccagcaaatctcattgctcacaattgtgggccgtccacgcatgggagcatatgctaacgggccgacttggtgctaagatttttttttttgtgcgattgagcataataaaatttgatgctgtcaaattgttgaaggataacagattaaacattgctttacgaatgacatcatatcaaaatttggtagtttcgaaacactaccaaattttaatttgaaggtatcaaactaaatacatccactctatcaaaaatttggcatcaccaaaacttaccaaaatttgataaattgacaacaaagggcatgttcagattgtagctaaaataaacctaaacaagttttgccaatgccaaaattttggtaagatggtaatattgccaaaattttggcagaatttcttatgtattgaccaaatttggcaacaaactaaacatagacattttttttggcaactttgctaaaaaaatgataggtttacaatactatttttgaaaactaaactaccacaaagcctatatatttaaaatgaatgtaccataaaaccatggattaagtaatagagttatcatttttcgctaacacgcaaaatgattgcacatcaatatatcagaagaaaagagttatacttacacaacgcaatcagccagaccgacttatgccaggggaagggagaaaagcaaaataaaaaactgaagcttaaaaaactactgcggcggctaaacctaaactccaagcagcgggaagggccgagccacgctacactcccaacaaatcccaaaaaacggcaacgccgactaaagaacacatatagttaatagagttatcataaaactacatgtttaaacgccaatttttaatcacaaaaatacaatatttgtaactcaacatcacaatagtattagcaatttgacctttaaaattctagttttatgataggtttatcaaaataaataaaatatttatagttttgtagattttactctaagacttttctttttagctgccatctagtaatgctgatgtcattgctaccgtcaagcaatttttttccccgagacatgtcattgattatgtcactgtaatggtcacacattgtagtatactcctatatgctgtactcccatgaaaagtcatgagacggcctgtgattggatctttcattatactttgtcaaataggcgagaggaaattcaatcctttcttcttcggacaatctacattggatatacatgttcatatccgtacattcgaaattcagggccaatttggattgctaccctactaaaatttgcagtagtaaaccaaacacctctactaaaactctacctatgccataaatttggcttggcctataaacttgtctcttatgggcaaattttggcttcaatccaaataaacattttcaactctaccctaccaaaattttggtagtaccaaaacttgcccaagatttggtactaccaaaattttggtagggcatcaatccaaacatgccctcattttgtactttgcatctagatgtctcatctcaggagtagaagattccaagtttcacagataagaatgtcgttgtgaactgctgaagcatccatgactatactgtatatgcaataactgtgtcacaataatttgatagtaatctgtatattgatatctggttgtaaaatattccaagttgcaacgatagatgctgtcacttcctgctgccaattcttgaggcatagatgactgtgcatggttactgtgtcacaattatttgacaataatctgcatgaaagcgcattacagccacagaatatatcctgtgttaactctgacgaaccaatcttcttttgtgcaacctacactatgcgtcctaccttttgctattcaacaacgatcacttatgaaacaacatgcagtagtgtgtctcaatctttgaaaattctccatgtttagtgcagaatcaaactatttactgatatattgatcctaaaaagatgggggtgtttgctgaactgtcgccgtcaaatttcttgtctccacagaagtcttcactgatttatcatcttcctttatccaaaaaaagaggagccatcttttcttctctttcgtggcatcactttgcaataatttgggctccctgtttagatagatagatagtatactgtagtgctacgcaaactagcgaaaattgatcacgaaagagacacgaatggttgccctatacgtttcttctattggagcacatacttgagcttcagttatgtcaaccattttcaaggttgcgttctatccatctcatctgaattaactttagggtcaacctaatttttttttgggttatctgtaccaacatatgatgaacaaaaaaagggagaaagataacacaagttggggttcaccaaagtcaaaacctgactccaattgtagacgcaactaacacatgatttccctgaacaacaagtacagagaggataaacaagaagcatatatatgaacttgtaggcatcttttttttttctccttttttcggcagaagattgagattgcttcacgaacaaaagaaagggcacaatcatcgtacacacaggacaatgtgaattgtagcttaggtctctgagaacacacgtctcgcatagtttcttcaacgaaaacgtcgaaattaatgggccagtattccttgctgctgctgatggcacagcttcagaacaaaaagaagaagaagaagaagaagaagaagaagaagaagaagaagaataagaagaaatggatctcatcgtctctgccgcctctgatggctccatcacggcacaagactttgctcgcccagaattaggtttccgatcacatctccagtcgagaccatccatgcatccatcatcatcaattcatcatacagcagcagcagcagcgaagtcttgcagaccatacatacgatatccatggccagagaaagcgatgtatcaagagctaagtagccctaattattcgatctcttggtagtactttttaccagcaattcagattcagccatcgttttgtatgtgataagtgtgcacgttacgagaggatcgatgtatctgaataattggaccagatataatctttgtccatttaatttggtttcagtcgtacatcgtctggtacgtgtgtgccacgtgtgcaggggagattgaaggcgacaaatggggaactgacaggtgccatgcatcatggcctcgacccttcgccttcggtggccggcttgattgatttcatgtcgttgcatacgtacgtgtttggccggtgttcgtccacttcacccgtcgttgatttgcagctgattttacggcggtgaaggctgagcgtacgtgttggtccaaaaagtgtcaactaatatgatataccgattcacagaattaaattttttaatacacaaattaaagtacatactcgtatcttttaataagattagaaagggtagatgctctacacagttacaacaaactacacacaacgactctagacccatcttgcacacaggttggtgcccatcatatgaagattgaggacccccaaggctgccaaacccgttagtgtgcagactcgcgaccaaactaagcagaccttgcgattcaaggcattatgataatggtgtgaacgaatgaatcaaacattagaaagttgataagtcgatctaaagaagtttagtaagaaataccgatgaggaaaaagtttttataaatatcatgtgccgtttagtaatttaagagaagtgtcaatgataatttacactctactcataatttataatctgttagctagaactaggcataaacacacttgtaggccggaccgctgcaccatggaccaagtatataaggtattgtcgtctctattatgtgatatcccataatctaatgggagaaataaccgaagtgtgtctctgtcaatctccttataaaaatgttagtttcacaagtgttctctatttcaaacgtgtttccccaccatcaataatcgctatggggtcagtccaataatttcaacaagatagaattagctttgatctgcaaagataaagaaaaaaaaaagacccgaagaaaagctcattatccttacccaaccctccctgaactaaaataatcaaagataagatcacagaacaccaactttatctaaattttcttttgatctcttcttctcccatcactttatatctccaaccatttgagttgttaattaatcaacacaagtactctttcagcatgtgcagggggcctacgtgcgactccagttccaatcctgtggtttgcaatcttagcctttgccttcactctatatatcttcagttctttacacaacaccatatcctaatctttgattctttcctttcattatattctctctttgctagtacctttctagctagctatcaccctcctaaatagagcaattgtttactcccaaattggcaagtaagtgtgtgcttttgttaggtacagcgctcttatcgttgcaaaaaagatatgatgaattactgtgcctgagtgaacagaaaacaatcaatatacatctcatagttttaatatatattgaattgatttgtttgtgccttgagctaagttaacatgcatccatcagggaaagcgatgcatgtcgcagatccaaccaccgttgcagtcgtgcgactttgggcaacgaactcgagaccgccacctggcatgtttgagcggcttatcagatatttgttcgtcaggattcatgatcctatgatcctatctaatcttgggtgagattgacctgaatgattgataactcgattcattgaatccatcgtttcaggggcgaagaacttgtcgattccgaactgaattcatatattgtgagaaaagagttgtccttttcttttcagaaatatactattgtggtaagatttgaatataagttgtgatagtaatttacttcaaaaatatgttactgttgcgtttgtgacccaaattcctttacgaaggtaaggtggtttaatttaatacagtacattggataaagaaatctcagctccaaagcaaagacctctccctgcgatattaaaattaaggagagaatgagagttaccccatatacttaaatcagttaataacctttttaatgcttctatatatcctatacacgagtgtttgctctccatagggtgattcttaacccatattcttgggaaaccaatgaatgcctttttctgtgcgagactaaggctctgtttagtttgcgagacgaaaaattttggcgtgacacgttagatatatagacatacatttgaagtactccctccgtttcagtttataagacgttttgattttagtcaaagtcaatccgctttaagtttaaataagtttgtagaaaaaagtagtaacatttttaatcaaaacaaatttatttaaaaatatattcatcaattattgatttgatgaaactagtttagtattataaatagtactatatttgtctataaacttagtcaaacttgaaatagtttaacttttaccaaagccaaaacgttttataacctgaagcggagggagtattaaacgtagactaataaaaaaacaaattacattccgcatgtaaactgcgagacaaatttattaagcctaattaatccatcattagtaaatatttactgtagcaccatattgtcaaatcatggaacaattaggtttaaaatattcgtctcgcaatttacacgcaaactgtgtaattattatttttttaatatttaatactccgtacatgtgttcaaacattcgatgtgatagggtgaaaagtttttatttgggaactaaatagggcctaggataaactctgatcggtagttttctggcatttatcaccatatgctacaagcacgtttgctaatacgtagtagtactacacacaaagtaaatactatatgttagtactttatgtgtgttatccgatgggcgatgcaaacattattattctcgaagaaggatattacctcacttttttttttcttacctcatgcatgaatcaaagagccaatgtaaggttgcataatctgacagatttccttaagaacatccgttgaaagaaaaatagtaattctggacatttaaaccttggtcggtagctttctggtatttatcatcatgctacaagcacgtttttattatgtagtattgcaagcaaagtaaattctatgctagcacgtaaatatatgttatccaatgggcagagtaaacagaatagtaagagttttttttgcggtcctaagagaaggatagtatctcacggtatctcttcatggctataaaatctaaaaaaacatcgtacaatattgtacagtaatacgaagaataaagaaaagtggtagtactatctacaaaatatatattcttcgtatttggtgggtagcagcctagcagggacgctgtgagatccattcaaaatttaatctaacaaaattgagcaactgaatccatacgtacataccaaactggtgcaagaaaaggcaaaagaataataataataaaatggatttgcgcactagccagtgatttgcctgtccttctcagtgtccactgcaaactgaataagtgaatatggtgatctcatctttcaccttctcctccccataaaacaaacacaaaccaaaccaaaaaccaactctttttgaatctcctttgtgtcaacataaagaagccaatcaaggtgatggctagagggagcatgtagcagccgttccttttattatttgcaagactagattagtccagtaaaagcttcacttcctaatagccttataaaaatgatacatggtggaagatggcattgtgtttttgccaaggggacacacacatacaccactagcaaaagcttctccttttaggcacaaataattcagtaatctctaagataattccttttcttcttcttctctctctctttaagttcaagtgaccctgattgtccccaaaaaaggcgtcctcggcgacgaactgggctgatcgttctgacggacagtcgagatcttgagctccagatcaggtggctggagttgcagttgcacctgaggctttgccaccatcagagaaggatggattgttcttggttgttcgctgctgctgctgctcactgctggtgatgaacagcttggcgtcagggttaaggatggaggaggcagcagcatggcttctggctgtgccatgctgctgatacccagtgacagtgcagggaatcccatttcagcaggcacagaggctgtctcgtgtctcagtttcagacgttcattcacactcggagccttttctgcatcctcaatctgaaagaaaagaaaaaaaacatcaaattttcagacatgttaggttactgtaactcactcatataaatacatgattcttgctgtctgaaactgtctgtgtagatattgttgcaaagatgtttgaagtttaccacgtcaaagaggctggatcttctcttcttctgcgtgaggctgctctgcctgaggaaatacttctgggcatggctggccacctgcgtcggtgttcttgtcgtgacgaagtgccgggaaatgccgcgccagtcgcctttcccgagcttctcgagccctaccaggaatttcctgtgctcctcttcagtccatggaacacctgatgacagttaactgatgagtttgacatgttcagaatttcaggtgtagaaaacacagcaatttagaggatttttttttatctgttgatatctgcaaaaacaatctagtgtttggagttcaagaatctagatgcaaatgattaggacgagacaactaggataaatcaggtctttgtttgtgataaggatgagagtttcaggttgcaacttgagagacagaaatctgattcttaggaaatttatgtcagtcatgcatatattcctgtaccaagttggaagcataaaaatgggcttgtatggcagacagcaactggtggcaaaaattggagaaggggacataacaaaagaagtcaaataacttctcatcaacaaaaataaattcagtcttaatgatgattagatcactgtcaggtggctgtaattagtgctaaaccacaacaaattagtgaagcatgcacaaaccatatgtctctcaagaactcacccttcttcctctcctgagctctcgccatgaggccatcggagaggtacccgttggccatcttctcgccggcctcctccaccgacaccagcgacgacgacgacgacacggtcggcgacgagttggaggcggcggcggcgaccgcggcgtagtacgccggcgacggcgacggcgacggcgacgataggcactccatgctgaagcacttcttcagaggcgcaccgccgacgtgcaactgcaccccgaacaacctcacgccaccggcgccaccgccgccataaccgccgccactctcctgcaggctcctttggccggtgcaagtcctggagttgtggccattgttcccgcagctggagcatttcctggccatgctcgccgccgatggcaggccaagaaccacaagaacagcaagaacaacaagaagaagaagttggagggaagcaagaagaacaagaagaagaggagtgggaattctaaggagttgagataagatggtgcatgtggagatgtagcaatagcagcatctagtagcttaataagggaggagaaagaaagatgtggtgtgggacaagcaactagctgaggagctaacacctggtgccaatggaaggggacacacacattggcatcatctccttttatggtattgacaattcaatccaaatgctggggcaccatgatacattgattctactatagatgctgctgctgctgccctatttaactgcacctggaatccacaggaatctgaaagagagtctctcctctttggatgctattagtgatatttaatattatctatgtcaacatcatgttgcatatgaaaatcatgtttgtatggttcatatcaggaatcttatacctttgcttgtgcatttttgccactgcacctgcctttttatcctggcaaggtcaactgattggaaaagagaatttgttttcttcatggcctgaaattgtttttaaaaatagacagagagtgagtttttttttaatgttgtgctgaacgtgtatgccatgccacaaaagaaattgggtaaaaaaaatgttttttgtttgatctagaagcaaaatgatggcatcgatattatcgaaattgtttcgagattagattggattgagtagctattaattgctttcttagtttggaccagaacaatttatagagaaactttcattttgtgatgtgaaactaagacctcagtgtccgaggtgtatgctgacgtcatcgttaagaaaagcatactttggtccatacatgtcctttcataacgtccggaataatattatgttattttgtttgttgccacacaaaaaaaaattctagaaacgtaatgagagcgatttgaagtggaaagtctattttgtcagctcgtctagatcaaataataaatcgataagaaacacactgcaacctcagctaacctcccaagattaaaaaaagaaaattcaagattcatttgagatactagtttgctctgctttgactaagaatattcagattgaaacagtataaaattgaggatgagattttaatgtgactggatgtgacaaaaaaagagggagaatatgaagtagttggttaaggtgaagatttcttgtgttgttcttcaatttgtcccatgtcaagaataaagggcattggccaaataacaagaaaataaacacagagcagagaagcccttattaatgcaagcaagcatacttatcaaggttaggtgccaagatccaggattggacgaaattaggaaaaggtctcgctataacaaccacaaaagggagagattccggtactttggaccttatgaacctgcatagcattagaaactatgtgctattttttttgagtttcatgaaataaaaaaatcaggcaactgttctatttgttcttctccttgtatataaatccaactggatgagttacagtctgaaattggtggattattaatttactagaaacatctgtactttgtgcacccaacttaggtatgggaaattcttagtttttgatgaactcatctttctccttatcaacagcaaggtctctctttagccttttaaattccatgactagatttggacaaccaccacattagagttagttgtaatccacaccaaacgaaagtaaataaaacaaagttgcgaaatgaaggggggcacatccaaattatcacttcaattgcattttaaaattttttgttagtatatacaaatgggcaatatcccagcttaactttactagtcaattaagcacagcgcaattgtgctttcctggcaaagcccttatttccgtgttcttggaggcttatgttgtgaaacacatggaaaaaatcctaccacttctgaattctttatttatattgtaaaaaaaaaaaagcttctcaatggcatcatgcaaatgctacaataccctactgaaccaatgatttgaagtggcacaagagacactccttcaaaggaacttattatagctgtgttaggtgctagaggatctactgtagtgaacaaaacatttcctgttgaagtgttgatcatctgtgcctgttcatgatagatgagatgccatttggatttcaatgcattattattattgttattattggattctactggtttaataggtctacgtgataatgatatgcttaattgatgcattgcaaagtgcttctagctccttggaataaaatgatattgcacaactgagaatgaaaaagaaacttcaacggcatgtcctcttgtacagtagattcatcatcttaaagtgaagagcaatgatactctgtgcaatgatccatccatcaatccatcacagaagcaccattgcaccaaccttgtttcttgcaaagttagagcatctccaacagcctctccaaatcgaactctccaaacacccatatagccaactctccatctgatttaactagtcaaactaggcactcactccaacagactctctattaatcctctccaaaataaaatcggacccacatgtcagcccctctcccctcttcttcctctctccctccccttctttctcttttcttctactccccttccttcccgtcgaggcggccgacgtatggcgcggtggtgcggcggcgctgggaggcgggaggtggaaggcggcgcggggaggcggccgggaagcggcgggaggcggcgcggggaggcgggaggcgcggggaggtgggaggcggcggtcgacgaccccgacgacgacctcgacgatggcgcccccaacgacgacgacggtggcctcggcagtggggcggaggtgcggcgctggaggaggttgggcaccgacgcggcggaggccggaggggcggcatggggaggcggctgggaagcggcgggaggcggcggggaaaggcgggagacagcgggaggcgcggggaggtgggaggcggatgaggtgggaggcggcgcttgacgaccccgacgacgaccttgacgaccccgacgacgacctcgacgacgaccttgacgacgatgatggcggccctgacgacctcgacgacgacgaccccgacaacggcgacctcggcgacgacgacgatggcgcccccgacgacgacgacggtggcctcggcactggccactgggggcggagggttgcgctggcggagggtggggaaaacgcgtggggcccacgattggagaggcgcttttggctggccaaagttggccagcgtggggagaagtttggccagccagttagctaggctgttggagtgtgtttttgatccaaaattgctaaaatttaacttgaagagtgggataaggaggctgttggagatgctcttactgctgtctttctttctccagtgattctgccccttgtgagtgacaaatccaggcatgaaaaggaagctgtgacaaggtaggaggggtatctatatccaaagcagatgttgagtgggggatgctattcttggtgaattaattgcaaaggaaccaaaaccagtacagtttcagatagatatccagcaccagaatcctgcatcttgtctggttctcctgcaagaagttgtactgaagaattcctttcccttctatccaactcttttttcggagaagaatccaatccgttgggaaaatccatctctttttctggagaagaatccaatccgtttggaaatcattaaggaatatcaatttggatagcaaaacactacggagcatgtccatttcagccgcactttatgtcttctaaattattcccatatttcctttttggctgaaacactttactgaatgtctgaaacatataaacacaatacaaaaaatgcagtacttcattttaagctcgagatccattaattgatagagaactgcatccggtcgcgtccaaattaacgtttgtgtcaccaactcgccatccttaataattctcctactcctcaatgtttttttgttggaatgtgatgtttgatctgccaagaacggcgcaaaagtcatcacatgcaccatcatcaatttattaaaccgcagtttgcccaacacaggactcatcacccatcaaagacataatgttaagatctcaactcccccaaaaaaatcttaactccctcgttaagatcgccccatgaaaattgaatctccggtctccaaattaaatagttgaatactactccgttccagaatataagaggttttagttttgtcataagtcaaagttatctagctttgaaaaaaatttgcaccgacatgtacatcataaaattagttttattagatattgtagatattaatatatttttctacaaatttagtcaaaactagataagtttgatttaggagacaaaactaagcctctcgcattctgtaacggaggcagcattatcttacaccaaacgtgtctccttgtttttctacattttttctcttctaaatattgtcacgaagaaaatgtgaggtcaaatgacctggtaaaaccaagtacctggttagtaactacgacaacactgttcatatcattcagtctagaagaaggccataggtgagaggtgacaaaaacacatgtatggcatgcatccaaggaccagctgtgaaatctacaggcaccaaacatgcacggcagggttcacaatcacatcacaaaaaattcctttgccatgaaaacaactgaacaggttttatgaaagttttcaaactcgatcgagctcagctagttcacaatggtcaatggatgcaaaccatcaggctcgtcgcttctctacgcgtttctttcgatacacctggacttgccgggcagcagccactgtttgacagctgaattgactgtctctgaaacctgaccaaacattccaaaaaacattcagagtttcagagagtttatggcctgagagatcatcatactaccaagttaccaaccgtgtgtttcagagtttcagtatgaaagaggcaggtttgatctgaagacacagagcatttcaacagtcggtggcagaactgaagacagtctttttttttttttttgatggcgaactgaagacagtcaagagcagaggaagcagatgaagaaatggttttcagttcaattgaatggatgagtggatagagcgagaccatgggccggtatgcggcgccatacatgggctgaatctccggcccacacagcacagcccacaagtcacagcgaactctccgaccgttgggggtcggaaaagaattctccgagcccctactgggtccaagacaaccgttggatggaggcgtacgtgcggctaggatcaaaagcttgtaatgtaggcccattagaattgctgcccggcacggcccaacccaacgccgcgcataggaataagttcactttgtgaccctcaaaagtagtcgaaatctaatctataatcctaaaccacaaaacaagatttctcgacccccaactctcaaaaccggtgcaatttgactccctcagcggttttactgatgtggtgcctacgtggcaatattgactcggtcttcttttcacgtggcgcttaggtggcattagaaataaaaaaaaataaatgtgggacccatttatcattcaccaaaagtatgggtgggacccactgacctgtggggcccacataaatcatcctctcttcatcctccccttctctctctttctcttcatcaaccttcgggcgagcggcagccgtgggacgagggccagcggcggacgggggccagcgacgggcaggagccggcggcggtgttgtcctcgtcgaagcgtgacggctgtggccggagctaagaagggtgacggagcaccgacatcggcggcggcatcgggtagtagcctccggcgtagtacggcgtcgcattcgctgcgaagtacgggaggtgaaccggcaccaccatggccggctccgcccagttgtagtggtggtggtactggtactccactgccaccgccgctggttcagatttgtcgccgtcgccgctgctcttggtggtggcgtctttggacgatgccgtcttcccaccggcgcggccagcctcgtcggcgcgtgtggcggcttccttcctggccgtgcacttgctgcattcctgcttgcacgccgccgccgtcgctggcgacttgttgcctttgccgtccttgccttcgtctttgcgcgcgctcttctcgtccgccggcgaggtcggcttctcgccgccattgctgttgctcttcttgccttcttccgaaggcgcagccggtgacggcggcggcggcgccatcacctcggcgatcttgccgaccttcgagagcttctggacgagcaccctgctgtccacgtcaccgacgacggtcaccttgtcgagcgacgggttgatctcagtcctcagcacgcctgcaaaatccatgcacacaaacacaaaattcagcatctctgacgaagcacaagattcatgcacacaaacacaaattcagcatctctgacgaaacaacaaattttcagcgtctcagatgaataacaagaacacaggagaagtgaatgatctcgatacctttcaggcttatggctttcatcaccttcctcccgcaagcatgagcaaggagacggggagtaaggggaggagaccgctggtgagaagacggaggcgagagagaggggattggaatcggtgagctcgagcttgccatcctgccctccatcttcctcccttgatgcctgcttgctccccaccatcggctcatggtggcgtcaccggagcagcgtcttccccgggagtgaggtccgccgccggctcccgctcgcagccgttcccctcgtcctcccactaggggatccggcccctcgcctgcccgccctcccgtcgccaccgtcggctcccacccgctgccgccgccgccgccgctggcccctgtcccatggccaccgcttgctgaacggaagagagagagagaggggggagggggggggggggaggatgaagagaggatgatttatgtgggccccacatgtcagtgggtcccacccatacaatgacaaatgggtcccacacatatttttttatttctaatgccacctaggtgccacgtcaacgccacttgaaaagaagaccgactcaatattgccacgtaggcgccacatcagcaaaaccgccctccaaaaccaccgagggagtaaaattgcaccggttttgagagttgggggtcgggatatccggtttggtggtttagggttatggattagatttcgatcacttttcagggtcacaaagtgaacttatccccgcgcatatcatcctacggctgacggcccacggatcacggcccatgggcccggctgccccgccgcgccctatatgaagcgctcgagagcgccggttcacctcgtccccatccgcctcctccgccgccgccgcgtacatgaaaccctagcggatctcctctccgtcgtggccatggcggagcaggggtggttgttctgttcctgcctctagtttctcctatcttcatctacttgattctctcgcatcttagtgattttggtgattttgattttctagtttttgaatttgtgattttggtggtgtgttcttgatcgcctttgagagaaccgggtggatttattgctggtgccgcgtcggttccgttgcgggcgtagatgaatccttgtgcttcagattcatccgacgagctccatccatgtcgtctcctcgtgatgctgggtggcagggtgattttggaacattttctttttttttacttctctcccgcgagatctatgtttgtttgtttgcgtttgtgcaatggtgtttttgctgggttgatggccttcataatcccggattaactcgcttagctgttcttctgattcatgggaggccgagatcgatgctggcagtttcgctgatagccccttcctcttactggaggtgcttcattagtaactggccacacaatacacaaatgatttcaaaacttgttttctccgtttgtttttttgttttgtttttgcgaaaagtttcgcttgggatgcgttgcgcagaacgaacaaaccatcttctgaaatccaccgagatcaatagacagggtgatgtttatattggtagaaatacaagtaatcataaaagcagtaaatttggatatgccaaatttaacagaggcatcgaacgattgaacatataagaatatcatccaaagatgttcaactgttaccgcaagaacacggcaataaccttctttttagtgttgtgcggaaatatgttgaacggttaattgacaagcaaggattaaccttacttataggcctgttaatttgccattatgaaacgtgataaagacctagtaaaccaaagagaattacccctacattacgaacttacgattggtggcgtgcgtatgactcgaaatggtcgagcagcttttgttggagctctgaaacaaaggcaggacaacttgtggatagtacacgtcaaaattggaagtttggttgaaattgaaattggaatgaattggaagtttggttgaaattgaaattggaatgatgtgatgtaaaagttggaagtttgtatgtgtgtggaaagttttgatatgatggaaaagttgaaagtttgaagaaaaaatttgaaattaaacaagggcctgatgagaggtctgcttagctcatgcctgcgtcagtggaccatccctgacgaccttccaatcttcgccactactcgctccatggtgcagatcaaggtgacaagaaaccagaaacaaaaacagtggtaggaatctgcgagtcttgtgccaatggttcacattatcaatgtacaccgacagcagcgcacacagcctcaagtttaagaatggcagcgtgtttaaacagatgtaaaaataataatttctttatgaaactttttcacaacaaaattctgcttctatcattttctctcttctttttctcgtatggaacgatgtgatgagatatacatgtgtttctgactacaaacatatgaacaaacagacccacccttctcccctacaaactcactcccacctctgcctaataacacatcgatacagattatatcagttaaccacaatgaaaagaaaaaaaaaactgccattagctgcatcactggaggtaccaaaacttgctggcagtgaccatctgaattcagactagcccatgcagtgttccaccttcatgagcttgtattgtcaggccatcaaggattcattcatttgccaattgctaaactttgagcgagatccgagtcttgatgggcttcagcttcactcccatgctctccggtgacagaagttcaggcgatatacagaatgggttcagtgtgctccgggggctgctatccagctgggaaggtctgtagagcccatatcccatgaggaagtactccatggggatcaacatcgcgtgcggttgctcctcggtgacgagtgacccgcatgcctgaacctgcgatttagaggcgaaatgcacattcagaacttgccttactctgcgtatggatcatcaatttgctatgtcagctgttaaattgtgatatggtctttatacctcgactagggcgcaatatctccggtctagctttgtggtcatatggactgcgtcgtcgtggaactgtgagttctctcccacaaaaatcagtgtccgacactgaagcttcttcaacgcttccgtcaggtcatgtctcctgatggatggaaaaattcacttgagtatgttcaaatcctgtttctttgcatgttcaggcaatgcacagaagataatttgtccacttactcgtttatcgcctgaaggaatcgccatacattagatccctgtcgctcatgaagtaactgcataaaaggaaacctattgcttcagactaactttctataagtagacagctaccaatcttgtcaaaatcatatcagaaagctgacgaggagatgaactacttacacttctacaggcttgcacaatctctgattcagggtcttgtccattcccacgaacttcctgcacatagcatcagaaaactgttgagcgaagctgatatacataaaaggatgcaaataaaaagcagctaacagaagaccaagtataccgtgctaaaataccgctgaagcaagcattccttgactagcccacgactcccataatagtaaagcaagtttaataatacctggtacataagagtttgaggttaattcacagaacacattaccaatactgcagtaccgacagatttaaatgtatgttagtaccttattgtacaaccactcgctccaagaaggggctttgcatagcggcgaaactagcataaggccaatcactctatcccggtattttgtctgtgacaatgtatacatacattcttaagaaaaagaaaaagaaaagacaaggcaagctttgaaataactgctcagagtaatacttactgcaaagagggtgagaatgtaggcaccggcagtgacacccaaacacatcacagatcctaatctgtatgagcaaagccagaagcacagcattagaggcgtcgatcaagcaccagccgattataaggcgcaatttggccagtgtcgtgatacagtacccgaagaaatcaagaacatccgcgacttgatccacaagctcatcaacagatggcacgggcacatcggatgaaattggagccgctcccaactgtaggacaaaataacacatgtaagtatcagagcaaatacgggcaaacagtgaatgcttacataatattgggtaagaaagagccatcatgactgacctcatgaccttgaggagtgatgtggtaaatacaaaaattgtgaagcaacagcgacgcggcctctgggcagaagaacaatccttgaaagcaagacatatctaccaaacaaaaaaaaatagcaacatcagctaccctgccatggaaaaattagcaagctttcacctacaaacttgaaaggtcatcagaaaactcacaatttagagctacatccgggtatgttatgagcgccggcttgtcttcatctccaaatacagaaacagatacagagccatatctggttcgcactcggtgttcctggtaaaaaaacacaggacacaaatttagcccattgggatttgacaatcctatttgaaacaatagtataatgaataatcaatcagaaccagcaattaaccaagaggtattgcttcccctcggtgaaacctccaccgacattgcttaacaaatagaagcaacataagagagattctcgttgtcattgcgttgataagcactaattggaagctgtagcgtaggggcttccgttcttaattaacattaaaagcaaacaaagatgctacatttttgcgtgtatttttgtttttcctctcttcctgctcctacggctcgagtaacattgcaaccataacaaaacgaggagctgcaagaactagctattactgaccaaaatcataggcatctaatctaatgctcctaatttgtgcaatgtccctgaacaagtgaacagtaacgaaaaggagctccatggcacccccaaaaatttgaagcatttgctgctctaatcaagaacagcaagaaaccaaaatcagggagcaggaatatccccgctcctaccttaaccaccatgaaaccaaaacacaaatccccaccaaaccaagcttgaaggaggggaatcaagcaagaaacgggagagaccgaaagcagagcgcacggaccttgccgccgaaggagatccgctccacgtcgatggacaccgaccggctcgagtcccccatgccgccccgctccccttctagaagcttctcctcctcctcctcctcctcctcctctgccaccaacctctcctcttctctctctctctctctcctcgctgcctaaattcctcgcatatatttgctcgcgtatatatacaaccgcgagaggagagagagagagagaggagagggtggcttggcttggcttgcccagaatgagcgcaaaccaccgacggcggtgagctcaccggaggtgaccagaatatggcgggagagagaggagaggagagggagggtggattgcctgtttcatgggatccacccgttgaaggtgggccccacctgtcaatgaccttcctcctcacgcgtttgaccggtggtgtgtggggttagcgttttcgcgcttgtgacagcttgggccgatcgtcgcttgctacgggcaccaaacgggttgaccccccgtggaaggcattaaacattttttccccttctttttcatgccaattttgacgtatttgtcgttcaagctaaatcttttatttagataatcgttcaagctaaatctagcacacgagatatttgtggccattatgaataaaaagtcgtttttcgaaactgtttttcataccatcatttttggggttttatttggaatcattttggtagacattatatatatttattctgtgaggagcctacgtgcaccttccatataagaataagttcattttttgttcctcctatttatctcgaaataagtttattttattaatcatatcagagtttgtgcaagtagactacaaatgcatttgagtagactagcaaactactcatgctttatatgggtaaaagaatatactagtatattataatatgttatagacaaaatacattttttatcacaaatgttagtatcacttgtttgcttattaaaatatatgatattcacttgtttgaaacaaatattggactctattccataatatcaaaaaatatcaatggctaatttgaactacaaaagaaatggtgggatagcggtgacagattcactgccagcaccactaatgttttttaaatgagtatagataaaagagaaaaataattatattgaggtttgataaaatagggtagtatagtctcttttttaatgtattggcatatgtggtttggtttgaaagttgtatttattttcgaatgaagggattatagttttgtaaagtgtgactgtgtgaattgtttgagggacctaaggaatggatatatatatatatatataatgaaatttagaaaaatcatttttatttgaaattggacacgggaaggcagacactatgagttcgtgtagtaaaacagggtgtgccttttgtgtgcgccagctcaggctggtggcggcccatcagatgctgagctggatgggggcccacacatcagtctaacaaaaggtgcggacgtggtacactcgagcgcgtcatgggtttctcctgattggccgcgtccggtgggggccacctgtcagtggtaagtaatgcgcccccatgatttgcctcgtgagtcgcgacaaaattaataacactcctactagtacaatctgattaattactactaatagatttttggagatacatataccgattgttttgggatttttgaatataaatcacttttctacccaaatggtttttgcactacttttattctgtttgttttttatgtgagtcaattaaaccagcgaggaaatctaaacggttagaaaatgtatgttatttcttaaaacttgtttttttatgcaatttcaacacgttgacccggagaagtatttttagccggcaaaataatatattccaatattatttccgaaaacaaaaataagaaaaatattagatcctttaattgtcaagttagtattgttttagagcctaacaggtggtcggtttggttgacttgccagctgaacaacgtttctcatacttcttttttttttctccctgccctaatttttaaacgcctcccctttcacacacaaacaaagcaagcttaattagattcttaatctttagctttctttcagtttgtttggtcgtctttgtcaaaccttttggatggatggtaaaggggagctcaagctaaaccaggacaccctaatttcattttcggccaatgctttttcattgctacgaaaggtggtcaatatttttttttaaaaatgtttttttatcaacttctaatcacatatgcatgtggagatgatctcacaatgccatactataataaaagatcttaatttttttattccgaatgtgagatcataagatggaagctagctagggtgcgttcggacgtaggtttcaacttctattcccttgttttccacgtgtacgttttttaaacagttaaatgatgagtttttttttaaaaaaaaacattagttttaaaatcatattaatttatttaaaatatttttatagctaacacttaactaataacgcgttaataagccaccgtgttttacatgtataggagagaagttcacaatcttctcttccgagggcatcctaaggccccgtttggtagagctcctaactccaactcccaactccaaactccaactccagtgagagctagctcctctaggagctgaggtaggtaaaaaagtgtttggctagattactcagctccatatttctacatcctttgtcgccatttcatcgaacaccttctaggcgtcgccttgacgttgccgccgtagccagtcagcccacgagccaccgccgccgagaagcccacgcatctccgccgcctcccaagccgctgcgcaagcgccgccgcacaggccgccgccgtcgcccaggctgcctcctgccgacgcccccgcacgcgagtcgcctgccgacgccgccgccgcgtgctgcccgtcgtggccaccgcaacaccgcccgcagccgccgccgccgcctgccgccgccgatgcgccgcggcctgctgcccccgtatgctgccaacgcagacgccgccacaaccggttgtggccgtcgtcggaggatggggaagaagatgggccgccgccacctgctggccccgccgccgcgccgcccgtcctcgtcccccaacagccgctctccgccgctgccgcagccccccgccgccagcctccggccgcgcgtgcgtgccgcccgtcgtcatcccgcagccgccgccgcccgccgctgtcgctgcccgtcgccgtcaacgctgccgcagcccgccgatgccgccgcactagctcgggattgagaggaagattgggggaggagagagaacgggaggaaagaaggggtgaaagggtagttgagtggcattttcgtgtaaatacactaaaatattagaaggtagtgggtcttttggggtggagtggagctgtggagcagcaaaaacccagctccacccccgtagttcattttctaggagtagctctgccaactccactccaaaaaaaggtgaatctggaccgtttggcacagctcccgctccaggtaagttggagttgggagctagagttgtgccaaacggggcctaagacagtgatgagctcctcctagtaattagcaagtgcccataagccggtcataaatgtgatccacgtgaaacaacctacagatgccacagatctcaccaccgcacgctccattgaatcatttgcaaggtcgcaattaatcatcgcagatgcatctgaagctgagaggcagcagctagctagcagctgggacctgcaggtgatggattcaggattcgcatatcgatcgtgaatgaatgaatgattccctaattaacccaaagtgttagtgtcagtgtcagtgtttaatttgttgctccgaagaaaagctagctcagccttttgggagctcaattcgacttgctagctactaatgacggattactgttgattaattaatcttcaactgcagtaatgcttgctagctagctagtagtagtactgtactcaactggtaaattaattaactggttacactttgtaggcttgtggatggatctgacgaggttgattaattagtaatttttctgcagaaattgcaaagctagatcgatcgattgatcgatctatcgagcacgagtggcacaggggatcagtcggtcggtccaaggtcgccatcagagttcgtcggttggtctaattacccaactgacctagtagcaaaatactactccctatcattttttaatagacgacgccgttaacttcttacatgtttgaccattcgtcttattcaaaaaatttacataattataatttgttttgttatgagttgttttattactcatagtactttaagtgtgatttatatcttatacatttgcataatttttttaataagacgaatggttaaacatgtgagaaaaagtcgacggcgtcatctatttaaaaaacggagatagtactaatctatagttatttgattttaattgcagctgagatcgatcgagtggtgctccatgtctcctccgtgagagatcgaaagcttcttctttattaatccttaattctgctcggccatcacgtcgtgcgtgtgtgtacgtgcagtaatggccggcgatcgatctccctgtccatgggtggattaattactctctttaatcttcttcttcctcctcacgtcgttgctcagatgataataattcgtggatactacgataggaaggcttagaaattagcttgaatttttatctttagaaagttagcttaattttcactgttgcgattcagacgatcagtgatatgatatgatgcaggtgttgtgccgcagtaagcggtaaccagcaattggttagttatcagttgacttgcaattaagtaggcagacaccggttaaactttttcgtgtcaggattattgttaggtccaatgccaacaaaatactactccgttagttttgtccatatacatcatttcgatctcgcatgctgtttattcggtcaaacctgtcaaaattttgcctaaacatcgcgacaatgaagccaatcaaatcgagcaatagtcgccttgattggctcttctgtcaatggacagatggagagagagagagagagagagagagagtttcagtacgtgacagatgcagatcgaattcgatcactttcatggaaaaagtttttgctgtgaatcaaacagatcatgcaggaaccaaaggatctggaaagaaaaaggatatttgagcacaaggaacagcgaccccaaccttatagcacaaataaagaaagatgcaagaacatggataatggcaggcgcaaggcgacttgaagaattccttctaagttaaccacaacgtttatgtaattttgtatagctcttttttgcctctaggagatgtatttttttacgcctatatctaatgaaatagcacaatctcgtgctgattccttaaaaaaaaacagatcatgcagattaatcttgagagttgagagctactcttactgttcatgcatgcacggatgcatacatggacaaaataaaagggactgacgatgcaaatctacaccactcaatcaattctaatccgagatctaccaaatgtgcatatgcagaacaatttgccatcgagaaaccttgaataattacagcgaaacagtttattcaggaaggacgcccaaaatgcatggcaaaacacaagtagttctgatgttttttttcatacattatctatgacactaacatatcatctgtaaataaagcagaatgagattatagtcatgcgtgtaatgtgtatgtgcatacctgtgtatgacaggctgacagcatataccttctgaattacgtacactgctgaatttcttctttgattaatctattgccttagagtccagattttgttcttttttgtattatctgttggcttcggcctgttagttatcaattgactacacttcattggtcatttggaaaaggaattacaataaacaatcatcaattaagctggctgctagctgcatgacaggccagcagttgcaggtagttccagaagtagtggcacacagacgagtagggaccatataccgtttagtttcagcaacattttgtctataatcaatcggaacaagcaacctgattaaaataagtgcagggctacacaaccaattaaaacaacaagaagacatgagactttggccatctctttgaacccacaaattacacgtgaaacaattcagtagattcagttcataaaactggataagttacaagcaagtttctgacactttgacctgaaacttgttagctgggcaagttcagaacctctcaaaaattacagtactaaactgatccacgtgataaacattatcaccaagaactcctttaaataatctccttgggctgtcggtgagcaaggttagcatcagcagcatggcactgatcttcatcgtccacacaagcatatcatggcccattattcagtacagtactcggcactgtgccagtggcttcatcgtccattgatggagcaatgcaggtgaacgatggtgatgatgttcaatcgctgtaccggcctgtgcatgcatgcgaatcattgaaggcgaaagaacccatcggtaagtagattgcctgtccattcttgacgaccagtagtaaatagcagccgtgcgatcctgcaaataattcaagcaagagcactggtgagttgcagagatcggaacaggaggcgcccacgcggctctcgtcagaggaagaatctggaggagaggagacatggcgctaattaggagtccagtagcagtgatggtactgcgagattagggttctaattagggtctggttaggccattgttgcagcaagttaaggtactagtttgtagtttgcagagatagtagcttgaatgcatgaaggattgggtttttcagaacttgaaactgtgcagacaagttagaaaacgtgtgagatgtttggaactgaatatggcccgagagatttttgtctgaaattcttctagggtggtttggtttgacgaagtttgtggaactagcagcttcaatgcatgaagaattggtttttcagaacttggacaagtttgaaaaatcatgtgagatgtttggagcttgaatacggcctaacattatttgtccgaaatccttccaaagtgtctgaaaatttttccaagatacagcctaggttgtacgtagattcttcctatgtgtggatggttgcgaccttcaaattatcaacagcagcggcgtgtagcgtactattggttgcaagctaccgggcgttgcaacagtcttaacctatgattgattggcacatggaagaacaatcttgggatctcatatctgagtatatatatattactgcaaattagttaacccattactaatccatggctagaattgggctatatgttcttctcggactctcccgacaaaccgattcaggctccgcgttgaaatgattagacacaaccagcttagctagctcctaattttagtatttaaaatgaagatgaattctgcatgcggctacctttgctgcttaatcatttgataggctgtttgtcaatctgttctgcacttctgcctcttctttttctggcagctccattatttgcatgttgtcttatcaaccgcattcagaatttaaattttagaatttaattttaagttgatttttatgtttttttcatcgtagtttgttttataatattggcttttcaattggtaaaaaacaccgatatgaaagttttatttataaattatttatattactactagtaatatttttttttctatggcttatcaactatagagcaaactatattctttgtgggggagaaaataagaagcagccaagactggttgttgattagcaagggccgaacgtaagggcacaaaaagattaagcccatgaatgcaagatgagctaatattgtcgggttaaatatatttgggccttttctagaaaaagaaaaggtatatgtggacctcaacgcgcaggcacattgaatagtgggccaaagataattggaccgaaaggcccatgggcttcccttaggcaaaaggtaattggagctgacgattgccttgattgtcctttagccatatttatgtggttttacttttatataagttaaccacctccaaaaaattttctagatagaaaacatcaattttaaccgtcaacagatatctacatcacaagtatcacaaaatactattacatcataggggtagaatgtacgtgtgtgtttacatagataagtgtgtggatgttatgagcgtatgtgtttctacgtgtttcttaaaaaaaaaagaagaagaaaaaagcttgcatcatgggtgcatgttggtgagccaacagccaagtagcacaactgcaaaagattccccttttagatggacaaatgacaaacatcaacaggttgaatgaagttcagtggatatgatttcattttcgtctcaaccttcaaccaaagttatattgtccatacatccatgagccgtctgttgcagcgtcgaaaaggcataaaaatcggagcatcatatcgctgaaatgaaagaaaatgactccagtggtcaatctccacacaaccattgccaaatatgttatgttccttgaagaaaacaaataatatgcatgtttaagcaggttaagaaagtcatctatgtaaggtaatgtatatattatactcctatataatttgacttgcatgaatgaacagccgtcgccgattttcctcgccggaaacgaaccaaaactggagcagaagcccacagaatgtcactcaaaactgcccagaatacaggagatgaagtcaccaaaagcaggttttatcatagtctcatctgatgagactgacataactgcgtaaacaaaacgctgatcgaattagtcaaacaaacaaaatcagtgctttaccagtgtagtgtcaattctaaaactgcaaagtcaaaacctttcaattatatttcgaccagagaaaggaggacacatgaagctgcaagtgagatcgatgcaattttttttgaaaaaaatctcaagattgacttaagaagatggccatctcaagattgggctaaaataacatatagcccaattcggtcgtctgcattataggagtattatctgtgccaatgtcaatgcacctcttgtcaaaaacactaattttcttatcccaaaaagattgtcaaaagcattacgtatacatggagtgataatgacaccatggtaataaactagtttacttgtggagtgttgatttgcatgtatactatatactccctccatctcaaaatgtttgacgccgttgacttttttaaaaaatatttgatcgtttgtcttatttagaaaatttaagtaattattaattcttttcctatcatttgatttattgttaaatatacttatatatataatacatatagttttacatatttcataaaagtttttaataaaacgaatggtcaaacatattttaaatagtcaacgccgttaaacatttagagaaagagggagtaatataattgcacacaagagagatactcttgcatgcatgcgtacaaggagatcaggagatcccattggaagatcgatactcctcgttatttctaatttgactggttccaatgcatcatcatcgattcatcgatccaatattgtggcgtcatttagctagcaaggggatcgatgtatttaattagtagtcaatgagcaagatataattagtactctactattattttgtctcctaaactttggggttaagtgcattttgcatctttgaactcttcaacgatatattccaggaagatttttcttataaaatatgctttgtttataagcaaatcgatcatcagcatattcgagtcgctagaagctagcatttgcagaattgcaggactgcatatatttacactgctgccccgtatgtttctgcaggataaaggtcattttggtcttccaaactattttgccagagcacttaacccctgaacatttttccagtttatttaatttacacctcgaattattgaaaacggttcaccttactttataatgctatttcttttttttttctctctgtataagtcaccatttgcacaatattttgttaggactgatagagacgcattttaacttacctttaaacatttttagatttttttttcacttttacatatgtaggaaacaagaagacgggtgtaaacatcgaggttttaaattttaagcaaataattataaaaaaattgaaattatttccaaattttgatgatggcatcatctatggatctaaaaagttttagcttaaaatatgacttgtataaaaaaatagaagaaaaatgctattgaacagtaaagtaaaacaattataatagtttagaggataaaataagccaaaaatagtttagagtggtaagtactccaataaaatagcccacgggagtaaaatgtacttttttttattattagtttgtgtaaacaactaaacacgattaagcttctctactactccctctatactcataaaggaagtcgtttaggacaatgtttaagtcaaatcttgggaatataaatcattaataattctcaagttgttgagtttgaaaatgtaaaaattatatgaatagatttgtcttgaaaaatactttcataaaagtatacatatatcatttttcaataaatatttttatagaaaaaagaagtcaaagttatgttttggagaccgtgtcgctgtccaaaacgatttccattacgagtacggagggagtacctcttaattagaaaaatacactacctccaactttccaagtctctgaaagtgtgcaagtaatgtgcatagactcttgcctgtagaaagaaaaaatgcctagtggcagctggtgttgaactgttgcaattaattgccacaatggatggaccttatgctgttgcgaagagtcctcgtcaaccagattaccagcgctttgcacaatcatggtcagcactagccaagttgctgttgttttgatcattcttgttaagatagccaaacattttttctagtggcaagttgccctttcagatatgttgtctgttgttcgcacacggcgacctcgcattccttcccaatctcttgcagaagaacacattaaactagtaaccaacttgtaattgcactgcagatccaatgcatgcagaatgaaaaaacaatgcacaactgtacaccctatgcagctagctgtgcattctcaagatatatcatgtatatgtatatatatagcagatataaatctgtaagcttcagccaagcatggaattatggagtagtactgtaagaaaatgacttagtgatgagtccattatttcagtaatttaagtattggttcttatccattatctaaaaaaaaagtattggttcttatgccatacacttatactacagagaagaaaaatcttctcactttgaaatacagctcagcgtgcaccatgacttatattgaatacagatatgttcattaagctccctccatctcaatttctcattgttttagcatttaaattttttatcaaaatacttgccattatcacatttaaaagcatttttagaaatgtctgtcccatcctacccttcattatctatgcagtcatacgtacgtactagttctcctcacaaaaaaataattgttaatatggaaaagatgattatgatgtaattaatgaggatagcaacgtaatttgtcgcacctcttagtttaatatgagattccctaaaacgataagtagatggaaatagatggaataggatttaccttgttatatgtttcatagcttatttctcactgatatatgaatcttacgggagagatgatctgaaaaaaatgtcctaacttcgaagtaagtcggtaacaaattcccagacgatgcctatatggtatgaaaggaatggtcggctaacatccaagctagtcactaacttcgtcaactagcttaatgtgagcatgacaaatcagaggctaggaaacaaaaggttatctcagatgatcaagaaccaattggctggtcaagtcatcctatcttttccatgatattgtacacatctggttaatgcgtattgaattcatgacttgaaggaataggagctatttgtgcaaatctagctacctgccatttgtttaacatgtgtttttgttgatttgaacatgataagaaataattatatatggagataatccaaaatataccattgacaagagtctaattaatttcacgttttaccctcgactattgcaagtttctgggaatacgaccatacaaacgtcattaaacgtcattgtttaaggagtgctattgtcgtcactgttccattcatgggctttcgttagccacagtggaaagacccgtttgtccttgtgaaggctgtacacaatgtattgtcctacttattttgataccgttaaaattatctttcagagttcctctccacgcaggcaacccctacgtgtgtgccgtcaccgtgactttcaagcgggttgtatgccgcgccaacacccgtcggccactccgccagacagcaccactgctgccgggggaaggaaagatctacttttctttggcccaccaaagtctttcccaaatttgctttggtaaggtttgtgaccttggtctatgacaatgagggcaatttggttattaatttggataaaattaacatttgctaacagaaacccatgaacggaagggtgacggtgatgacatttcttatataaagatacctgtactaccgtattttcttatacttacactcgctgatggcaaaacgtaaaagagaatcccttatatgccactagaatttgaccagttcccttatatgccacttaaaattggcttctctcttatatgccactagttcaatttttttcacacttttatgccactcccaccactatagttttagttgactgttagtcaaatgttagttttttttcttaaatgaccaatataccctctcaactaaaaaatgtgtaaacttcaaaaaatcataactaatttattttaaatcctttttgagtaaacaaaattttgttagaactagtgaaaaatgctatttatattaaaaatattattggaaaactgcatatttcatgcttatattgaaaatttatttgtgatggtaatggctaaaattgcatgtgatgcagaaaaaatcaattttcatatgttgtatcaagaagctatattagtactaaaatacatattattggttgtatactaattctcaagggcaaatgtgtccttttacaataaagttaacggtcaactggcggtggattgacgggaatggcataaaagggaggagaaacttgaatcggtggcataaaagggagaagccaagttgaagtggcatatacgggagctggttaatttggagtggcatataagggattctctcaaacgtaaaatcagatgcatgtcgatggcatttcttggattttctattatgcatgactcttgttcttcgtatcctcttgtattagactagcacactagcataaagccgtcagagttgagttcctaagcataaaccatttgggatgaccacaattctcaccataggttccgttgttttgagctaatggacgagaaacgcccaggggtcttccggctagctccacaaggtggtggactagacgatctaggttcgaagcctcaccccttttaattatttgatattaggtctttccctaatattcgcgtttttgttttgagctaatggacgtaaaaactatatacattactatttcttagacaaccatttctaatttatttgttaactttatactccctcattccctaaatgtttgacgccgttgacttttttaaacatgtttgaccgttcgtcgtcttattcaaaaacttttgtgaaatatgtaaaactatatatatacataaaagtatatttaacaatgaatcaaatgataggaaaagaattaataattacttaaattttttgaataagacaaacggtcaaacatatttaaaaagtcaacgacattaaacatttagagatggaaggagtaatatattttatcagctagacagcttattcgaatagaccttaagcaaaaccttttttgacgtgactacttttgtggaaaagttagacaaaaacttcagaccattgaaatgttttgcatccccatcatcttagcttttggatgcacaaccagtaacctaaattctagagacagaggttgacaactgtattgttattggagatgtgagcccgtgattaagacagtacaaaaatcctctccggccgccgcaaaaagcccctgaaacttgcagattctccagtcaataatgtcttgtctgcacatcggccgggtcagatcgatcgatcgaaaagtctctcagcaaattctccaagaacatatgctcgatcgaagtgtcgaacacctgtgcgctcgatcgaattattattccttcacacgcggagaagacgaagcaatggaggagtacaacgtcgtggaatcgatcgatcgatcgacggcgacctgacctgtcctgcgcatcgatcgatcgatcgctgcacgcggctcgcgatcagccaagtggacttacgccgtcagttcgtctccaatgccaaattgccaatcaaaatgcagttggatcgatcgatcagttcgtaactcaaagcattccagttaatggggcataataagccaaccaatcatcaatcaatcaatcatgcatatgccgtgctgacgctttacacgaccgtgcataatcgatgattagtgtacggttaagtactcaagggagcagccatctctacttaattggttaattatagttagcagcagctgaagctgcgctgtactgaagtttcccttgccgatgtttctcccaacaagatctcccaatgcgatcagacacaggtaattaagctagccatgcacgcatgggtagatgtgtgatacgcaatgcaacaaattaaactcgagatctgctgctactgatcggtgaggtttgcagtggttggggaggaacagcaaatatcaggccaacctggcaattcatattcaggcaaattggcgagacgagacaggggaatatatttgccgggttcctgcgttgcctgggtgtgcctacgtgtaactaacgtgttggtgctagtgtggttgctgcttgctgctgactggtcgggcgagagatctcttttggttcccgtgctattcttgtcgcgccatggtaggctggcatgggaaattctgtcgtctcgctgctgcaagctaggccgtgtcagcagaggttgagccggaacagatccaaacatactggagaaacacaagtggtgtggtgtggtggtggagttatggtgcatatgacttcacccatcaaagtttaaatcatggtgtccacagatattacgtgcatataatatgtacgtgtgcgtctgtactctatcgtataattttgtttaaaaaaattcaaacatactccccgtccaaaataaaaaggcttatctcttaaaaaaaattagtaagaaagaaagaaagtgtccagtattaataagaaattaagtagagtatcgatgggtactaagtagataacatatactcctattaaatagacaaaacttatccatttatatgtttcttctatccaaaagtattaggcatatttttagtttttagtttttctaaaagagatgattatatttatagactatagtttctatatgctagatcataacctaaggaatcatctggcaatattcatttgttgtatgcatgtataaagttctttgattttgttacatgaggttgagttaattcctccttgattttggtgacaaagaatatatgtcttgcatttttgtcgggagtactaattatgattaagagtgtaatcaacctgttttgagataaattttgaactctaaaaattaatttattttacgaaaaagagagtagagcggaactaccatattcattaggctaaactccaaaatttacatataatttcctactagcaattgacatcggaagtgaagtgttaagtgggtttattcggttgaatacggaatacccatgttttagaaaatagctctctatttaaacttaaaactagcgagatatatcttattttcatcactgatatattatagtataaagtttgaatagccaccatcaaaatctaccacacgcctctagccaagccgccaaggtaaggatggactcaacattcaggggttcataaatacagccacgcaagtcaccggagatgggaggggagatgccatggcagaaacattgttgggtaataggtgctcaaatttgtccctttttagtgtgtagatcaagtttgaacttgagtttttgtggagtgaagaatatcactctgcattgtcaaatttatttttgaaaattttcacagccattcattcatatttaatttaagaaaaaagaggtatatgagggacatgcactcaagtgactaaaatccattttatatccaatagtaaaattcattgacatggtcatactgatttaatatgatcattgccaggacactcggatttgacgttgtacatacatgatgcgcttccaaaattaagttacatcgaaatgatgatctcaaccaaataatttttcttatcctaacatgggtggttccttatagaagtgctatttattcgacgagggtgaccgattaacgtagggttgggttgacatttatatttggggctttattttccattcaaccatggacctttctggaaaggattcagaattgattgtagttttgataattacagttcaaccatacggtatataaatgaaaagaagtcaaagcaaaactgaaccacaaaagtcaatcaactaaaaaaatgtccagagtgatatgcagttaggatatcacttgaacaaccagatggggagcatggcaagtttgttttttctttttcgagggaatggcagtttgttgctgcaaaatatttttcaatttagaaatactgaacccctgttggatcctagtccttactgttactgtaacagtaatattttagagttttaaatttttttaaagcaataataaaagtaccaagtgtactcatgcgtagggaaaaaaatcacagcaagaaaaagtatccattattaacaaaggagttatgtaatttttttgtaggaattttacatgaattccctaggagctgagagacgatttgatctcatgatcatctaactggagcataaggagagaattaaccttgaatgagctagaccagtcttatctgtattaatttgtcgtctctccaacatgtgagagagacaaatttggttacaaaactaatggtacaatagataaatgaaacaagtgtatgtcaccacttaatccccataatataactacctttgcaactgataaatatgttttttttaataatttaccaaaaaaattacttatacttcctttaatcaattaactaactaattaaccaaattaactaaaaattattgctgttcttgctgctggcagctagcttgttgctttgttccattccacgtgtccatgaagcggcttatcctgtggagtgcaagatccagcgtgtccaagctcatgttggcgaagcacaccctgaaccagccggcctccgagcaatggcacgacgaccccggcgagatgttcagcttcgcctggcgcagcagcttctcccacagcctcagctcgccgccgacgccgccgccgccgagcagcagccgccgcatgtccatccacacgaacagcccagcattgccgcgcaggcacggcacgccggcgcgcgccagcccggccaccacgtgctcgtgccgctcccggagccggcggcggttggtgcggatgtactccccggcgaacgcctcgtcggacagcatcgccgccagcgtcttctgcgtctgcgacgacaccagcgtgaagctcgacatccgccgcgccgccgtcacgacggcgtcgttgtaggagtagaccacgccgacgcggaaccccgggaggcccaggtccttggagaggctgtagacgatgtggacgcggccggcgatgccgtcgccgccgcgcgcctcgacgagctccgccacgctgacgaggtccggcgcggcgaagacggagccggagtagatctcgtcggagatgaggtggatgtcgttgcgcgacacgaagtcgaggatgtcgtcgagcatcttgcgcctgaccgtggtgccgagcgggttggaggggttggtgatcaggacggcgcgggcgcgcatccccaccgcggcggcctcgtcgtacgccgcctggagcgcggcgaccgtgacctggaacccgttcgcgctgtcgcaccgcaccggcacgatgttcacccccgtcctccacctcaagtccctgtcaaacctgcacgccatggatgtcagctcagcctgccactctgctcgatcgatcccaagctagctagatgcatggcaatggcaatggcaatggaacagtggcttacccggggtagtaaggggtagggatgagcagggcgtcgccggggttggcgaggatgaaggtgaggagctcgttggcggcggtggcgccggcggtgagcacgatgtggtcggggtcaaacctcgccttgccgccgcgtatcttccccatgaagctcgccatcgcctgcaagcaacaatggtggccaagcaagccgccgccatctcgatcagtccaccatgcatggcgttcgagccaagcaaagcaagaattgcaaactctctctctctctctctctctctctcacgtaccttcctgaagctcttgaggccatggtaatcctggaacagcgcgttgtccctgaagctaccggcgccggcgccgccggtgctccagccggcggcctccgggtggtcacggaggtaggcctcgaggaggtcgaaggagacctggttctcggcgaggcccatctgtatgacgccgtcggggttatcgacggcgtggtaggggtcctcgtcgtaggccttccacccggcgaagtacggcgagtcctcgccgtgcgccgccgacgttgccacctgcgacagcggcggcgccgacccggcgaacgccgcagcaggcaacagcttgccacccatgatgttctctctcgttctctcagactgaattaatcttgcagtgcaaaatttatatgcaatggcagtgtaggaagcaacactgcagtacaagaggcaatcaagcaaattaaggtttttgggtgtgtgagatgagatgatccaaggttccaagtgtgggaggggtatatataggcaaatggaagtatatatacctatgtgaaaaccactcatgatcatgtgattgagatgtcagaggctgctcatagctgtatgcatataggagggttcactgttgagagatgaccggacttttttagctttcagaggattaaagaattggagctcgagcttgaccaacctatactaactactaagcttgatgattctttttgcccaatgattgattgctcactctctctctctttctccctgactgacctttcagtaaaggaggaagttagcaatacagacagtgtagcgtagtacagctgtaatcagaaattcagatcgtcgtctgcaaattaaggcagcttccgttgtcgccattctccggctgatcgaagaaattcaacagatgcagcagcagcagcagctcaagccgtcaagcccgtgcgatcgtgtctacaggtgttacgccttatcttctcctttaacccaaccctttgtttaatccaggctaatgcccacgtcgtcatcgtcctcttcatcgtcttaacaaaaccagctaagaaaaaaatttatgactatagctctgttaccatattaagttttaatttatcgtctgcaggtttgatggttatgaatgtcactcggagtaaaggtaacgaaggcatttaaatattttataatgtgtttgacctccaaatgccagcgattaaacaaggttattcaaccctgtaaccatggacgacttgtctagctagctatctcgagctgtacgcggggctaaggattgcactgaaattaatctcatatttaaacaaaccgatcagcaatactctgttgagatgccaatcaaccatctctccctcgaattaagaatcaacatatataaggatggcctctgctcaccgattacgagaccagccatttgattatgcacctcatgatccacgaaagtactatgatagtacatccgttgccgaatcattgcatgttgcaccgcgatatatattcacaatcttttttcagtccaaaatcctgtttgctatatatattttgaattatttaggaccattattagttatgtattacaaggtgttttagttttatcgtaagttaaacttcttcaactttatcataggtcaagtaatatcgacaacactaaattaatttatttaaaaccaatcatcaactatatcttgatgatgtatttatttggattatcaatgtcctgggtaaaccttccattcataaatataacgtggtttacacataatgtcaataaccaaattttaacttaaacatcagatacttatgactgaaagaaaagaaaaaaaatctctttaataaaatttatgtctcgtgcagaatacaatacgatttcatctttcgtttcatcagaaaaaatctgggacggaaggattcgaacctccgagtaacgggaccaaaacccgctgccttaccattggccacccccatttcgggttttatgcgacactaataaacagtattatgtttatttcttattcgtcaatcctacttcaattacataaaaatggggggtattctcttggtaggattctagacatgcgaataatatagaatccaaaaaatacattgatcattacatggaattctattaagatattatatgaaagtcgaatttcttccactctcatttgagagtacgaatacaaggaggtattttgtgtttgggaaagtccgtttgagaactctatccatagagtagtataggccatactttctttcttcctattttgattctcgtgaagtgtcctttcttcctacagctgatagggtaaaatcgttgttttgacgatccctatgtagaaagcacccttttctagtaaatattagaaaatttgatcctttcttatttttctttctatagtggagatagtcgcacgtaatgacagatcacggccatattattaaaagcttgtggtaagaaggggtttcgttctagtgcccggaaataatattccaaagcctttgtgtgctctccattgtttgtgtgtataaggcctatgttatagagtatataacttcgatcatagggatcaatttctagtcgcgtagcttcataataattttgcaaagcttccgcataatttccttcggattgagccaacacagagtaaaatctactaaaagtaccacaaaaaaatggaatttcatcaacatctgaatttttgtatatatattatttattttattgttttgtatctagcaaaattgtagggtagaacgacataatagatcctggcttctccatttaattcagagaaaaagaggtatttttgttcatggaatattgatagagaaaaaagccgactatcggatttgaaccgatgaccctcgcattacatttatagtgtaatgtgatgcctccggtactacttgaaccgtaaaatttctcaacattgaaatattgtttgcatgcttggaaaatgcagcgtataactactccctccatttcaaattgcttgtcattatagctttattagtttatcgaaattcctatagtttaatatcataaaattcatgtttttagattcactaaaagaaatatatttcatgttgttaactatacgaatttataataattggtcaaagatatatcgtttgacttaggataaaattaaaatgataattaatttaaaatcgatggagtagcttacttggaccaaacctgtcattaaggagtacgaaactttattacaacactgaacctaattgaaaaccagaaaagcttcaaaacctagcagctggaattggcacaagaatggaaacaccgcggtggttttgcaaatcagctttggcagaagaaaagagaaaaccacggaacctcttcgacggttttgggaaattgacatgttgtatatttaaatattccgccgtgcctgattgaaaagcaacagcaaataatcgacaaaaattaagtggctaaccccacgtcagcaacataagcatcaccggcgttggtagcactagaaaatggatggcagatttcggcaatgtttgatgtctccttgttgccatatatggttgcacttttgggggggtaattaaacataacaaattgtagttaggtgctctggttagtttaattcatgttgccgtttaaaatgtccatatgcaacatgcatggtttccttagttagactttgagaaaaaaaattcttgagcattatattaattagcaaaattattgttttcttaagtaagctaaattttgtgcatgcgtgtggcccttgaaaatgtaaaggtaatcttaatcgtccttgaagatcttgtttatttaaagacaaaaaaaactctttttttgcagtgtttttggtgggctctgaagggagaaatgtggattagtctaatgtcagacaacaattcttcaattaatccctgcagggagcatttcctaccttataagcagaatcaaatcaaacatgacatctctgttaggtgagtttccagctgatccctgctaattccctatggatccaattgctagcttgcagaatcagatcatgataaaaagtttcttgattacaatctcatcttcttggcattacctaagatacattacagattgtcagttaggtgccggaggagtctacgcataattttaagcaagaaatgcattattattgtacattatgtcatgaagagattggctcaaacacaagctgtgatgtactaacaaagctgagtcttggagacacttggcagagtgcatatacgtacgaaatacgtatgtaaagaaaccatcgtataaacatatatacgtcgtacgttttgagttccagtcaatgtgcaaagatgtccatcagatctctgcatgtccattaaattggagctttgacatgtacacttatttagcttgatgccatgctaattaatctacagatagataacattaggtttaagataatgccataagcatcatcctctctctgattgatcagaccagtgtatactccaacagaattgtatatgtgctcatgtgcaccacttttgagaacactagctagctgtctggtgtgccgtgtgctacccaaaaggcaactacgacagagaaccagctatgctacaactttatgtatgcataatgaaatttgacaattaattagcacacgttggtggagtagttgtttacatttgattgtgtgattcagctggatcttacacactacagtacaagtgcagcacaccacttcagagtccagcaggcatatgatgttcctgcaaaaggagagacaaccaacaaacagagatgatctcctatagtaattaacaagacaattatacattattgtgctactgtcggcaactcggttaatttgtttacgtatcagacaatatgcagttcatgaacttggtcacttcccctttgcttggttaaatggaagtattcgaggcgttaacaagtgaacaagaagacgagcaccaagtgccaactgatcctataacttgaaacctgaatcggcgagaacttctgcaaattgcatcctcagctgcagtaaacatcgtaataatatttactgtaattttttatttatagataacggaatggaacctaccgtgaaagcagacggtcaaaaaagaaaaccagagagaaacgtgtcacaatacaaacagtatcagggtctcatcggatggtttgtttggctgaggcttgggcttaggcttttcagccaacacagaggggcccgcatggaagttggatcatatgtggtggctaattctaggaactctctagtggctgtacatggaaaataaaaatgccaataccacaaactaggagctacaagcaccggacataaaagatccctcatccaaccaattaaccaattaacccaaccgatgaaatggctttgcctgaattgaaaagggcttatttggctgatcagcctaagaatacaacttaccgatgaggacacacggtgtccttgtgcaatgtctatacgtcgcactccatctttaccgtgatttcagcacgaagtttttcccccaccttctgcagaaatggcacatccatcctaggtgttgtttatttcactgaagaggtagataaagttaggccatgtaaacaagaaaattattagcgtataattaattgatttttaattattcaaatttaaaaaataaatttatgtaatatttcaaaatgacttctatataaaagtttttgcatacaatgcaccattttacagttaaaatacgtgctaataaaaatcgaggtaaaatctgtgttttaatcagaacaactcactagactaaaaacagctatagagaggaggaaaaagaaaaaaaaaagaagaaatctatccaccacaaaagcatcacaagttgtctcctgtctttgtacaagaggggtttgcgatatatttcgcgggacaaagagacattggagactttatgttctctttccccaacttggccaagtggggttcaacatgtcggcgtaggataggaaatgcgatgtagtcctgtgtggcgactctccccggagacggtgatcgatggatggatacagcgatgaaagctgagtagttttggagacagatcgagaggctgattcccgtacattggaccgtggcagtgcaaggcagagcagatacatgaatctgattacgatttacgagttgccgatttcgtagctctaatttgcagccagccactacagtgaaatatagagaggaccaatagatgatagcagctgcagcctgcaggctcaactcctccaattggtcagataattatctcgacagaatgaacatggccagattcaacctgaccctctcccgcgacaccgcgaggccacaaaccgatcgaattggagggatattgggaggtaaggtggagcgagattcattcatcgccggtgacctcctagagggccttgaggaggaataggcattagggcgtggaggtggatggacgtacattaccattaccactgtcgatcgacaacaaggccaagattagcttcatgtatgaaacttgatgattcatagatgagggacgttaaatgtactctttccatctttcgatgagtgtgggatgggtgggccgtgatgggcttttaggtcaatctgctagcaaattactacggtttcagcccaatacatataaatgacttagggctggttttgtttgaagctaaaacttatcacaccaaaatattggtatttttaacggtaattttggcaatgtttggtttgctgccaatactacacaaaatgttgtcaaaatggtgatgctagcaaaaacttgtctatgttttgtattgccaatattttagcatggttataaccaagcaagcctttgtagattttgagctcctcggatcgtattgtatgtgctagtagcccaccaccaccactactactaccacttatacagtagtcataagagtatgtaggccccatttgtttctgattatgatgcacattttagctcggtttttattagcatattttttaaaccgctaaactttacatttcatatgaaaatgttctaattgctataaaataccaaataagtcattttttaatttttataacaattaaaacttaattaattatacgctcttacgttaccctacttaattctcatcttcgtctgttttatcaatttagccatagtgcaatactcagtactcaatcatttctattataattgtagttgtgagtttatgtagttcactcctagtactctccgtcctaaaaaaacaaaccatgggttttcgtgtccaacgtttgactgtccgtattatatgaatttttttataattagtatttttatttttgttagatgataaatcataattaatactttatgtgtgacttgtctttttaaattttttttcatgattttttaaaataaaacggacggttaaacgttggacacggaaactcacttttttttttcgacggagggagtactctctaagccgagtccatgtgcgcgttcgctgacacacgtctccaacgcaaaaaatggagtactcctaccggtagaaatgtacagtactcgcagctactcctgcgatactgcgaggtagcgaaacgccatcgtacgcacgcgccggtcgggcggccgatcaggaggaggcgcgacaggatgggacgcgacgcgacgctcgcgcacctcggcacctgtatatccggtggtcggcccgtgcagccaccgcgagcgtcctgggaattcttaaacgttgccacgtctctcggacaagatgggaataaaatttttttagtctctatcatattcagaatatttcgacactaattataaatattaaacgtaaactattaataaaacatattctatatcttgaactaattcgcgagacgaatctattaagcctaattaatccatgagtagcctatgtagtgctacagtaaacatgcgctaattatagattaactaggcttaaaaaaatttgtcacgtgaattagctctcgtttatgtaattagttttataagtagtacttcctccattcctaaatgtttgacgtcgttgacttttttaaatatgtttgatcgttcgtcttattcaaaaaatttaagtaattattaattctttttctatcatttaatttattgttaaatatacttttatgtatacatatagttttacatatttcacaaaagtttttcaataagacgaatggtcaaacatattttaaaaagttaacggcttcaaacatttagggaatgagggagtatatgtttaatactctaaattcatccgatatgacatgggactaaaatttagtccctgatttaaacaacatctcattgcaacgatgttactactactcctgctgtaggagtactcggcatggcatatgcagtttgctctttgtcttgcaaacctggatggcctcctccatcgttgtgcaatcggtgctgcacacaactcactctgccgcgtcctgctcctgcatgaggtctgggagtgggagggagaggctgctgctgccgctgctgctgcagaggctgcagctgaagaccgggcactcaggggaatctgggcggttggcctcctctgccggtggcagccacagccacaggagtgcagccgcaaactgacaatttcctgcactccactccactgatccacagcatcagccagccgttgcccagtccaacccctgcactttgcactgcatctgcatctccatctgcatgccacgccacgacgtgcctgctgcttggcttggcttggcttctgttgccgtttctctctgctgctgcgacttgccaaacccaaaccccagagacagagagagagaagagagagctgtgagattggttgtatcggactttgtcagttgggcaggagcatatctgtacgagttgatgcctctccttccttgtgtttcatggcgtgccctgcgactccagactagctctacagtagtagtactgccctccctcttgtctgtctcccggcccagcacgttcagatcatttcagttaccactcgagtaagagcaagtttaatagtatccagccacatgctctaaatcatctatagttaatttaatagctaataaatacaatagttacctataacatatagtacacaattaatacatagtttttcttatcatacgcacatgtatcttggagcccatgctacagctggctataaatctatagcccgctgctcttctctctcttcttttatctttttaaaatatatttataactggtttgtagtctgctattaattgtacctgctctaataatcatagatcaacgttccttctatacgccgcttttaacaatacacagcgtacactacaggagtattactcatgtactccagttcaccattctgcatttgtcttctcctgctctggtgcccggttaactggcctaatgtattcctatggaaactaaacgacatgcactgctaaatcaatcgtggcatatctaatggagttcaattacttccacggactaaggccataatattttctgattgagacgtagatttcatcttgatattttagcatatgttttttagactcctatatatacaatgagttttagtaaaaacattctatataaaagatggaataaaaaattttaaagtctaatcatacattaataagttatctcgttttagtcacgctaaaattctactattatctttatcgaaacgtacgcttgcggagtacgcgcgggatgaatgtgggcaaaacacgcgattcacggtacacgtaatagccactcctcatggttgatgtatgtctattcgatcactttgagtactgacccctgatcactacttcgattctgacccggcaccccttccaatcgcatactacaccctacccaccgtgtactaatcgcggttgctctattaattcaaaacgagttttacacggtgctctgcaatatttcccatgtgattatatatatagcattttggcaagtgaataaaattgttctcttctcaaacacgtaaaaggtttgtacgtcaattcattaccaatagtaaaaagcaccatcagacccatcatttcggcgtacttgtaaacggaaaataatttgtgaataaaacttttatatacgtgtcttagcgatctaaaagcaaaaactgaaaataaatttcgatgaaaaaaaccccgaaatcaactctggatttaacgatcaaatattcaaattttagctgataaatataagcataagcaaaaagataaacccacaattctatagaaagagtagtaggagactaaaaataatgtggtattacttgtaatacacccatcatgttgttgtgatgggcttagttagcactaaactaatgacattgattgcattggcaatcaggcactgacacaaggatccgtatcctttgtcctatagtgcagtactcctagagaggtgaaggagagaagagaatcaaacactgatcagccatagctgccgcaacattctgcagcaacccaaccaacaaacccaccctccgctttgactggcggtttcatttcagcaaccctgcaagccgcaacgctttttgtcgccttcccaagaatagaagtccggaccattcaaacccagtccagtctccctctctgccacctgcccccacctgtccctgctgccacactgcgccgcgacgccatcggagagcagctcggagctcagagatgcttcttgtacatgtcctctcgctccatctcttccacttccacccaccttgtcttcttcctccacctcctactacttatttgcctcatcaccgagaacgccagtgccaagcttctttgtcttgttgcgtttcttgaatcttcatctcttcttttcttttctggtaatggaggtggcggaggggaggacggtggcggcggcggcggcaggtggtggaggattgggaggaggggcgaggacggaggcggaggggttggcgtgcccgaggtgcgagtccaccaacaccaagttctgctactacaacaactacaacctggcgcagccgcgccacttctgca

SEQ ID NO: 9822 - DNA, 15499 bp, Oryza sativa
ggcgcggcagcagcgacgcgacaggcgacggcgtcggcgcggcggcagtggcacggggctcgggacggcgtgcgcgcggggcagggggagggttagggctagagaacgcgatcgagcacttagagcgcaatgaatagtgccattttctatttaacccgatttaagcctatttatttatttaaatttgattctataaacctaaattttgtataaatgaagttcactcggtatttgtgttattccaaccaatggatccatccttgactaattttacccatattttatttttatataattttcttgaatttaattagggttaattcttattccatcacatttaaatttaattgttacaaatatggtcgtaataatattttacttatttctatcctcaccaaatcttattttaaattgaactttaattatttactttgtcaatttacttttagggtttattcctaattaattattcattattcgtgatttatgaactccgaagtcaaaataaaataaaatagtgaaacaaaatcggcatgatgcaatttatttaaaaagtttttgaaggcctatatttttggagtttagatttttgtcggtctaatttttagggtgttatagtagacttgtgaattttggcccaattcatcgtgttaattctgagtttttatcccattcatgcataagtctgattctcgacatcgtccgattgatttaacgtctgagttgatgtcgattctcctccattttatgcttattctctacaaaaggttagtaaacctaatactagtggaatattattattctaacatatatatgcattgtaagcatcactagttctcctctattttggtaatattgatgggcgaaactgatcgataacgaccgtcaacagacatattatctattttgggtataaatatgtacccgacaccctctaaataattaacaccatttcaatacactttcggcacatcgccaaacctttctattattttatttcaatgagttcttgctttcgagttgggctgcatcgacttcgatctccgacaagaggtaaagcttgttatgggggcttgcgttctcgggatcagtggttacatctttatgacactataatcttgtttatgtaattcgtcgagttataatatatattgactaatcaaagttgatattttaatccagtccttatcggccgatctctgtttagggttctatcgacattgactagaatagttcgtcggcttagattatgcaatgtatctaccatcttggagaggctttcattggcttgtttacctaaatcataagtttctctttatacttagtgctgcatcagttaagtttgatcaactaagtcgtatctagaaacctaatatttagcttgcttcatgattgctaatagatatagtatcggagttgcagctgatcttacatgatatatctattttgttttacttaacaagttatatctgccctttatattaggctctcaatagatttaaatatattaagtttgtcatcgatctagttaggttaatctaacgtcaaattgatacttatttaacatatttacttcaaagtgatatcctagtatagagttatatcggagctatagccgatatacttctaaatttgcctatcggctatgacatgagcttgtataatttatagcttgatataactttagatataaatgatttatactgtctcggcggctgtccaatctatcccaatcatttcgtttaaagttatattgattcatagattatatagtgctgatttctccaaccgatagagtaagtttagttactttctttatcatatcccttatagccaatccgactaacattgcatcgcctaggtcacagacgatatgtcatcggctctacgaccgataggctatcgtttatggatttaactttctatctttatttactttctttatcatataccttacggccaatccgactaacattgcattggctaggtcacagacgatatgtcatcggctctacgaccgatcggctatcgtttatggatttaactctctatctttatttctcgttggttgtaggatcaaaccaactaacatgccctgaaccctgaaggcaagctttggacctgcactagaataaagcaaatctcttatatcagtgtgtgtttttttaattaacaaaagcgcgagatcgtgcggtgtcgtgcgatgggtacacgataccgcggtctcgcacgacaagggtatgagagaccgtgtgaccttgcacggtaagtatgcgagaccgcatgagtcgcgagattaatggatcaatcagcatcatcaagaattaattaattaactattatttatttaattagcattattagcaattaattaatcacttattaagaatttaagattgttaattaccaacttgccgtcattgctatcgcactctgatctcgtgatttcattgcgatttcgcactgccaaacggcgataacggtctattgatttcgcactgccaaaccgcgatgacggtctattcgtgtaaatctgttcgaatctcgtatattttttaagaaaaaaaacttcaacaatatattttcaaattcttttggtatgcttatagggttctcttttaaatcaaaccgaagagaaacgaaatagctaacttacttttaaccatactgctaaacctttgtttcagcgcagcgtgtacttctataacgtctataaaagctgctgatatcatagattgggaaattttgaagagtagtcgatcttatccaaatttttttcaataatggaatgaaatattacagcctttcactagtacagaaagccctattggtgtcggttgggaaatggcaataggtgccgttttcccgtccggcacctattgctggtaccggcaactaatggtaaaatagaaccggtacctttttgtctgcacgagaaaaaaaaaactctggctcaaatcaagccgaaggcctccacatccagaacaatatccccacattcagaatcaaaccgtgatcccctccacatccttagatccagaacaatatccctacatccaaaatcaaaatccaaagaacacatcaataacaacaacaatttctacatccatttaattataatgctcatctgatccaaatccccatgttctcggtacacatatgaataagagaacttgagagaaattaaacaaagagaacaagaacgggataaaaagaacacactcgaaccacagcggcattgaggatgatgcggcggtgacggggcccttgggttgcctccttcttccccttgagcgtcgctaggatggcggttgtggacgacttgcacgtgaggggagggcgcggtcgctgccgccttcgtcgggcagccactggccgcgggagaccgacgccgccctcccgccgaatctggaggagggagggcgcggcaaccgccagcctcgcgagcccgccgccaccgccgggcagctaccactagagagaggggagggagagacgcgaggcgacagaggggagggagagagacgcgagagcgagagagcgtgggagtagataaggacaagacgtgggtgggagtagataaggaggcgtggcgctcggctcatcggttcgggtcgttattataggtgtcggttctttaaaaaacgaataccttagtattggtaccggtttttactaatgaaccgacacctatagtttcttaaaggtactggttcttatttttttgagcgtgtggaggtaggaaaaggcctataggtgcggttttaaaggaaccggcacctataaggccgatccctatgagtgtttttgtagtagggtttgctcaacgagttacagccaattattataaggctcacacaaaagcaaaccagagtaacaaaaccaaaagcaaataaaactaataaaaccaaacaaggtaaacatcccagaactagtgaattctattggtgaatctccacccaaagttggcaaagaagacgcaagtttaggacacgcctctcttatttgcttgatatgatcatgcctttgtaattgagataattcccggagccaatatgttaccctgaaaagaacctgcaaatatgatttttaaggtgatctatccaaatccatttcatttctattaagccatagagcacaacatatagcggaagctccaacaaaaataagatccttgatatttttattaactcccacgaaccaattaccaaacacatgtgatatattatgtggagggtacaattcaaaggagaattgtatagataaactagtttttttttaaaaaaatattatgtttgtgcatacaaagcattctacacatttcatccatacacatacattactcaggctggacaaagcagctagcggatgatcaaatagtataggattgaattatcaccgttctcgaaagtgctttgttggtaaattagaaagggtggttctgagcttcaaatccttcgatggagcggtggacgctccaattcagattgctcctgtggcgtcatatcaccaaatatattgagaccccaggtataagacttgccagacttgttgaactcaatgattttgtgcgctctgtccttgaaatacacgaagcgccgaaccatgtcatcacgatcgcgctctatgtcatggaagctgcaccaccgctggtacagcgcccaaacggcttcctctgactcgaggtccttctcgtcgtaagcgaagcaggtggctggatcatctatcggtaaaataacaaggcgttatttaagttcaaagcaggtggttgtttcgtctatcggtaaataacaaggggtaactaacaaggcgttaattaagtttcggttggatgataatgccatgtactctttgactccttccatccgaaaatacagggaattctctgtttgtcacaagtgaaactaagtttgactgaatttatagaaaagaataacaatagattcattatgaaatactccctccgtttcgttttatttgacgccgttgactttttatcacatgtttgaccgttcgtcttattcaaaaatttttgtgaaatatgtaaaactatacgtatgcataaaagtatatttaacaacgaatcaaatgataggaaaagaattaataattatttaatttttttgaataagacgagcggtcaaacatgtgctaagtcaacggtgtcaaataaaacgaaacggagggagtactaagtaatagtgcatgtgcaacgcacattaggaaataaaatcaaaccaaatatgttggacgtatgttgcagcctaatttgttttttaatatttagtatagtatttacttggacttaatgtaaaaggcaaagtgaaaataataattgacataaatttatatcacacaattaaaactactaaccaccatcaacaacaacaacaaatactaatactgctgttaggaacgtcccaacatggaaaaggaacacaacagtaatgaccaaagatgatttgcgggaaaaaaacaaatatttacatatgattttaactacacatggatccattccctcaatgaatgtttagaaaatgaaaaggaaccagttaagattgagtgtattctcgtgtacggttgtaccggttggatcagtgtataatttgagataacaagatcacatatttacattgaaggaaaaagattgcactgagcttaggtttacatagaagattacatactactcagatcctgccatggcctgcatcatactacctggacatatatgtgtcgagattcgtagcaaggattgaactttttttttttgggacggaggggtagttattattaccacgtcaataaacaatcacaatccagtatatagggtcaacaagacaacaagagtgtgaaccttactttgtggtgagtaaactttttatggtacaactctgaacaaacataattgtacatatatattttttttatggtaacagagacccacatcacaagttcgcaatagtactgaggctaaaattttcaaagttacttctctgatgtggtagatgttaatattttctctaagaaatttgatcagcttagaatttgctaagaaatttgatcagcttagaatttgacttagcacaatcccaggattacttatatgttaggacagagcaagtacaaataaagatagtgcagggatagagtgtgtgtgctttagtgcgttcgctagctcagatcaagggccattgttccacttgtccgtgtgactcatgtaatggggttagctaggccatgtacacaataaggctgcaaatgaaataaactgaatttcttcactgagtttcttcttcagtgtgtttttcttgttcccttttccttctctgtttcctataccaaaattctccttctccccaaaatagaacaagatatcaataatactgctaataattcaccccaaattacaacgagttatccataatactgctactagtcaccagctcgggtcataacaattactacctccatattttaatgtatgacgctgttgactttttgtctaacatttgaccattcgtcttatttaaaaaatttatgtaattattatttattttattgtgacttgattcatcatcaaatattctttaagcatgacataaatatttttatattttcacaaaaattttgaataaaacgaatggttaaacgttagtcaaaaagtcaacgatgtcatacattaaaatacgaaaagagtacgagcaatcggtctctcacgagttcgggtcataacagataatcatcatgacgacagtatccttgaagtggaggcaaaataaaaaaaaaaaatggcggtcgattaggttacctggagcttcagggtcaaagcaatcgggggagaggtcggcgggtccgggggagtggtcgccggggatcatcgcgatgccgcgccggaggatgacgagtgggcccgacggggcgtgtggcagctgaggccgcgtccaggcggcggcggtgcaggtggtgtcgccggcgtagccacaccgaggagcaaagcggcccatgtacgaagccacatgacgggcggcggcggccatggcaggttgatcggatgtgaggaggtccggtactcgattccgatctagggtttcaactttgcaattcgttggactaattatccttgcttgtgttttcagttgagtatgtccctgtggcaatgacacgtttagcaagtccttggagcgtgatgacccacaaccaataatcttcttgatcaaaactcaacgaatggttcaatgattcaatcagacattagtcaatttgttgatctcaataaaagaatataaggttattatcgacaatgaaagacaccgccgacaaaatatccggtggcatcggtttagtgattttatcattttcagaaaaaataacaagctcaaaattattattttttgaatacactcacccttatgaatagacacacaacttactcctataaacatctacgaaggacttagtcggtatatcataaaattaatgaagtcaccacggccacgggcgcctcactgtcgacgtatacatcgtctaccactgagagaataattagcctaaatacaaaactcggattaaattgacctaacagaagtgatgaaagtgcattgtaaaataccaaaaatttgtatactgacatattagggtttaacggatattgagtggcaaataagggaatttcaatatatatattcccctgattttttttagaaacacaatataaacgcaaacgctcacactctcacccctaagaacatatacacgcacattctacctttataaacaccttggaaaaactgagccaatacatcttgaggttaacgaagtcaccatagacacatcgttatcgatggatatatatatatcgtctaacactaaaagaataattagctgtaaatttgatcacccgtgtcaagtctgagacttaaatttcaggtgaacaaaggttctaccatgagaaacttagctagttgagctacgctcacttcatcccctgattatttttgttaatcaaccgcttaaaattttgtaaagttcactatggtcacaattttgaggcagatgtgaaatattaaagtcttattacaatagattaaaaccattcaatattacgtagataatatatgcaaaagattgaaacagatctcttaactttttgcagccggcagaggggagaagaggaaatgcccttcggcgtggaagggatgttgaccgagtgccacaccatggatgagttctagtatctcatcgaacaggccatggtgtgtggcaagctcgtggtcatcgagttcggtgcatcctggtgtgaaccttcacgcaggatcgctccagttttcgctgagtacgccaaggagttcgctggagtagttttcctgaagttcgatatcgatgagctggaggaaattgcagactcgtatgatgtcaacggagtagtacccaccttcaccttcgtcaaggctgggcagaagattgacatgatccaaggagccaggtgtgacatcccggctcaggacttaataggattaatagaatactcataccaacaagttacaacttcttttccggaagccgcttctgggtgcgcacgagtgaggacaaagtgtgcagaaaagacttgtgttgctctgtgagagcattctatatcctaagaaaactgccagatatagagagggcctggcggtcaccgggaaattcttcccgggtgcgcacgagtgaggacaaagtgtgctatgagggcagtctatatcctaggaaagctgccagatgtagagagggcccggcctcggagagtgtggggcgttacagatggtatcagagctgacccttgcagcgttacagatggtatcagtgccgacccttgcagctatacgtatatatgaatatgtacgcgggcatacggtgcacacgggatgatccacgatgtggtcgtatggcatgacgtatgtgcgccgaaaattgtctgtatatacgtggtgctaataggagacgttcccggcctgggttgaccgacgaggacgtcggtgtcttaagggggagagaatgtgacatcccggctcagggcttaaagaggattaatagaatactcataccaacaagttgcaacttcttttccggaagccgatctcgaaagaactctaaggttacttcctgggttcataagaactttcttaattcttcccgggtgctagtctgtgtcctattaaagctgccagatgtaacagggcccggcctcgagtgtggggcgtcacaccaggtctctccgttcgaagattcaaatgcacactgcttctccttacttcctgggttcataagaactttcttactgtctttgcgcgatgaagtggaacagctagtagttgttattttgcggtcgggaccttaacatgtaattaagaaaccccactacagtgctctttactagtggtaaaaagtaatctaaaccattgatataatttaatcgaatggtttaaaatctacttgtactgtcaccccagtttgtggtaggagaaacatgaagggacattattattaaaaaatagttacagaggggtataattatcatttagcagtgactaaaccttctaatcataatattagtaaattattgatttacccttaattaaggtaaggggtgttaccgtgttaggcactagacactacttaaaaaatcctcatagggaccggcttatttaaaaccggtacatattgatcttttctcaccttccgcgggataaaaaataaagaaccgacacctttgaacaattataggtgccagttctaaagaaaaactggcaccaatacaattggtattgatttttttaaaaagaaccgacacatataatatattataggtgccgattaattaaaaaccgacacctacaaattaagccgagctggtggggcccaccatgagagataaggccagcggctagacacctcgatccatccagaaatattctagatcgctctatcgctctctctcggtcgttcgctcccctctctctttccctcccctctcgtggcgcctgcccgggaggtagcggcgcagcggcggcgtcctcctttccgccagatccagtgggagggaaactgctcctcttttgaaacgaagaaagctgatgtctttgtaagcagacacggctatgaagcatcaggcaatttctgaaataggaatgtgggtgaaattctacagtaactgataaaatgagtggcagatatgtagtcaaatacagttgagaggtgctgcacagtatcaatttatctacatagtcttcataaagatgtcctctgttgatatgtcactgctcaattgataacagtcctgaaaaaacgcatctagtactgttctgccacattgagaagtaactttgaatcttgctctccatcatgatcctacatgtggttttctgcacgcagtgctccacaggttgcagctgctcaaggcagttgctgctacactcggaggggagaccatcttccaccacgaggcataccaacgcgatacatgttcaatggcatgaacctagactccacaatatatataactgtgtcatcaactcgtcaaccaatctttctgatgcggacatcactccttcggatacacacaacaatcctccaccggtcattcaagaaccgataacaagagctcgcgtgcgacaattgaatttagaggtaagctcgttcctatgttcttctttgtatgaatttgagaatagattgctacctaatgattatattgtgattaggaacaatggagaggacaaagagacacttggagaaggacttagagttatggaggatcatcaaggacgtccaagtcaaggtggagggccaaagcaagccaactttgagtgcaattcggagtccagaaccagtctacactaaaacgggcgtccaggtcgcatacgtgctcggattggggcgttctttatatggatggaagctaagaagataacctttccaatggttctggtcccacgtccaaattctttccgagtcaacgggaatcgaccgaacaagttgacgtctacaatctgtgccagtgctgcgtcaccgtatttaggcctttgggctgtgtatcgtattggaacctattagggttgtgtcaagggttggttgcatgaccctaaactctatatatcagtacccgccgtcaccagtggcgaatccaggatagaaaaagagggtaggcttgatctccaagtattaagttactacctctgtccctaacaaattttggctatgaatttggacacatgattgtccagatttatagctaaaattgcttatattttggagtagtaaattgcagtacttacggtagttattcaacacatacatgatacatgattgaatagaaaagaaagaaataaagaaaaataccttgccaatacgaagtaattgattactacatcagtcatatgagaataacaaacacctatatgcatatactccgtaaacatagtataactgctgctctgctagtgctagcggctactgtggtgctgctccgcgcgccgccatggcgcctactgacggcttcgcgcagccgctccgcctgcagcctgccggcttccgcgcctgcggccgcctttgtttgctcttactcgccaccagacagctagctacggcgctgcagctcgaggcctcgagctcttgcgacttgcgtcggcgtcggctgctccagccgccaccagttgccagcgacagctcccaccctaaacacccccaaccctatccccacctgacctgtgtgagtgtgaagtgtgggaagtgggccactggactgggccattactatcgaattgggacaacctgttagaataattgggctaggcccaatttataataattaaatctcaaagacccataataaatgttgaggataataataccacctcagaatttaagcgagaaatatctcaacctaaatagggagttattagaggctccctgttgaccagttgaggtgggggtcggaatgccacgcgcgcgcgcgccgggccgtgggcgaggcgtggcgtggctggcggcgtgcgtcacgtcacaatccttttgcagccactaacccacgttcccacgattccctccacaaccgcgcttccacgttctttctcctgatagtcacgacgcaatccttttgcagccactaacccacgttctcacgattccctccgcaacagcgcgtccacgttctttctcctgatagataaggaggccgcgagtccgatccgacttcttagcttttttcccggtgttagtttctccttctccgcgcctgagttgctctcgcttccccgcttctgatctcttgcgcgcacgagagattggaagaagcagtggctccgaaaccacacctttgcctgagatctgcaccgggtaggcgggagatcaggtttttggggagtgcctcctgcacgactgctcatcgccatgtctggagttgctgctgccgccgctaccggcggaggtggtacgccgccgccgacaggagctggtgcgccgccgccgacaggagctggtgcgccaggaggaggtgccgtgaacgactacaacaacggaggcaattctgcctcaccatccagcggagggccattctcggggtataatcttctcctcctgctactgctgttagcgctattcctgttcccattgttagcgctatactgtgtgcgctatgttcttgttcctattctacgtgatgcctctagcatgttatcgcgttactggtatgttcctgtttctgacattcatgatgcgcatagtatgctactggttatgttaagattaccctacactgcttatgccatgatcattgtttcaatttcttggattaaaatatgccgaataatgactatatttccaacaatccaaaaacctgataggtcattttcggtagttggctttgctgctgcactgaaaccacatgcttttgatggttcaaactataagagatggaaagcacgtgcactattgtggttgacagcgatgcagtgcttctatgtttcacggggcaaacgaagtgaaccacctctttctcctgaggaagaggctaagttcgaggcttcggattgcctgttccgtggagcattgatcagtgtactcgctgacaacatagtggacgtgtacatgcacatgccttctgggaaggacatgtgggatgcacttgaggccaagttcggagtttctgacgccggcagtgagctgtatatcatggagcagttctatgactacaagatggtcgatgaccgttctgtagtagaacaagctcatgagattcagatgctggctaaggaacttgagaacaacaactgtgagttgccggacaagtttgtggcgggtggcattattgccaaactaccaccttcttggtcggactttgccacttctctaaagcacaagagacaagagttcagtgttcctgatctcattggctctttgggtgttgaggagaaggcgagggcaaaggacgtccggggcaaaaaggttgagggaggttctagtgccaatatggtacagaagaagaaccctcatgcatcccacaacaacaagaaagtcaagcctgatgtcaaacccaaggctgcaaccaattttaagaagaaaggcaagggaaaggcaaagggagactgctttgtgtgtggcaagtctgggcattgggccaaggactgtcctgagcgcaaagacaggaagtctgccaacatgatcattagcgagggcggaggaacatcggggtacggtaaaatattacctacagttctctctgtttttcattcacctgattggtgggtggatactggtgctaatattcatgtatgtgctgacatttctctgttttcttcttatcaggtcgagagaggttcctccttgttgatgggaaacgggtcgcttgcggctgttcatggtgttggtacggtcgatctgaagtttacttcgggaaagaccgtgcagctgaagaacgtgcagcatgtcccttcaataaagaagaatctagttagcggctctctattgtgtagagaaggttttagacttgtgtttgagtccaataaatgtgtcgtatctaaatatgggacttttgttggtaaaggttatgacagcggaggcttgttccgcttttctttgaatgacatgtgtaataatcataatgctgtgaaccatattagcaagaatgatgagtctaatgtgtggcattcgcgactctgtcatgtgaatttcggttgtatgacgcgcttagctaacatgagtttaattccaaaattcactttggtcaaaggttccaagtgccatacttgtgttcaatcgaaacaacctcgcaagcctcacaaggcatctgaggcgaggaatttggcacctctagaacttgttcattccgatttgtgcgaaatgaacggcatgttgactaaagggggaaagaaatatttcatgacactgatagatgattgcactagattttgctatgtgtatctattgaaaacaaaggatgaggcattgcattactttaaaatctataaagctgaggtagaaaaccaacttgaaaggaaaatcaaacggttgaggtctgatagaggtggggagtatttttctaatgagtttgcatccttttgcgaagagtttggaattattcatgagatgacgcctccctattcaccccaatcaaatggggtggccgaaagaaagaaccgtattctaactgagatggtgaatgccatgttagacactgcggggctttccaaggaatggtggggtgaggcagttttgactgcgtgtcatgtcctgaataaaattccaatgaagcataaggaagtaacaccattcgaggaatgggaaaggaagaaattaaatctctcatacctacgaacatggggctgtttggccaaggtaaatgtacctatagtcaaaaagcggaaacttggaccaaaaactgttgattgtgtgtttcttggttatgctatccacagtgtgggttatagattcttaatagtaaactttggagtacccgacatgcatgctgctacaatttttgagtccagagatgctacattctttgagaatgaatttcttatgaaatatacacctagcacttctagtaaagaaactgtcatgctccatgagcactttgcaccgatagaacacaatgatgaaacgcctgaggaaaatcctgaggaggacaacattgtagatactcgcaagagtaagagacaaagggttgcaaaatcctttggagatgactacattgtatacctcgtggatgacaccccaagaaccatagaagaggcatattcatctcctgacgctgactactggaaggaagcagtacgcagtgaaattgactcgattatatctaatggtacttgggaagtcgttgagcgtccatatgggtgcaagcctgtaggatgcaaatgggttttcaagaaaaagcttaggcctgatggtacaatcgaaaagtacaaggcaaggcttgtggccaagggttatacccaaaaggaaggcgaggatttcttcgacacatatt

SEQ ID NO: 9823 - DNA, 4586 bp, Oryza sativa
taatgatagttcacgatggtcaatcgtgattggttaattaattacttgccaactaaaacttgataatagtgggttgtgagcacatggttttgagagtcgtgcttatgacaattaaggaccggttcgcgagctactattgtgaaacattaatcgtgccaaccacaagccagcgtgggcaacggctttaccttttgtataacatgattcattgcggagcaccagactgagaagtggcggagataagcccacgggggtcacttgggagtccatgccttgttttataaaggggtgattatgatccaggaatggtgcactgtggtgagttgtgttgtgcagagggtattgtcacagcctctattcgggtactttccagtatcgcgacgtatggtagacatgatgttgaggctgtgtcttgtgggtacagtggtacacctctggccagagtaaaaactattcgaatagccgtgcccgcggttatgggcgagttgagcaatgtttttcgtgattagtctcacacctctcacaataattatggatgttataactggtaataatttgcttagctcctggtttggagttagatctgtacagccgggtatggttgttcaggatggttgggcctgtgcagcatgggtgtgctgttcagtgttgattaaaatttctgattaattactccactgttttacttctcttaaatgttttgttaaatgctgcttttgcaaatgagcctatattatgccatcctttggtatccttgtgcacttgcatatttgctgtgtggcttgttgagtatgtcatatgctcattcttgtaataatcaatcaacctcagttgaagacaagttgcgaaggagaagacgtttggcttataccccagttgagctgcctgtgggagtggagccggagctgcgctagattttattttccgctgcagttttcttcttggtgaggactaagtgcctcttaagtaagtacttatcgttttagttaatttgatgaatctgtatattaaattgtcagtttgtgtacctcggctgattcctggacgaggattttatgcacaaataagtttggaaattacttgtgaatttccgggcgtgacaagttggtatcagagccatctcgactgtaggataagccaaatggtcaaaccttaaggactaattttccgaaaacatgatttgtgaaagtttctcctttcttccttatctagaattctttgcaaattgtttcattgtctacttccctctctctttcaacttgagtagttctgaaactagttgttgaaacttgaagacgccaatgtggtctacttatggaggttaagtcaagtggatcgatgaataagaaggtgatggtcgatctgaagtgcccagatgtcaagatggaatgaagtttggatcctaccttagaacctatgccgccaatctatccttgaagaatagttagtagggaagagcgtttgttgtttgctttgtttgtaggtatggttgcattcccatcattggagtagttcattgatgagtgtgtaactatactaggttgcttgcttaatcaacttgaacaatataatggtctacgcacaccagatcagtggtaacctggttaaggtcttgtctttagtgtaacctctctccttctatcttctctaatatgcaatagatggtgaacactcgcgccagtggaagtggaaacaataacaatgaagggaacccaactcttgctcaagtcctggctcaacagactcagttaatgaacatgatgatacagcagatgcagaaccagctcaaccaagggaacaacaatgctccaccgccgcagaacaagttaactgattttcttcgtgtaaggccacctaccttttctagcactaccaacccagtagaagcaggtgattggctacacgctgttgagaagaagttggaactgctccagtgtacggatcaggagaaagttgttttcgcttcacatcagttgcaaggacctgcatcagaatggtgggatcatttccggatgaacagagcagaaggacaaccaatcacttgggaagagtttactgaaggattcaagaagacacacatacctgtaggagttgttgctttgaagaagcgtgagtttagggccttgaagcaaaaggatcataccgtggcagagtatcttcatgaattcaatggcacgttatgctccagaagatgtgcgtactgacgaggaaaggcaggagaagttcttggaaggcttaaaggatgaactgtcagttacgttaatctcccatgactatgttgattttcagcagctggttgacaaagcaattcgacttgaagacaagaagaacaggatggataaccgtaaaaggaaaatgattgtattccaggaggcacaaggtagtagccagaggcagcgtatcaagccactccaaattggtgaatcttcttccgctggtcaaggacagtcgcaacagttgaatatcgctggtgagatcaaatcagagactaatgaaagcaatgaagttaacatcgagcaaataaatcagccgatgccagttcagcaggatcagtctcgggagaataacagtagtagaagggagcagcaggtatgtttcaactgttacaagccaggccactttgcaagagagtgtccgaagccgaagcatcagcagccgcaaggtcaggtcaacaacattgtcgtcacaggagccaatgcagtaccagttgtgtcttcaagagttgcatcttcaagtgttacagctcagccactagtttcaaagcggcagtagttttctataaagccttagaataattatcggagttatggaataagatagactgcagtttacctatgcctttttctttctagccgttccgaatctcgggacgagattctttgtaaggggggtagatctgtcacatcctgattttttcgttttaggatttataaattatttaataaattattaatagaatttatattaaatgttctttaatttacaagaaaagttaaatgtgggaaataaaatttcctaaatataaagcatggatggatttaatttttattaaattctccatgattaagtcaactctctgaaattttctcggatttttcggagctcaattcctaaatgatacaaagaacagttcagtaattatttgatcattaatgatctaattatttttgttaagagcttttcttgtttaaaaatccttaaattataaattgttgtttaaaaggaattgttagaaatgattttaaaagcctaaaagagaagatctaattttaatttgttaaatctcaatataaaattgggctagataaaattttgttaaatactttgcttaattctataattcctagatttttctgggatttatttgagctaaggaagtatttttaataaatggaattgtatttcatgaataatttaaattgaaaaaggtttttaaaagtctcttttggctttgggccgaaagtcagcccaagtcggcccagtccgccgagccgccgctctcctctctctctcagccgctgacaggtgggtcccacttgtcagggtcgtcgtcctcctcgcgccgccgccgccgcctgaaaccctagcgcgagccgccgccgtctccttccaaattcggccgatcctttacttctccggccgaatctttagaggggaaatgatccttgagatctcctcttccttttctcttttggaatcatcggctaaaatcgtttggaaattcgtggattcgagttcgattcggatcagcctctttcctccgaatccccgatctttccatcccaccgccggtcgccgtgggccttcgccgtcgccttccaacccctttaaaaggacccccggtgtctcctctacccgccgcctctctcgccttcgcctaccgtcgtgtgtagcaccctagcctcgtgagcttttgcgccgccgtcgtcgccgctgctccagccgtgtgccgccgccgtttcagctatcgccgtcgctcgggaaggtcgtcatcgtggtcgccgtcgggatcgccaagtcgtcgccgtcctcgtccgcccctttgccgccgccggagaccgctggagcaccgtcgccgccgtcgacccgatcttctccgccgctttgacctcgtcgccgtcgccgtccgttggtcttccgccgctcctttggtcaccggtgagttcgtcgtgccgtccgcttcgtcccggtgccttccgttcacgccgtcgcgccgtcgttcgccggcgagcgtgcgccgtccgagctgccgagccgcccgagccgccgccgccggtggtgacgtcatcgctgacgtcatcgtcgctgtctcccgtgagccgccgtggacccgatcgatctcggccgtccgttttggatagggttgatctcggccgtccgttcccgtgaaccgtcgtcgtgcacccggtccaccgcaaaccctagccgctgacgcaataatcctccttttccttttcaaaaataattcattattgcgtcataattcaattaaaatccatataagtgttttaatccgatttaatctttaaaaattcataactaattcatttgaactcagtttaatgtggtttgatgaactacttgca

SEQ ID NO: 9824 - DNA, 1675 bp, Oryza sativa
ctttgtacaacacaactcaccacagtgcaccattcctggatcataatcccccccttataaaacaaggcatggactccccagcgacccccgtgggcttatctccgccacttctcagtttggtgctccgcaatgaatcatgctatacaaaaggtaaagccgttgcccacgctggcttgtggttggcacgattaatgtttcacaatagtagctcgcgaaccggtccttaattgtcatgagcacgactctcaaaaccatgtgctcacaacccaccattatcaagttttagttggcaagtaattaattaaccaatcacgattgaccatcgtgaactatcattaagccatcattaaataatgagtcataagttatcccaatagtgtgctaatgtttctaagcatggctaagcaattatatctaatatctagttgaaccaatatatataaagctcaactagtccaattataatcacccaaggtatcaaggaataaagtaatcaatgaaaacaggccataacaaaggaataggttcacaccacccagtgacattcgaaaataaatgcacagttgaaataaatagagaatttaaatataggatcaacatgctcaaaggattgtgtttaggatctgtgtgacttgccttgcaataatcggtcttcaattaatcttcttgaatacttccggcgcactcacgaaccttcgcaacaacggaaacgacaagctatcacgcaaaacgaggaaaaagactaataaaaaccaattaaacaatacataaaaaataaacaaacatgtagatcataattttagatgaattatgagacttgaacggcctcattctgacttcaaatgaatttattacgaattttacaagattaaatctatttaaagcccatttaaaaagaattaaataaatttaattcaatttatggacaattttaatatgtagatctttattttatataatttttgcaacttgaaccacattaaactgagttcaaatgaattagttatgaatttttaaagattaaatcggattaaaacacttatatggattttaattgaattatgacgcaataatgaattatttttgaaaaggaaaaggaggattattgcgtcagcggctagggtttgcggtggaccgggtgcacgacgacagttcacgggaacggacggccaagatcaaccctatccaaaacggacggccgagatcgatcgggtccacggcggctcacgggagacggcgacgatgacgtcagcgatgacgtcaccaccggcggcggcggctcgagcggctcggcagctcggacggcgcacgctcgccggcgaacgacggcacggcgaactcaccggtgaccaaaggagcggcggaagaccaacggacggcgacggcgatgtggtcaaagcggcggagaagatcgggtcgacggcggcgacggtgctccagcggtgtccggcggcggcgaaggggcggacgaggacggcgacgacttggcgatcccgacggcgaccacgatgacgaccttcccgagcgacggcgacagctgaaacggcagcggcacacggctggagtggcggcgacgacggcggcgcaaaagctcacgaggctagggcgctacacacgacggcgggcgaaggcaagagaggcggcgggtagaggagacaccgggggtccttttaaa

SEQ ID NO: 9825 - DNA, 8729 bp, Oryza sativa
gggagagacacaacttcttccatcgatgacaattctttgctgaggctgtcggtgcagagaatggttggtgctgaaggtattattgctatgatttattgcagagtcaggtgcagcaggaggagcattggtgctgtggatgatatcgtcgatgttgctgttggagctaactagctgatgagacaatcgtagggttgttcgttggatttctgcggtcttggtcaacaacacactgagttggcaatccttgggcacatggtttgtaccttcgcacagaaaacatgtgaccttgcgggtgggacattcacctggtggatggtcttccccacaatgagggcagagtgtgagacacatgctagcaatgtgtccaatttctccacaacggttgcatgcttttgattccatctcttcctcaccgagatgtcggggagactcatcttcataatccgaggagacttgatctgacccttcactatcatatactctgccaccatggcttaggaggtgctgggtcaactgtcgtgcacctcggaaggtatttcctctttgacgtctaggaatagttatccctgctggaggccattcggtgctggtaatagtcatcttacgtacttcttcttcagttcgcatcggcgcttttctcttctgattcttactcttcttgcctttggcttgcttagtgtgtgaccccacgtggtacgaaaggctagaaagaaagcaattcccgggattcaatggattctcttcattgggctctctgctttgcacactaggctgcaagcttgacttggtgcgaggaggctggcttagcgatgtctgccctgctaaaccaaaggaaggggcttctttagcatatacccatggacaattcagggcatagtgtccttgttctctacaatcatgacaaaaggggacatgctcttctggcatgggaagctcattggcctgggtggcaaatgctcgatcaaacacatacttattttggtcttgacttccaaccaatggtagctgtgaactaagccgcatacttggaatggaccaagggtgtgccctggttaactctcttgaggccagtggtggattgagttgaaaactggagttacttgaggcatacccgctgacattctttcctttttctctgttaaacatctgttacagggattgaggtgagagagaaaacaagccaggaaagaatagaccagaactagagacaggaccttaaaggaactaactcttcttgctgatgtgttgtttgtttcacttattctgcaagttgattaagcaaacaacctagcatggtcacatcacagcccaccgatgcaaaccacacactacacacacaagcaaggaaacacacgacaaacgaaacactagagggtggcttaggttctgcgacgagttcccaagatcttcactccttcacagctggcttcactgcttcctccacttcgctagcggaccctgcggtcttccggaccttcggcgaacaattggcgacatcttcttcttcgcaaaactaaccaactagtactagttgaaatctgaagaaggaagaagggagtaaaccttttgcaaatagcacaggggaaaggaggaaaaagggactttcggaaatagttttatgtataaaatatgtccttaggttttatccacttggcttatcctacagtcgagatggctctgataccagcttgtcgcgaccgagaaaattgcattttcccgaacgctagtgtattaatccccgtcccaggaaaagccggggtacaccatacaaacatgatataaaagacacatctttattatatcgataatatttacattattacaaaggcacttaaggcctgacaatcaaaaataaacagcagcggactagcgggcctacggctccatcttcacaggcgctcaactggggtataagccaggactccacctaagacttcttctccaaagcttctcttactgaagggggaaaagattgagcaagaatgagtacaaccacagtactcagcgagccacaccggcagatgcatgattaatgcaagggggtacaaggggtaataatatataggggttaagttttgcagaaaacagcatttaaaagtcacttagttgcccaaagccattttaaaaagacgatcctagagttacacagtattattaatcagggtcgtgaacccgcacgagcctgccttaacccaaggcctacgatgattcagaccgaactggcaacccgaccctgggtcccagctcgtcccaagccaacccaggccaaccattccacattttagttgttgagcaaattttaagaattaaaacactaacttgggtacattgctcggcttgcccataaccgagggcgcggctattcgaatagattatactctgatcagaggtgtacatctttacccacaagacacatcttcctcacgtgtaaccacgtgccacataccaccacggtatacggacggaagacgtgacatagttcccaacccatcctagccataaacaagagtaccgacccaaccccacctacggccggaacccccgggacaggcaggcaggattgagccccctagcagcaggacaccggccctgtgccatgacatctcgactaccgggccgcagctcgtgtagccttcatttgtcctagagatgtccatcgacccccgacttcgtccatctccatccgtgtacttttgtttataaccagactgagccacaaactaagccttacccactagacatgtggaagtacggtagtgctttgcaacagaggcccgagcttaatccttatagtggccggggtgctacttcccacaactagcatgcacccaaaccccaccgaaaaacaggttttaggggctttgaaagaggaagagaggggtatgtccaattccacaataagccaaccattccatagtatccaagtgatatgagaattccccaagtctaaagttataaaaccacctaatgttgcctaattaaacagcgaagcatctacctaaattcatactagtggaaccatgaatagagtgtccactagttggggttttgtttattctagggtgaacaaggtaataataacaatagcaataataataaggtcataacaaaggtaaataggcatggctaaataaaacagtgataacgcaggaatttaaataaagcgataatgcattaatttaaatcaaaataattttataaactgggattcaatatgctcaaggatgatgtgacttgccttgctcgctttcccaaacgtcggcttcaacttccacgaagagcggatcttccgaagctgcagcgtctacacgaccaacggaaaagaaaaggcttttactctactaaactccatataacaagcagaaacaaagcacaaaaatgggttcttggcttcttaaggaaaaattagagacttgaacggtccaattccgagttcaaatggccaagttatggccatttgaagtttatatgctctttaaatggatatttacgaatttctttatttaaattttaatttaaaatcggatttattgcgtcagccgaggggaggggcgcgcggaccgggtccacgggagtggggcccacgcggcagcctctcggtccacgatggaccgggtgcacgcggcttacgccggccggcgccgtgggtcccacgcgtcagccgcacccgagggcgcgggcggctgacggccgggccccacatggcagccgcggggcgcgcccgaaggcggcctcgccggcacagccgacgggaggcggcgcgcccgcgccccgatggtcgccgccggcgaccaccggcgcggcggagcggcgcccgagagaggggagggaagggggaaacgaaatgggcggtccacggctcaccccgggtcgacggcgacgacgggaacggcgaccggagcggaggaaggcggcggcgcggctcgggttgacgaggacggcggcgttccggcggtcggcgggcgaaacggaagggtggacgaggtcggcgaggacgcggcgaagccgaaggaggcgacgccgaggcgggaggcggtccggggtgacgatggcggtggaccggagctcggcggcgacggcggagagagagagagcgacgtcgcgagctgaaatccggcgaggaggaagggcggcgagaggcggaaccggacggaggaggtgcggggagggtttaaatagtgccggggcgagagagggtggccggggaagggaggaaaccagcgcgggaggtcggccgccatcaatggcgccggcgagattaggggagcggtttccaaccgaattcgagggacagagggtgggaaaaatggggggaaagagagagggaaacacggggagtgatttccccctctttattgcgcgcggggacggcgggaggcggcgggattcgcggcggcggcggcgctagggcacgggcgaggcggtgggagcggcgggaggatagggatgacaggtgggccccacccgtcagcgagggtggcgggcgggcccgcccgtcagcggcgcgcgcgtggggagaggccgagtgggccgcggggaggaggagagagagggagggagatgggccgagccggcccaagagggggaagggggggggggaaaaagactttttagagcttttctttttataaaaccattttaactttgtttatttcttaataattattatttgtgctctaaaaattccactaaaatttgagggctccttttagaccaaggagaatttaacaaaaattctccgggccacatttgaatttttcttgtacgtattttagtgtttgccaatttcttttcgaattttaattaattctattattccttttagagaatgatttttatttcgggatgaatttatcaggacgtgacagttgtttgggatctgtgtgacttgccttgctggccttggaactcttcaaactcttctccggcgaaaacggactctccggaaacgacggaatctaagcagaaaagagcaaaaacaccaaaacaacacataaacaagcatgaacagtacatgtggatatttttaacatgtagatctcgattttagaaaaatttagagacttgaaccaactaaatccgagctaagatgaattagttatgaatttttgaagatttaatcggattaaaacacttatattgattttaattgaattatgacgcaataatgaattatttttgaaaaggaaaagaggatttattgcgtcagcggatagggtttgcggtggaccgggcgcacggcggcggctcacgggaacgaacggccgagattgatccatccaaaacggacggccgagatcgatcggtccacgaccggctcacgggagagggcgacgatgacgtcggcggtgacgtcaccaccggcggcgacggctcggcggctcgacagctcggacggcgcacgctcgccggcgaacggctgcactacggcacgaacggagggcaccaacgggtagagggcgacgcggcgaactcaccggcgaccagaagagcggcggaagatcaacggacggcgacggcggcgaggttgaaacggcggcggtcttcgagtcgacggcggcgacggtgctccggtgatcttcggcgacggcgaaggggcggacgaggacggcggcgacttggcgaccacgacggcggtcttcccgagcgacgacgacggctggaacggcggcggcgcacggctggagcggcggcggcgacggcggcgctaggttacacggcgctagggcgctacggacgacgagaggcgaaggcgaaggtggcgacgggtagaggagacaccggggagccttttaaaggggctaggaggcagcggcgaaggcccacggcggccggcgacgagaaggaaagatcggggtttgaaggaaagagaccgatccgattcgaactcgaatcaaacacattccaaaccgatttagccgatgtttccaaaggagaaaaggtagaggagatcccgaagattgtttcccctcaatcaatttcaccggaaacggaaaggaacggccggatttggaaaggaacggcggcggcgcgaaactagggtttcgggcggcggcggccggaggtcgacgacgaccctgacaggtgggccccacctgtcagcgggcggacgcgcgcgcgcggcggactgggccggactgggccgaggagagagagaaaggttttgggccgactttcggcccaaagccaaaagagactttttaaaacctttttcaatttaaattattcatgaaatgaaattccatttattaaaaatacttccttagctcaaataaatcccagaaaaatctaggaattatagaattaagcaaagtatttaatgaaattttatctggccccattttatattggaatttattaattaaaattagatcttctcttctaggcttttttaaaaataaattctaataattccaattaaacaacaatttataaattttgaattttcagggtgtgacatatgttgataggtctactttgactttggattcgctttacacaaaactcaaaacacatgagatgaatattctttctcgaagagttgattctaagtctagtgcttaggtttcttcctcgacttctttggatgttggtgcctcttcatcgaagtcttttattcttgctttaattaatggcatatccgatgaacaactcgaataattcgaggaggatttggttttggttactaacaagttttctcgagctatgaataatgttaggtacaggaaaagaggtggtccaaattgttgctttgaatgtggttctcttgatcaccttcgtttgcattgtccaaagcttggaagaggcaagatggaagataatggtggagagaagaccaatgacaacaagccgaagagcacattcaaagggaagaagaagaaggagactctcaagaaggcttttgatcaagtctatgctgcttttgagccactaagtgatgtagatggtgaaagtgaagatgaagataagggaaagaacatttccggtgtttgcttcatggcacgtggtgaatcggattcggagtgtgaagacaatgaggtacgttcttttgagaaagctattcttattttaagtgcaaaaaataagaagtgtgagaagatgtatagaaaacaggagtttattattgaatctcttaattctgaagttgctagattaaaatatcttattcccaatgattgtgattgcaaaagttgtgaggttttaatgaatgaaatttcaaaaattagagatgtcaatgctgcacatgatttgaaaaatagatcttctctagatcttggatttgccttgcgcacacacactttggatgagttgtttttgactaaaaagttgttgcaaaaatatcaaattgcttttcgtgctagtttgatgtttaacataatttgagccaaaaagttaaaataaccacatgatgttttggattgctcaacatgtacattaaacaagatgaaactaaaagatgctttaggtcgtgttgagtcaatggaagatgttgtgaaaactaatgaagtgatttcttgctccaaatatcgtaaaagcaaaggtgtcatggtaaattgtgaaaattgtgctaatttggaaaaagaggtttcttatttgaaaaattctttgcaaagattttctgatggtaagaaacaacttaacatgattttggatcaatctaaagtgactagttacaatagggtgttggttttgatgttcatgactatttcaccaaaaatcaaccaaatgttttgagtgtgactgaacatggtgaaattttgacaaaaccaagtgctaagaaaatagtttttaagtctgctagaattttgccttctctttctgctacactaaaagaaaaaaaacaaatctttcaaaaccatcttcttttaaagaaaagtacacttgttcttttttgtggtaaagatggacatcttgttggttagattagctcgtaaacagaaaaaaggagagataaattgcttttgcaaaatcaaagtggcaaaaatctggttttccctcgaggaaaccggtcagaccgcagtgggtcccgcggtcagaccggctactgagcggcggtcagaccggtggtacagaagcggttagaccggcccccggtaagaccggctactgtactacggtcaaaccggcctcggagaaatttttctgaaaattctcaaactgtttttgcacgtggatatatgcctattggatctactggtcgtgtgtcctagattcctaaatttgtattatctaaccccagtcctgaggcttcaacatcttcatgtgtgtaggctttggtggcgaggaaggagaacgtgtggatcgtggattccggttgttcgcggcacatgaccggtgataaaaattggttctcctccctcaaacaggcatccaagactgaatcgattatctttggtgatgcttctactagtgcagttctcgctacaggtttgctcaaggtaaatgacagattgaattgaaaaacgtagctttagttgaggatttaaagtacaatttgctttcagttttacaaattgttgatgaaaattttgaggttcattttaagaaaactgaaagtaaagtatttgattcttgtggtgattctgtactgaatatttctcgctatggaagagtgtttaaagctgattttcgaaatcctgtttcacctgtgataacatgtttggtcgctaagtttgataaggatgtgatgttttggcatcgtagacttggacatgtttgttttgatcatc

SEQ ID NO: 9826 - DNA, 1724 bp, Oryza sativa
tgaatgattcttgcacttctctggtggtttgggagagaaaggtgacaaggtggtggaacaagagtcccaagagctgataaatcccattgagatgctgacccaggaagatttagagggaactcagaatgattggctgacaatgggtgaaaaaaacttgttggatgatgagatggagaggtgtcaaattcccactgattctgacatagaaaggttgagggaggaagaaaatagagatgatgaatagagctttcaagaggtgtctcataagaagaaaagtagggggagaaaaactgaacctacaattacatccaggatgagcttaaggaatagggagttggctgatgttcctgtcaccaggagggctagaattctcactcagaagaagaacatggaaggtaatgcttcaaacccttttgctatttttcagctgctagattcagttgagttaaataaaattgctattgctgctaagatagatttgggtagtacttctactgagattgatactaatttagaatccttgaaatcaaaagagatagcccatgctaaactagctgaactaaactggaaaaaagagatggaaaattgaaaagtaaggagggtaatgtagaaaaatctgaggaggtgaatcaaaagttaggaaaagaggttgtggctaaaaaagtaagatgccattagaggaggtggctgctgaaaagagccctgagctgataaagagaggtggtgtgttcaaacaaaggaaaaaaaaatgattatcttgttctagaatattagagggttaggtagtgtagctagaggtggacaactgaaagagctgatcaaagaaaagagggtgtacattatctgtttacaagaaactaagaaagaggtgttcttagatagagagttgaattccttccaaggagggaggtcttttgtgtggtgctgaaagcatccagggggacttctggtggcattcttgtaggtgtgaattctgagatgtttgaggttatctctactcatgccggagcttatttcctatgttgtgttttgaaaaataagaaagatgactatctctaggaaatcataggtgtgtgtggtcctgtggacaatcacttgaagggtgggtttttagatgagttgaaatggcatattcagggtaatgattacccctttatattaggtggagactttaagttgtatagatttgcttgggaaaaatccaatgctaatgttgactctaggaatatgttgttgtttaactcttttattgctgatttagatttgagagagacttttaggaatggacctaagtatacttggactaataagcaagagtgccctgctcaggaagtcctagatagagttctaatgaatgatagttgggatattaagttcccctctgctctgctctcttccctccctagagtaggttctgaccatactcctcttcttcttgacactgatgaggaaagggaaagaagctgtagttactttaagttcgagtcagcctggcttgctgaaaatgggtttaaggagatggtttgtcataagatgttagaaagagatagttcctatattttagagttctggactagaaagcaatcagagatgagaaaatttttgacaggttgggtgtcgcgaccgagaaaattgcattttcccgaacgctagtgtattaatccccgtcccaggaaaagccggggtacaccatacaaacatgatataaaagacacatctttatt

SEQ ID NO: 9827 - DNA, 19861 bp, Oryza sativa
  unsure (1)..(19861): unsure at all n locations
cggttatgggcggtcaaccagattcaccgtgattagtctcaccctagtgtaatcttttgaaattggatagtttaggtggatggttgggcctgtcgcaacgtgggttagcgttgggcagtggatagttgatattaattaattattacaacggtttaatctttcaacttctgtttataaatgctcgctttatgcaaatgaaccgctctagctcttctttgataattccctgcatcatacccctattccggtatgacttgctgagtacagtgggtagtactcagtcttgctctacttttcccaacccagagttcgagtttgggtcagataaaggtttctctgaggagtaggcttcgtccgtgccgtcgaggatgcctgtggagtggtgttcccgctgcagtttagtcaaggcttagctcctgttgtctttcttttcttccgctgcatttatgtaagacttttatgatgtttgtaagacgtggatctgaatgtcaacattgtcgtttgtgtactgtcacatcctgatttttgtttcaggatttataaattatttaataaattattaatagaatttatattaaatgatctttaatttacaagggaagttaaatgtgggaaataaaatttcctaaatataaagcatggatggatttaatttttattaaattctccatgattaagtcaactctctgaaattttctcggatttttcagagctcaattcctaaatgatacaaagaacagttcagtaattatttgatcattaatgatctaattataattgttaagagcttttctggtttaaaaatccttaaattataaattgttgtttaaaaggaattattagaaatgattttaaaagcctaaaagagaagatctaattttaatttgctaaatctcaatataaaattgggctagataaaattttattaaatactttgcttaattctataattcctagatttttctgggatttatttgagctaaggaagtatttttaataaatggaattgcatttcatgaataatttaaattgaaaaaggtttttaaaagtcttattttggctttgggccgaaagtcggcccaaaacccctctctctttctctctccctccccggcccagtcggcccagtcagcccgcgctccttccttttctctctcggtgtcgctgacaggtgggtcccacctgtcaggttcgtcttcctcgcgccgtcgccgccgcccgaaaccctagcgcaagccgccgccgtctccttccaaattcggccgcgcctttccttctccggccgaattgattgagggcaattgatccttgagatctcctcttccttttctcttttggaaacatcggctaattttctttggaaaccggtggatttgagttggattcggattcatctctctcctctaaccccgacctttccttctcgtcgccggcagccgtgggccttcactgccgcctccttgcccctttaaaaggacccccggtgtctccgctacccgccgcctctctcgccttcgcccgccgtcgtgtgtagcgccctagcctcgtgagcttttgcgccgccgtcgccgccgttcgtccagccgtgcgccgccgtcgctacggtcgtcgtcgtcactcgggaaggccaccgtcgggatcgccaagtcgtcgccgtccccgtccgccgcttcgccgtcgccgaagatcgccggagcaccgtcgccgccgtcgacccgatctccgccgccgcttcttcctcgtcgccgtcgccgtccgttgttcctccgccgcttctttggtcaccggtaagttcgccgcgccgcgctctacgtcctggtgccctccgttctcgttgtcgcgccgtcgttcgccggcgagcttgcgctcccgagccgccgccggtgctgacgtcatcgttgccgttccccgtgagccggtcgtggacccgtttgatctcggccgtccgttttggatagggttgatctcggccgtccgttcccgtgaaccgtcgtcgtgcacccggtccaccgcaaaccctagccgctgacgcaataatcctcttttccttttcaaaaataattcattattgcgtcataattcaattaaaatccatataagtgttttaatccgatttaatctttaaaaattcataactaattcatttgaactcagtttaatgtggttcaagttgcaaaaattatataaaataaagatctacatattaaaattgtccataaattgaattaaatttatttaattctttttaaatgggctttaattagatttaattttgtaaaattcataataaattcatttgaagtcagaatgaggccgttcaagtctcataattcatctaaaattatgatctacatgtttgtttactttttatgtattatttctttggtttttattagtctttttcttcgttttgcgtgatagttagtcgtttccgtcgttgcgaaggttcgcgagtgcgccggaagtattcaagaagattaattgaagaccgattattgcaaggcaagtcacacagatcctaaacacaatcctttgagcatgttgatcctatgtttaaattctctatttatttcaactgtgcatttattttcgaatgtcattgggtggaattaacctattctttgttatggcccttttgttcttgattactttattccttgataccttgggatattataacttgactagttgagctttatatattggttcagctagatattagctatgattgcttagccatgcttagaaacattagcacactattgggataacttatgactcattatttaatgatggcttaatgatagttcacgatggtcaatcgtgattggttaattaattacttgccaactaaaacttgataatggtgggttgtgagcacatggttttgagagtcgtgctcatgacaattaaggaccggttcgcgagctactattgtgaaacattaatcgtgccaaccacaagccagcgtgggcaacggctttaccttttgtatagcatgattcattgcggagcaccagactgagaagtggcggagataagcccacgggggtcgctggggagtccatgccttgttttataagggggtgattatgatccaggaatggtgcactgtggtgagttgtgttgtacaaagggtattgtcacagcctctattcgggtactttccagtatcgcgacgcatggtagacatgatgttgaggctgtgtcttgtgggtacagtggtacacctctggccagagtaaaactattcgaatagccgtgcccgcggttatggacgagttgagcaatgtttttcgtgattagtctcacacctctcacaataattatggatgttataactggtaataatttgcttagctccggtttggaatggataattcctggtttggagattagatctgtacagccgggtatggttgtttcagaatggttgggcctgagcagcataggcatgttgttcagtgttgattaaaatttttgattaattactccactgttttacttctcttaaatgttttgttaaatgctgcttttgcaaatgagcctatattatgccatcctttggtatccttgtgcacttgcatatttgctgtgtggcttgttgagtatgtcatatgctcattcttgcaataatcaatcaacctcagttgaagacaagttgcgaaggagaagacgtttggctcataccccagttgagctgcctgtgggagtggagccggagcttcgctagattttattttccgctgcagttttcttcttggtgaggacttagtgcctcttaagtaagtacttatcgttttagttaatttgatgaatctgtatattaaattgtcagtttgtgtacctcggctgattcctggacgaggattttatgcacaaataagtttggaaatcacttgtgaatttccgggcgtgacatgtaccccggctggtcctggacggggaatttaatgcacattctgcttgaaattctattcgggaatttctgggcgtgacaagttggtattagagccgaccttgaccgtaggacaagccaaatggaaaaacctaaaagccctctgaatccttttcattgcatatgttcttggcaattggatttgttccgggaaaattgggatccgttcttgtggttcaagggaaaaatcttggtcgctcgtttaagtgagatttgtcaaaacgagtcaatctagagttttagtaaaactcttgagatttattcgttagtcagttgggatttgatgggtgaaatgcattaggtcctagctcaggaacatgggttgcaaggtatttcagctcttattgttattattagtatgtatctaatttccccattattttatcgttatgtgagtctgtcttatttattcgcactcatgcaaaatgatctatgcataaaatttcgctcttattcgattctcttatttgagtcttttattgctttatttaaatttggatttgagcatgcattgatcctactcctttgtcttctctagatggccggacacccacccaaccaccgcggagaaggcatgattgattttgtggcagagttggcacgcatgacgctggtggtgggctaccccaacgcgccagagtagacgacggttccaccgctcagtggcgagcttcctcaccgtgttcgcttggaggtccatggctacgtgggtacctgcctagctaacatggtggttgaggcgtccggaggcacagcagatcacgcctgtcaggaggcagcatacctgatgatggccagactacgggagcgccacaactacatcttccatgacatggcataccgttttcaccctcgtcgagccagtggtgatgatgtcagcaccttccgtccgacaaccggccagaacgacaccacctttggtcacatgtgtgctgtgatgagtggattggataggatgcactcggacctgcacaaggcgaccaaggccttgaacgatgggaagctcatgaggatcgtcgctctgatggacgagatagcgcgcctgaagagggagaatgctcagttaaagggtcttcccgcgccaggaggagtccggatccgcaccacaccccgcaagacgacgacggcacccgtgcgcatccagcttgcgcccaggaacccacctccatcagcagctcccgcagcacctccagttccgcccgcagttcctgcagctccagctccagctcccgcgtccgctctctccttcgctccagcatcagccgccaggggtccagccagtggcaacggaggttggttgtctgctactcccagtggcagccgcgatctcagcagcagcagctccagtggctcagagtcgggcagcggcgagacttatctgccaggctccaggagtcgctcagagggacctggtgacgagcaggaggacgccttcgactccaccgaccgcaggagccgttccgagcattaggctcgttttccattagttaatcgactgtctagcttctgcttgttagtttgtgtgtttaggttgcttgcttggggtcagtcgacggtcgatatcatgtgcctatgatatggctgtcttaataaggattttcgcttgttttttttaagtgttttaattcagatcagaacaattgcagtttaaattcctttgtaataaagcttagtttctgagcttctgtttttcttcttttccccgtctgcttctccctccagatggtctacaccaggaatggtagccgcgcaacaggcgagggcagcaacggcgaagagcgcactgatggggcgcatccccacagcgattccggcaatggtccgccaccacttcccgagaatccgacgctagtccaagtaatggcacatcagacccagatgatggcagccatgatgcagcaccagcaccagcagatgcaccagcggatgctgcagcacgccgaacagcagcatcaacagtttggtccccctccccctcagtccaagttgccagagtttctacgtgtcaggccacccaccttctccagcaccaccaaccctatggaggcgaatgactggctccatgccatagagaagaagctgaatctcctgcaatgcaatgatcaggagaaggttgctttcgccacacaccagcttcaaggtcccgcgtcagcttggtgggacaatcacatggccacccgcccaccaggtactgaagtcacttgggtagagttctgccgtagcttcaggaaggcgcaggtgccagatggggttgtggcacaaaagaagagggaattccgggcactccatcagggcaacaggactgtgacagagtacctccacgagttcaatcgcctcgcgcgatatgcaccagaggatgtccgcaccgacgccgagaagcaggaaaagttcatggcgggtctggatgacgagctgaccaaccaactgatatctggggactacgctgacgttgagaggctggttgacaaggcaatccgtcaggaggatcaacgcaacaagatggacaggaagaggaaagccgcacagttcagggcacctcagggaagtcaccagaggccgcgcttcgctcccaggcagcagggtggacctaccaccatgatcgttcgtcagcaccgcccgttcaaccctagcaactttccccagggcgccagtggcagtcagaaccaccatggaggtcagtccaaccgcggtgcagctccacgcccaccaatggcaccggcacagtcaggcccgcccgcgcaagccaagaaggagactggagcaaaaccagggtcctgcttcaactgtggtgagcttggccacttcgctgacaaatgcccgaagcctaggcgtgccgggccaaggtttatccaggctcgtgtcaaccacgcatctgcggaggaggcacaagcagcaccagaggttgtactgggtacgttttctattaactcaatccctgcaacagtactttttgattctggtgcaacgcattcgttcatttcaaagaagtttgttgggatgcatgggttaataagagaggaacttagcacaccgatgcgggttcataccccagggaatagctccacttcggttcaattcagcccttctataacaatagaaattcaaagatcaccatttctagccaacctcattcttctcgaatccaaagacctagatgtcattcttgggatggattggctgaccaagtttaagggggtcatcgattgtgcgaatcgcacagtcaccttgaccaacgagaagggagaaaccgtggtgtacaaatcactagtctcaccaaagcaaggggtctctttgaatcagattgaagcagaaatcccagtggacaccgtggagaagaatttgaggaaattggaagatatacccatagtctgcgagtatccggaagtgttcctcgaagacctcactaccatgccacccaagagagagattgattccggattgacttggcaccgggaaccgccccaatttacaagagaccgtacagaatggcggccaacgaattagccgaggtcaagaagcaggttgatgagcagctgcagaaagggtacattcgaccaagtacttcaccttggggtgctccggtcatttttgtagagaaaaaggataagacgaagaggatgtgcgttgattatcgcgcactcaacgaggtcaccatcaagaacaaatatcctttgccgcgaatcgatgatttgtttgatcaactgaaaggagctaaagtgttttctaagatagacctgcgatcaggctaccaccagttgagaattcgggaggaggatattccgaagacggccttcaccactcggtacgggctatatgagtgcacggttatgtcgttcggacttaccaacgcacccgcattcttcatgaatctgatgaacaaagtgttaatggaatttctggacaagtttgttgtggtgttcatcgacgacattcttatctattcaacgtccgaagaagaacatgaacaacatctccgtctagtactcgagaagttaaaggagcaccagctatacgccaagttcagcaagtgtgacttctggttgacggaagtcaaatttctgggccatgtcattacagctcagggtgtggcagttgatccatcaaacgtggagtcagttaccaaatggaccccgccgaagaccgtgtcgcagattcgaagttttcttggacttgcaggttattaccgccgattcatcgaaaacttctccagaatcgcccgacccatgactcagttgcttaagaaagatgagaagtttaaatggacaactgagtgcgataagagttttgaggagctcaaaaagaaattagtatccgcaccagttttgattctgcccgaccagatgaaagacttccaagtctattgcgatgcatcccgtcacggacttggatgtgtcctaatgcaagagggcatagtggttgcgtatgcctcgcggcagttacgtccacacgaagggaattatccaactcatgacctggaattggcagcagtggttcatgctttgaagatctggaggcactatctgattggcaaccgctgcgaagtatatacggaccataagagtctgaaatacatcttcacccaaccggacctaaatctccgacaacgaagatggttggaactaatcaaagactatgacatgagtattcactaccacccgggtaaagccaatgtggtggcagacgcattaagccggaaaagttactgcactgccctatgcatcgagggcatgtgtgaggaattgtggcaggagtttgagcatctcaacgtgggaattgttgaacacgggtttgtagccgctctggaggcacggcctacgctcgtggatcaagtcagagcagctcaagtaaatgattctgaaatagcagagctgaaaaagaacatgagggtcggaaaagcccgggatttccacgaagatgagcatggcacaatctggttgggagaaagattgtgtgtacctgacgacaaggaactgaaggatctgatactcaccgaggctcatcagacccagtactccattcatccaggcagcactaaaatgtatcaagacctcaaagaaaagttttggtgggtcagcatgaggagagaaatagctgaattcgtcgcactctgcgatgtttgccaacgagtgaaggcagagcaccaaagaccagcaggtttactccaacctcttcaaatcctggaatggaaatgggaggagattgggatggactttataacgggactgccccggacatcgtcgggtcacgactcgatctgggtagtcgtggatcgactcactaaggttgctcacttcataccagtacataccacgtatacgggcaaaaggttggcggagctttacctttcgagaatcatgtgcctacatggagtacccaaaaagattgtatctgaccgagggagtcagttcacctcaaaattctggcagaagctgcaggaagaattggggacccgtttaaatttcagcacggcctatcacccgcaaactgatggtcagaccgagcgagtcaatcaaatcttggaagatatgttgagagcttgcgctctcgattttggtggagcttgggacaaaagcttgccatatgcggaattctcgtacaacaacagctaccaggccagtctacagatggcaccgtttgaagctttatacggccggaagtgccgcacacctctcttctgggatcagacaggcgagcgtcaactgttcgggacagaggtattagcggaagcagaagagaaagtcagaatcatcagggaaaggttgaggattgcccagtctcgacagaagagctacgcggataaccgccgaagggagctcacttttgaggcaggagattacgtgtatcttcgtgtcactccgctccggggagtacaccgttttcagacgaaaggcaagttggcaccacgcttcgtgggaccatacaaaatcttggaacgaaggggagaagttgcttatcagttagaacttccatccaatatgatcggtatccatgacgtgttccacgtgtcccaattaaagaagtgcttaagggtacctgaagaacaggctgattcgaaacacattgatatccaggaggacctaacatacgtggagaagccgattcgtatacttgataccagcgaaagaagaaccagaaacaaggtcaacaggttttgccgagttcagtggagtcatcattcagaagaggaagcaacctgggaaagggaggatgagttgaaagccgcccatccgcacctcttcaccagctcctccgaatctcggggccgagattccgtttaaggggggtaggtttgtcacaccccgaagttctcctcccaggcctaaaatttaatttataaacgaccccccaagaaaatgcaggtgcaaatcaagagaaaaccctaagaaagtaatgcaaataataatcggatttgacatgtggaatttttcttgagttctacatgtcgaaattcattaacaggatttttagtggaattttcagagctctagaaataattttaaccaattaaaattgagcaagcaatattttaattccagggaaaatcctttttccttcttctttttctttttcctccctttttttttcctccttttttcgaatgggccgccggcccattctctccttcctccccctcctccctgctgggccggccgcaggccgaggcccagccaggccggccgcctccctcctctccccggggtcgccgacaggtggggcccacctgtcgggcccttccccaacctacggccactcgcccacgtnngccatncgccgcaccccgccttcttcggtccacatcggccacgcccgtgcgtgcgccgngccttncgcacccactcccccttttttttcngcgngcctcaaccgagatggccgggattcaaatttgaatcccgccgctctctctctctctctctcccccaccttcaacctcccacgtcgccgacgaaatcgggagcgcctcggccacatccgtctctcccgagcccctataaagcatgcccgcactcccctccaccttttttctttttccaccgctctctcccgtgccctccattgctcccgcgccgtgcgcccatccgccgccgcctctcccgctactccggccgcctctagccgccgcaccgcgccgtcgccgccgttgggttcgcgcagccgaggtccaccccgttcacccctcctccgtcgaggttcgtcgccggagccctcaccccctcgcactctggtgagcaccatctctaccgccgccttcggccatggtttccgcccgccgtggaccacccctctccctctaatctctctcttttcctttcttagggcatctcggagctcgtccgcccgccgacgtcgtcctcccgtggctcgtcgtcgccggtcgccgccgtccccttcggtgaggactcccacccctttcctttccttcccccgatcccccgtgcgtcgccgtcgcccgcgctcgccgtcgccttcggtcgctgccgccatccgttgccgccgtttccgcgtcgttttgcgccgtcgccccgccgccggatgcgccgccggcaacgcgttcgcgcgcgcgccgtcgccgcggccggtcggccggccttgagccaagccgagccgggtgccgccgccccttttctttccccccgccgctgaccagtgggccccgcgtgccggcgcccttcctctctctcccgagccgctgactggtgggccccgcatgtcggcgccgcttccccgtgctgatgtcagccctggaaaatattgcgcaataaattatttaagaatttttgttatagtaataaacacagtgaatcttctaaaattcataactaattcatccgagctccgtttaagcccattcaagtctcagtaaatcaagagtaatgtgtagaatccattaaaaatggttttgttccctgtttcagtagtcttatagcctgtttgcattgtttgctttgtatgtcgctagattccgactcctccgacgctccggtgtacttcgaaatagtcgccgaggttcctccagcagcagagcaaggcaagtcatgcttgtcacttgaacatgttgatcctatattgcaaatgctctattgttttctttcaaatattgcattgttttataatattactatgggatggttacctattgttacagctatgctttttggataccatgctcctttgttagcttggggttacaacatgattagagtttggactaggaattgcttagccatgcttagttcaactagttcacaatggggaaaatcctattaatgtttagactgttggttctaatggttttgttggattagtgccaccgctttggtgttggttaattaaaataaatcacatggtgggctgtgggtgcatggttttgctggtcgcacccatggcagttaaggaccggttcgcgggatgccctgaaagaacttatcgtacttaccacaagccagcgtgggcaacggctgggcttgtagtgtagctctcatctagtcgacgcatccaggcaagggtgggcgtgatggagcggggcgggccctgcgacggcctctgtcgtttccggattcacctaggcacgagaggggactgcccgttgcccgctggggacgggggtgaaacctgaggtgtggtgtgcttggctagagggggttatgcgaagggtcctgtcacggcctctttctgatatgtcgtggtggcatgtcggcgcatggaaacgtgtcgtggggctgtgtcttgtgggtacagttgtacacctctgatcagagtaaaactattcgaatagccgtgcccgcggttatgggcggtcaaccagattcaccgtgattagtctcaccctagtgtaatcttttgaaattggatagtttaggtggatggttgggcctgtcgcaacgtgggttagcgttgggcagtggatagttgatattaattaattattacaacggtttaatctttcaacttctgtttataaatgctcgctttatgcaaatgaactgctctagctcttctttgataattccctgcatcatacccctattccggtatgacttgctgagtacagtgggtagtactcagtcttgctctacttttcccaacccagagttcgagtttgggtcagatgaaggtttctctgaggagtaggcttcgtccgtgccgtcgaggatgcctgtggagtggtgttcccgctgcagtttagtcaaggcttagctcctgttgtctttcttttcttccgctgcatttatgtaagacttttatgatgtttgtaagacgtggatctgaatgtcaacattgtcgtttgtgtactgtcacatcctgatttttgtttcaggatttataaattatttaataaattattaatagaatttatattaaatgatctttaatttacaagggaagttaaatgtgggaaataaaatttcctaaatataaagcatggatggatttaatttttattaaattctccatgattaagtcaactctctgaaattttctcggatttttcagagctcaattcctaaatgatacaaagaacagttcagtaattatttgatcattaatgatctaattataattgttaagagcttttctggtttaaaaatccttaaattataaattgttgtttaaaaggaattattagaaatgattttaaaagcctaaaagagaagatctaattttaatttgctaaatctcaatataaaattgggctagataaaattttattaaatactttgcttaattctataattcctagattcttctgggatttatttgagctaaggaagtatttttaataaatggaattgcatttcatgaataatttaaattgaaaaaggtttttaaaagtcttattttggctttgggccgaaagtcggcccaaaacccctctctctttctctctccctccccggcccagtcggcccagtcagcccgcgctccttccttttctctctcggtgtcgctgacaggtgggtcccacctgtcaggttcgtcttcctcgcgccgtcgccgccgcccgaaaccctagcgcaagccgccgccgtctccttccaaattcggccgcgcctttccttctccggccgaattgattgagggcaattgatccttgagatctcctcttccttttctcttttggaaacatcggctaattttctttggaaaccggtggatttgagttggattcggattcatctctctcctctaaccccgacctttccttctcgtcgccggcagccgtgggccttcactgccgcctccttgcccctttaaaaggacccccggtgtctccgctacccgccgcctctctcgccttcgcccgccgtcgtgtgtagcgccctagcctcgtgagcttttgcgccgccgtcgccgccgttcgtccagccgtgcgccgccgtcgctacggtcgtcgtcgtcactcgggaaggccaccgtcgggatcgccaagtcgtcgccgtccccgtccgccgcttcgccgtcgccgaagatcgccggagcaccgtcgccgccgtcgacccgatctccgccgccgcttcttcctcgtcgccgtcgccgtccgttgttcctccgccgcttctttggtcaccggtaagttcgccgcgccgcgctctacgtcctggtgccctccgttctcgttgtcgcgccgtcgttcgccggcgagcttgcgctcccgacccgccgccggtgctgacgtcatcgttgccgttccccgtgagccggtcgtggaccgtttgatctcggccttccgttttgaatagggttgatctcgaccgtccgttcccgtgaaccgtcgccgtgcacccggtccaccgcaaaccctagccgttgatgcaataaatcctttttccttttcaaaaataattcattattgcgtcataattcaattaaaatccatataagtgttttaatccgatttaatctttaaaaattcataactaattcatttgaactcagtttaatgtggttcaagttgcaaaaattatataaaataaagatctacatattaaaattgtccataaattgaattaaatttatttaattctttttaaatgggctttaaatagatttaatcttgtaaaattcgtaataaattcatttgaagtcagaatgaggccgttcaagtctcataattcatctaaaattatgatcgacatgtttgtttattttttatgtattgtttaattggtttttattagtctttttcctcgttttgcgtgatagcttgtcgtttccgttgttgcgaaggttcgtgagtgcgccggaagtattcaagaagattaattgaagaccgattattgcaaggcaagtcacacagatcctaaacacaatcctttgagcatgttgatcctatatttaaattctctatttatttcaactgtgcatttattttcgaatgtcactgggtggtgtgaacctattcctttgttatggcctgttttcattgattactttattccttgataccttgggtgattataattggactagttgagctttatatatattggttcaactagatattagatataattgcttagccatgcttagaaacattagcacactattgggataacttatgactcattatttaatgatggcttaatgatagttcacgatggtcaatcgtgattggttaattaattacttgccaactaaaacttgataatggtgggttgtgagcacatggttttgagagtcgtgctcatgacaattaaggaccggttcgcgagctactattgtgaaacattaatcgtgccaaccacaagccagcgtgggcaacggctttaccttttgtatagcatgattcattgcggagcaccagactgagaagtggcggagataagcccacgggggtcgctggggagtccatgccttgttttataagggggtgattatgatccaggaatggtgcactgtggtgagttgtgttgtacaaagggtattgtcacagcctctattcgggtactttccagtatcgcgacgcatggtagacatgatgttgaggctgtgtcttgtgggtacagtggtacacctccggccagagtaaaaactattcgaatagccgtgcccgcggttatgggcgagttgagcaatgtttttcgtgattagtctcacacctctcacaataatttatggatattataactggtaataatttgcttagctcctggtttggagttagatctgtacagccgggtatggttgttcaggatggttgggcctgtgcagcatgggtgtgctgttcagtgttgattaaaatttctgattaattactccactgttttacttctcttaaatgttttgttaaatgctgcttttgcaaatgagcctatattatgccatcctttggtatccttgtgcacttgcatatttgctgtgtggcttgttgagtatgtcatatgctcattcttgcaataatcaatcaacctcagttgaagacaagttgcgaaggagaagacgtttggctcataccccagttgagctgcctgtgggagtggagccggagcttcgctagattttattttccgctgcagttttcttcttggtgaggacttagtgcctcttaagtaagtacttatcgttttagttaatttgatgaatctgtatattaaattgtcagtttgtgtacctcggctgattcctggacgaggattttatgcacaaataagtttggaaatcacttgtgaatttccgggcgtgacatgtaccccggctggtcctggacggggaatttaatgcacattctgcttgaaattctattcgggaatttctgggcgtgacaagttggtattagagccgaccttgaccgtaggacaagccaaatggaaaaacctaaaagccctctgaatccttttcattgcatatgttcttggcaattggatttgttccgggaaaattgggatccgttcttgtggttcaagggaaaaatcttggtcgctcgtttaagtgagatttgtcaaaacgagtcaatctagagttttagtaaaactcttgagatttattcgttagtcagttgggatttgatgggtgaaatgcattaggtcctagctcaggaacatgggttgcaaggtatttcagctcttattgttattattagtatgtatctaatttccccattattttatcgttatgtgagtctgtcttatttattcgcactcatgcaaaatgatctatgcataaaatttcgctcttattcgattctcttatttgagtcttttattgctttatttaaatttggatttgagcatgcattgatcctactcctttgtcttctctagatggccggacacccacccaaccaccgcggagaaggcatgattgattttgtggcagagttggcacgcatgacgctggtggtgggctaccccaacgcgccagagtagacgacggttccaccgctcagtggcgagcttcctcaccgtgttcgcttggaggtccatggctacgtgggtacctgcctagctaacatggtggttgaggcgtccggaggcacagcagatcacgcctgtcaggaggcagcatacctgatgatggccagactacgggagcgccacaactacatcttccatgacatggcataccgttttcaccctcgtcgagccagtggtgatgatgtcagcaccttccgtccgacaaccggccagaacgacaccacctttggtcacatgtgtgctgtgatgagtggattggataggatgcactcggacctgcacaaggcgaccaaggccttgaacgatgggaagctcatgaggatcgtcgctctgatggacgagatagcgcgcctgaagagggagaatgctcagttaaagggtcttcccgcgccaggaggagtccggatccgcaccacaccccgcaagacgacgacggcacccgtgcgcatccagcttgcgcccaggaacccacctccatcagcagctcccgcagcacctccagttccgcccgcagttcctgcagctccagctccagctcccgcgtccgctctctccttcgctccagcatcagccgccaggggtccagccagtggcaacggaggttggttgtctgctactcccagtggcagccgcgatctcagcagcagcagctccagtggctcagagtcgggcagcggcgagacttatctgccaggctccaggagtcgctcagagggacctggtgacgagcaggaggacgccttcgactccaccgaccgcaggagccgttccgagcattaggctcgttttccattagttaatcgactgtctagcttctgcttgttagtttgtgtgtttaggttgcttgcttggggtcagtcgacggtcgatatcatgtgcctatgatatggctgtcttaataaggattttcgcttgttttttttaagtgttttaattcagatcagaacaattgcagtttaaattcctttgtaataaagcttagtttctgagcttctgtttttcttcttttccccgtctgcttctccctccagatggtctacaccaggaatggtagccgcgcaacaggcgagggcagcaacggcgaagagcgcactgatggggcgcatccccacagcgattccggcaatggtccgccaccacttcccgagaatccgacgctagtccaagtaatggcacatcagacccagatgatggcagccatgatgcagcaccagcaccagcagatgcaccagcggatgctgcagcacgccgaacagcagcatcaacagtttggtccccctccccctcagtccaagttgccagagtttctacgtgtcaggccacccaccttctccagcaccaccaaccctatggaggcgaatgactggctccatgccatagagaagaagctgaatctcctgcaatgcaatgatcaggagaaggttgctttcgccacacaccagcttcaaggtcccgcgtcagcttggtgggacaatcacatggccacccgcccaccaggtactgaagtcacttgggtagagttctgccgtagcttcaggaaggcgcaggtgccagatggggttgtggcacaaaagaagagggaattccgggcactccatcagggcaacaggactgtgacagagtacctccacgagttcaatcgcctcgcgcgatatgcaccagaggatgtccgcaccgacgccgagaagcaggaaaagttcatggcgggtctggatgacgagctgaccaaccaactgatatctggggactacgctgacgttgagaggctggttgacaaggcaatccgtcaggaggatcaacgcaacaagatggacaggaagaggaaagccgcacagttcagggcacctcagggaagtcaccagaggccgcgcttcgctcccaggcagcagggtggacctaccaccatgatcgttcgtcagcaccgcccgttcaaccctagcaactttccccagggcgccagtggcagtcagaaccaccatggaggtcagtccaaccgcggtgcagctccacgcccaccaatggcaccggcacagtcaggcccgcccgcgcaagccaagaaggagactggagcaaaaccagggtcctgcttcaactgtggtgagcttggccacttcgctgacaaatgcccgaagcctaggcgtgccgggccaaggtttatccaggctcgtgtcaaccacgcatctgcggaggaggcacaagcagcaccagaggttgtactgggtacgttttctattaactcaatccctgcaacagtactttttgattctggtgcaacgcattcgttcatttcaaagaagtttgttgggatgcatgggttaataagagaggaacttagcacaccgatgcgggttcataccccagggaatagctccacttcggttcaattcagcccttctataacaatagaaattcaaagatcaccatttctagccaacctcattcttctcgaatccaaagacctagatgtcattcttgggatggatgggct

SEQ ID NO: 9828 - DNA, 5126 bp, Oryza sativa
tggcatgagaagtttgacaccacgcttacagctgcaggctttgttgtgaacgaagctgacaaatgtgtatactatcgctatggtgggggagaaggggtgatcttgtgcttgtatgtcgatgacatactgatctttgggaccagtcttaatgtgattgaggaggtcaaagactatctgtccaagagttttgaaatgaaggatttgggagaggctgatgttattcttaacatcaaattacaaagaggagatgagggtgggattacacttgtgcaatcccactacgtggacaaggttttgagtcgctttggatatagtgactgcaagccagctcctactccttatgatcccagcgtgctattaaggaaaaatcgaagaatagcaagggatcaactgagatactctcaaatcattggttcattgatgtacttggctagcgcaacgaggcctgacatctcatttgctgtaagcaagctgagctggtttgtctcaaatccgggagatgatcattggcaggctctggaaagagtaatgcgctatctaaagggcactatgagctatggaattcactataccgggtatccaaaagtactagaagggtatagtgactcaaactggatatctgatgctgatgagataaaagccacaagtggatatgtgttcacacttggaggtggcgctgtttcctggaagtcttgcaagcagaccatcttaacgaggtcaacaatggaagcagaacttacagcactagatactgcgacagttgaggccgagtggcttcgtgaactcctgatggatttgccggtggttgaaaaaccagtgccagctatcctaatgaactgcgataatcaaacagtgattattaaagtgaacagttcaaaggacaacatgaagtcatctagacacatcaagagaagactgaaatctgtcagaaagcagaaaaactccggagtgatagcattggactatgtccaaacggctagaaatctggcagaccagtttaccaaggggctaccacgtaatgtgatagacagtgcatcgagggaaatgggcttgatacccacctaaggttgcataatagtggaaacctgtccattgtgatcggagatcccgtgaatttggatggtgaaacaaactattgtgtgactgagagaagagacccttgaaaagggctcatttccatgatgtgcttctcttctttcctgcatggtaggatggcttatgtcttaatgtgatccgagtggcttttccaagcagagatgttgacctgcagaacatctcagaaggaacacacctatatgagtttgactgctagtcacagtctatgaggtttgggcaatctctagatactcatgaaaggcctggagtttgacttatatgctccaaacagaggggatgcgaacggcagcccagtaccagtcaaggttctgagtgaaacctgatcacacaaaacttacaattcaaggcatagtccattgttcagttgtggtctgatgtagctcatttcctaggtggaagttcaacttaacagtctccaccaaaaccctggtatatcaaacaggcacaacattgagaacatttcttatgagccttgaaatttggtggggattgttagaataattgggctaggcccaatttataataattaaatctcaaaggcccataataaatgttgaggataataataccacctcaggatttaagcgagaaatatctcaacctaaatagggagttattagaggctccctgttgaccagttgaggtaggggtcggaatgccacacgcgcgcgcgcgcgccgggccgggccgtgggcgtgggcgatggcgagggcaaggcgaggcgtggcgtggctggctggcggtgtgcgtgcgtcacgtcacaatccttttgcagccactaacccacgttcccacgattccctccgcaacagcgcgtccacgttctttctcctgatagataaggaggccgcgagtccgatccgacttcttagcttttttcccggtgttagtttctccttctccgcgcctgagttgctctcgcttccccgcttctgatctcttgcgcgcacgagagattggaagaagcagtgcctccgaaaccacacctttgcctgagatctgcaccgggtaggcgggagatcaggtttttggggagtgcctcctgcacgactgctcatcgccatgtctggagttgctgctgccgccgctaccggtggaggtggtacgccgccgccgacaggagctggtgcgccgccgccgacaggagctggtgcgccaggaggaggtgccgtgaacgactacaacaacggaggcaattctgcctcaccatccagcggagggccattctcggggtataatcttctcctcctgctactgctgttagcgctattcctgttcccattgttagcgctatactgtgtgcgctatgttcttgttcctgttctacatgatgcctctagcatgttatcgcgttactggtatgttcctgtttctgacattcatgatgcgcatagtatgctactggttatgttaagatcaccctacactgcttatgccatgatcattgtttcaatttcttggattaaaatatgccgaataatgactatatttccaacacaacctagttcatctgcataccgcttcgcttcttctttctcccatgtgtcctgttcatcttcttcccagcgccgagcacatgtcgccatgaactccaagacgccggctgatgcttgaggatacctagttgatattttttttgcaaaaattggaggataggctagagcctgatggagcctacctgctagaatcgccactggccgtcacctttagggtttgggttttgcttattctgtcaagaacagtttcgccgctagatcggtttgtaaggcccgaacttgtgagcttaatcattcatctgcaattttggttgtattcttctttgttcctatttgtgttctttgattcgcaaatagggattagccttctcggcaaggtcgtccgcgtttcaacacgggtgataaccagaggagacatggtgctgcgattgcagggctcaagagcgtgttcgttcaagaagccgaatcgatttgtgtcgcgactccacccaaatcattgattatcagaaccttccgaaagatcgaaccctagtccacgtcactttccacgcaaatagaacaattgtgctattggaatagcgatagcagaactacaatccgcatagttcagaaattcaagtgcataaggaaagatgtaatctcaccatttgtgagcacatagttagaaaataaaacttttcttgctttacccgcatgcaggccagtcatttgttatcagaatagaatgcatcaagaattcgacatacataacatgtataagaataagtgattaatagcctgtaacatgaaatatacgatgatacccagttgcccattgcagataccaaaacacataccccatggcagcttgtttaatataactgatttccaacgagacagacaaacacaagaaaatctttgttagcaatactaatggacgtgcagtgaaatagagggatttgcagtcttcaagcaggtaagagtgtggggtgcagtttgcttcaatccacattatgctacttgcaagattgcctaagaagaattcagactacatgctgaaaataataactcactgattcatcaggtcaatacattaaaatactgatggatcattaagtctacataactagctaataaataaaaatatgtgggcactgtctataattagattcatcacattgacccgcatgattagataccttcaatctcaacagtcatgcatacgcagggattacctaatctgcataataataagacctcgcatcaagtactggggcaaaccgcgcattgaggaattctaagggttacaggactgggccgcaccggtgtcatgccatgcggcagggagcagaaaacagtgtcttgctagttgctagttactagcttctcgccggtcatccattgttagaagtgcagaagctctgaaatcttacgaaatgaacttggttgatgctaagaagatcactttccctttccttgatccaaaatctcccttttttggttctctgcaagttgcacaagaatcaatcaccgagttgaatctgagcaaacaacgaatcaaatagcccgaagcacatgcccaggcatctagggccaacgccattcgtagatgaagctccagacgttgagcatgacggagagatgaaggtgatgcctatctagagaaagacatacctcggcccggccagcacactgagctcatttgatgttgggaggccgttggattgacctgtggcggaggcaatgagagaggcgacgagtgaggtgatgaggaaggcgacgagggaggcgatcccctcgcatggttggccggcgaggtacacgcacgccgatgtgcttacgccggtggcgagagctccctctggtgatagagccccctccggtgatacggtggggagcacagttcgccgtgaggggaaggaaccgatggaggagtctcgggttcgtgatggggaggggacgtcatcgccttcgttttccggcgatcgccgacttcggaggtcgtcggagtgctccgcgggaggtttccttctgaagagatggctaggccttcgacacatggggttctagctgggatggtttgggctagcccagcacacatgcatgacgtcatcaatggcggcagcccaacatctacagtacagcctaatactgttggagcccatgcggagagttcgagagctattgggaaacctgacttttccccaagtttatcccctcggtagagcagtggatttgggtgaagcaaggagaggtgcaaccaaagctagggttccctgcgagaggtgaggaagtccggtgatttggtagtggtgctcgccggatctggagagttccagagcgcaagcgcgaccatcgttcatacacagaggtggtgatggacaagcgccctccaaattcggccggagtggcaagtcaacaagcgaagggtgacggatccgattagaggtggagattaggggaaccgtgatgcgcgcgaagaggatgagcttcgacgccaacttctcgctcaaaatccaacggggaatctaggtg

SEQ ID NO: 9829 - DNA, 13049 bp, Oryza sativa
acgaaatcgggagcgcctcggccacatccgtctctcccgagcccctataaagcatgcccgcactcccctccaccttttttctttttccaccgctctctcccgtgccctccattgctcccgcgccgtgcgcccatccgccgccgcctctcccgctactccggccgcctctacacttgccgccgcaccgcgccgtcggcgccgttgggttcgcgcggccgaggtccaccccgttcacccctcctccgtcgaggttcgtcgccggagccctcaccccctcgcactctggtgagcaccatctctaccgccgccttcggccatggtttccgcccgccgtggaccacccctctccctctaatctctctcttttcctttcttagggcatctcggagctcgtccgcccgccgacgtcgtcctcccgtggctcatcgtcgacggtcgccgccgtcccattcggtgaggactcccacccctttcctttccttcccccgatcccccgtgcgtcgccgtcgcccgcgctcgccgtcgccttcggtcgctgccgccatccgttgccgccgtttccgcgtcgttttgcgccgtcgccccgccgccggatgcgccgccggcaacgcattcgcgcgcgcgccgtcgccgcggccggtcggccggccttgagccaagccgagccgggtgccgccgccccttttctttccccccgccgctgaccagtgggccccgcgtgccggcgcccttcctctctctcccgagccgctgactggtgggccccgcatgtcagcgccgcttccccgtgctgatgtcagccctggaaaatattgcgcaataaattatttaagaatttttgttatagtaataaacacagtgaatcttctaaaattcataactaattcatccgagctccgtttaagcccattcaagtctcagtaaatcaagaataatgtgtagaatccattaaaaatggttttgttccctgtttcagtagtcttatagcctgtttgcattgtttgctttgtatgtcgctagattccgactcctccgacgctccggtgtacttcgaaatagtcgctgaggttcctccagcagcagagcaaggcaagtcatgcttgtcacttgaacatgttgatcctatattgcaaatgctctattgttttctttcaaatattgcattgttttataatattactatgggatggttacctattgttacagctatgctttttggataccatgctcctttgttagcttggggttacaacatgattagagtttggactaggaattgcttagccatgcttagttcaactagttcacaatggggaaaatcctattaatgtttagactgttggttctaatggttttgttggattagtgccaccgctttggtgttggttaattaaaataaatcacatggtgggctgtgggtgcatggttttgctggtcgcacccatggcagttaaggaccggttcgcgggatgccctgaaagaacttatcgtacttaccacaagccagcgtgggcaacggctgggcttgtagtgtagctctcatctagtcgacgcatccaggcaagggtgggcgtgatggagcggggcgggccctgcgacggcctctgtcgtttccggattcacctaggcacgagaggggactgcccgttgcccgctggggacgggggtgaaacctgaggtgtggtgtgcttggctagagggggttatgcgaagggtcctgtcacggcctctttccgatatgtcgtggtggcatgtcggcgtacggaaacgtatcgtggggctgtgtcttgtgggtacagttgtacacctctgatcagagtaaaactattcgaatagccgtgcccgcggttatgggcggtcaaccagattcaccgtgattagtctcaccctagtgtaatcttttgaaattggatagtttaggtggatggttgggcctgtcgcaacgtgggttagcgttgggcagtggatagttgatattaattaattattacaacggtttaatctttcaacttctgtttataaatgctcgctttatgcaaatgaactgctctagctcttctttgataattccctgcatcatacccctattccggtatgacttgctgagtacagtgggtagtactcagtcttgctctacttttcccaaccccagagttcgagttcgggtcagatgaaggtttctctgaggagtaggcttcgtgcgtgccgtcgaggatgcctgtggagtggtgttcccgctgcagtttagtcaaggcttagctcctgttgtctttcttttcttccgttgcatttatgtaagacttttatgatgtttgtaagacatggatctgaatgtcaacattgtcgtttgtgtaccccggctggtcctggacggggaatttaatgcacattctgcttgaaattctattcgggaatttctaggcgtgacaccgtatgcccgttgggtacaggttttgacctaataaaaaacccatgggtactaaatggagaataaacctaattctattagggtttttacccatgggtaaataggcaaacatgtcaaattgccatccctaattgcattggctacaatgcgtagggcaatttggtggatacctggctacaaacctcacccgagcagcccttatccagatgagcgacaagtggttgaggaagggatcctatggtgcgactgcacggctccaattgcgtgaagagacggacagctagccgcatgcacgatctccacgcgtggaagcgcggctcggctccgctttgctcgttgctggggatgcggactacgcggctagaagcagaagcgacgcatgtcatcaccgcgtctgtttagggtgcttaagattacgggaagtagttggttggtggtcaatttctgagaatgtgaaaaagctaagtttcccagcgtttgattaatttctagtttattttctatattaaataactacagttttttagaatcaaagctatattatttaggggaccttttaattatgagagaaactatatcagctagaagcttcccgaacagactcatttattgccgctttgctcatacttgaccttcgtgcgccagattgccgccaaatcatcgacaaccacagctgccatggcagggaaatcgagggacgcagtagctgccatgcatggcaggaggaggctaggagaaggacctagcctctacagcctctatgcctagttctttgattgtcatgtatattcatcaatttcatttgatttatcgttcatgatgcgtgctgtgacggaggtagtataaccaatataagtctacctttacttaaataaagtaatctattagctacgttttaatgaaaaatatttttcattactataataaatccataaagtcattgatagcatacaagaaaaattgttagtaaaattttggaaactgatatgctagatattttaaaaaaatcacacatagtacaaatagatataaaccaactccattattatgacacattttttttaataattttagtatggagtttatatgttgcaagggtaatcagaagaaaatcataactaatgtccaaactacttcgttattaaccaatacatgtttacaaggagtaaaaaaatacttcaacaatataatatcatccttaacattcataataaaaatgaaagctacattaaacaaggtgcccttcctagttaactatataagtgccatatatatactagacaaagacgataaaagaagtcattatcaacggaggaagtaaggagaagctgtgtgccttcgaattttggctcggagcaactccttgttagcaccaggaatcttgtcaatcttctccccatccttgacgaagaaaaatgttggcactatcccttcgatgtcataccagtccgtaacactctccagctcatcgctgtcgacattgaccttaatgaaaaccgcaccagcgaactccttcgcatactcggtgaaagctggcgcgatgtagcgtgaagcagggcaccgggaagtagtgaactggatgactacgagcttgtgggattgcttggcttggctcatgtggagggcgaactgctccattgtgtggggcacaatcaccgtcccttccgcaccggtgggcatgtcttcttcgatacttatctctgtagtagtgtatgttttgtgttggtgtgcaattatggttaagacatgagttagtaccatgggatatatattatacacgtttgcgctaaaatgcacccaagatgcgcaatacctaaaacacacacctcacgtagtaaattctttactgaaagttatgctgtcctcaaacacctcgtaaatattttactaataggctcagtatgggtatttggcgataattcatatctcagtaaacaaattactagcactgggtgtgttttaacaaatgtcttgacttgtgcaatatataaaggatactatagtgcatacacctttcgttctttgatccaagtgttagggccaacattctacggttcttaaggaggtaagactaggaaccacaccttctaggtacccgagaaaatataggacctcccattaattccttaagtagatgaactgtaactgtaaaatgacaagaaacaaaattacctctactctgaagacgtgaagaggattccggtagcatacaaaacctgattcagggtcacaacaataacatttaacttccattaaaattggtttcaaacaatcatcaagtcaggttgaagatgcatagaaggtaaagatagaagccacggcagagaaagaaagaagctcaataatccttgtaagttgtaacctgggaatagaatgaaaaatccatacccgtgatcatcttgttgtgccaaatcttcatccaagtctctcccttcagcaccaaagatccaatccacccattgtatatcaaccataagagtgctcggcgtcggatgcttgcgaattgcagtcctcaaggcagactccacttcagttttgtttgattcatcatcatcagtgcccccaattcttgcagagatctctgcaagggcgaccaagtgttccaaccctgtctccttagagtcatactgcttgaactcgttggcattgaaccttagatttaatctttgcacactcggcattgctccttccacaaaagtcatgcatggtgctgtacagacaaacatgaagtacttgagagacccgaacccctcattcgcagcgacgattctttgcgcaggcgctgttcgaacaagcagcgaaagagcagtgagagatcccagtcctttgagagtgtcaaggtcatcctgggaaatttgcatgactgcaatgtttaaaatgcggagattgttgagctttccagtccatttggggatgctggtgaagatgtacctgtgacagtgagggagcagatcaagtagtacaagacgaaggtgcaacaaacactgtgtatgaacaatatccaataggacagcagttgctcttgcatctgcttccagtgtctgcaagtgttgtagtccttggatcttctctggaagtttaactgtgatattacctgttatcttcagatatctcagttgtaacagttcagaaatgcttgtgaggtcatagcttgttttctcttgatcagcccaaaaacaaagaatcagaactcgaagaagcctataatctgcaatggaaggcatacacttgacttgtccgaaaaatgccatcgatcgaacttgtgagagtctcaaacctgctagtggtgttgtatcatgtgcattgctgaagtgaagcgagagtcggcgaaccttgtcagcatgtcttactgtcgtctgagaatgatccaatgtaatgctgaaattctcctctattgacttacacctgatgaaatttaataccatgtggtgcactacacatgacaatacctcatttttgcagttaacatctactggttggaccaggcccctaccaacaagttcatcaaaatagttccctgcaacttcttccatgactttattttctatggaattgatgaaaccttcagccatccattgcctcaccaagttggccttcctaattatgtagtcctctttgtagatgctaaggtataacagacatgctttcaaacaatgaggaagattattgtaaataaggttgagtacttgcctcatcccctgcaaagtaggatttttcttcaaattggaagtagtcaatgatttttgtatgtgattccattgctgcattccatctaacagctggcttttaaaatgtctggctgttatagttattgctagtggcaagccaccacatttttttatcatgtcatgagaaacttcagtaagatgtccaggaaattcatttccttggccaacaactccactgaaaaacaattgacttgagacatcatcacccagtggatcaatcttaataatgtgctctgagttatatccacagcatgccaaagctacaggttcaatttctgttgttattagtattctactgcaactattattatcaggcaaaccacggctaacaatatcccacattgatgaagcccataaatcttcaattatgatgaagtacctgcagaacatttagtacttcgtaaacattaaacttctaatgtacgaaaaaataaatcatatttaaaaagctatacgtgggatagcatgctgaatttaaaaagttgagtgcaatttcattttatcaactttgcaaacatggtgaagacatgttctatatcttgtaaatttcagaaattaaatttaaccacatatctaagagcaagtttaatagtatagccgactactagctccaaatcatctagagccaaatagccaattcatacaatagttgcttactatactattaatacttggtcctacctgtcatacacacattacgtcttagagtccgtgctgcagctggctacagatctgtaggctgctgctcttctctctcttcctatatctctttaaaatatgtttatagctagcttataacctgctattgtacctgttcttagacatggaaaaagacacgtactcctaagcaaatactctctcttgtttttaatgtttgatgtcaaacttttggacatatatatgttagatcatccatcttattaaaaatataattatcatttttttaaatttattttatcattaaaagtaatttaagcatatattatatttttcatatttgtaaaaaatttgaataaaataaatggccaaacatatatacaaaatcaacattgtcagacattaaaacaagaggcagcagttaaattgcaccatttttatcactgtttcgttttagttatattttaaattttgtttatgtacaaatacgattgagtttagtctaattcttttttgaccgaacaagggaggcccttacgactattttttattaagtaaaaaaaagttcttgtaacaactgagaaaatgaaaagaaaataaattacaacttactgctataagttaacatgccattgtggtagtttagtctaaaaaattataacaagggtatgaagcatgtactttcatttacatttagtaattaaaaatacaaacaactttgtagttgttctactagtagtagaaataatgtactagtagtttagtcgcctaaaaaaaataacaagggtatgaaacatatactttcatttacatttaataattaaaaatacaaacaactttgtagttcttctactagtagtagaaataatgtaaacactttacctttattttttcatgcaatagaccatatctatttatattaacaactcaattgctgttagtagaatgaggtgggtataataattgtttagattaccagtataattcatggctcgatcgaatcgtatctactaatagagggcactataaaagtaatttaaaatattattggcattgtcgagtaaattaaattcatatgtatagttactaacttaattactatatgaaggataaaaaaggggaaatttgagaaaatagtttgtaaattcatgaaaaaaatactagagatagatgtagacatgaattaccttttatcttgcaaatgcgtccggatagtttcaaggagtcgatcaacctcccaaacatccgaagactgatgctgatgttgtggccgcagctgtgacagcatgtcggtgaggatcttcgtcatgtcaggcttccggggcgtccgcacgaaagcccggcagtcgaacggcgcatccaaccgccggccatgcagacgatagaattctgtggccagcgtcgtcttgccaacacctccggatccaacaatggaagccaccttgagcttcggctcgccgtcggccagccaccggacgagcttttgcatcgaaatatccctaccaacgagctggccgtgcacagcagcgtcgtccatcccgaacgtcagcgacagaaaccggcggcgttcgttgccggcggagtcctcgcgatcgtcgtcgtcgacttcttctctcggcctcgagctcgaggtgcgcctgccaagatggtagctctcctggcggcgaatggcctccttcacgcgggcgctgaacagggtgacctcgtcggcgatccaccgccgccggttaagctcccctcgaagccgggcgatcatgctgctgatcatcttcttggcaccagcagtgctactgccatcgccgccgccgcggtggtggaggagctgggtcgttagctcgtcgaggaagtcgtcgacgtcgtaggagagctcgcgaacctccttagcccagcacgccgccgtcgagtctggcggtggcgcggtgtctgacggcggctccacgaggaggtagtagtcatctagcaggtgtcggagatcgcctctgaggaggaggatcttcttcctctcccccttccgcagcgacgacggttgcgcaggcggcggcggctccggcggctgcagcagcagcgagtcgagcttgctcgtcagggaccgcatgatgacaccctgcgatgcactgaccgccggcgccatggatggagacctctgcagctcgccggcgctagctgaagatcagatcagagctagtgatcgagattatgcctcgttagttgctgatttgacagcatggatcgcccaagagtacaagaaattaactcttgaaacttatcctatctagtaagaaatcatgcagagaggctgcgctgcaaatgtagctctgccatagccttcaaaggttgatgtggaaagaagtaggcaatccctcgtctctttcgtcatagggagatactccatccaaatccaaatgtattaagcatatttcattgttttgattatttttttccaaatgagatgagcttattcatatagtctccatgcatccgagccttaaatgaagagagtctcttttcgttttactgtgtatgattaaattgttgaccgaaacttgagctgccatgcattctccaacccttttgcatgcatatgaaaaagtttgttacatgggagtacaaatcgaatgagttaattttttttcttggtctcgatgataaaataaatatgcttacgatctttgcatggaccgagtagctaattaatggaataacttttcctactttggaactatgacgacttggttctcgcttgagagtaacgttgtacgatggtaactatataattagatgttaggttaggccaaactccaaagaggataaagttggaagaaaattctacagaggagagcccattggggattaaaaaagaaagcataactaagggcatttgccctggaagcaactcttgattgtagccttttggataaaagcatgccactgagttgagagtactaatcctacagtacttatcttcatagtagtagctttgggttagcaacacttccattaatgccctctcccttgttcccatggtcaccgatggtgctgtctccctcgtcatcaccggcctatgttgttaattcttggctgccactacctctcgagtagatgccatctactcgagaggtagtggtaaccaggatcaaggtgctaactaccacattgaattcaggcacaaattcacagtttgaccattttgtagctgttatagaggtagtcttctttgctacgatgtctcaatagcattagagttacgtctcgggaacaatgtcttccttacaataacggcatcaacattttccatccccgacacttgaggtgccactatctctttctctgtatggaccacaccctctcttcatgcggaattggcgacttgcaaaatgtcctccgaatccaaagctacacgagataccccttcccctatggtgggatccaagcctacacaaaaatgtattattgtgagttctctaaaggagatgggggtttgtgcgccatgggagaggggaggggggacgggttagctttgacaggtgggcctggcgactttttaatatttcctgtacttagtgttttggccatattgattccatgcaggctgtatgctgcctatgatttctacatagcatgtgagataagtggttactcattcctatttcttgtcccgtgttttataaacctttcgaaattgttacaatatctcccaccagccttatccacgcggtatgggtataacataaagtcaagaaaaaatttctcttttttaaaaaaactgtagcactggctaccaaaactcagccaaatttatgaattttctttctattctttcaaaattctaatttgaaatttaaattctcaaaaaaaagataaaacacaaaaaaattgctgaaagaagtgaaaattcaaaagtggtatttcgcaacctgctagctatgtgctgacaagttagcaatcattctttcatcgctttagcaaagacgatcatccattggcctgtaatgtgacgataatatatactccctccgtcccataatataagggattttttgaccactcgtcttattcaatttttttttgaaattattatttattttatttgtgacttactttattatctacagtactttaagcacaaatttttgttttttatatttgcaaaaaaaaattgaataagacgagtggtcaaacgttacaaagcaaaaactcaaaatccattgtattatgggacggagggagtagcagctagtggatgctaacaaggaaagtagcaagatgcggatacccttgataaaactggtataatagaatactacaaaggttgatgtaacctgcgaacctgcttttaattgcaggcaatgagtcagtcaagcactatgaaaggtcttcttaaaaaaaaaaccactatatggaaggatgcctgtgaagattatggatacatgatacccacattatctatatatgtatccaactgctaatagaaggtgtgctatatttgtacataacttggttgctagggtttccttgccggttaaggcaggaccgtacacttcgattgggtttatctcttgtaatactaaagggaacttaggccgaatccgactgggtttcatacttgtaacctctgcccctaacctatataaggagagccagtaacaccctcgaaggacaacatacaacataagtcaccacaacaagatcgtcagatcaatacaacacccgacggattcaatccctcaacaggagtagggtattacttctcattaaaaggatctgaacctgtctaaacctttgactccacatccatccacttttggacttcgtaccactatgcaggatcaggtcatttctgacagccctaaaccctcacctctgacgggttcaaccttggtcaaagataagtggtcactgatgacgttgagtcacctgtgacgggtaaaggcccgtcagaggtaagagtcacctctaatggtccccaactaaaacccatcacagatgagggtcacctctgactggtcccaacaaaaacctatcatagatgagagtcacctctgatgggtatatattttaacatgtcactgaccgtaattacgatccatcactggtgtgaaaaatgggaaaaaaaagtaataccgtcctcctaggttaccatcacattcatttggacggtcatagatcgcatctggcattcacaaataaaataaatcatcaaaattcctcttgttcccatggcattcatcccaacaaaaccacatgaatgtcaatcaccagaatcaccacatgaattggaatcatcgatcatagtagcaagaatgtgaacaacatgaacaacacaagacaaagtatttgggtgaaagaggactggcaggcaatggatctgaacgcctccacctgccatcatgttcgttgtgcttgtccctgagacaacgcagattggagcttgggcgcggaggagacaacaaaacaatgggcgacacatgtggatggaggtggcggcgacccgagctcgatggtgaaggagacgaaaagacggcagtcggtgcatgtggatggaggcagcggcgaccggacccccatgtctcccattcgcctgcctccccatctctgcctccgccctgagccaccgcatccacgcccacacccccggatgcctccccatttccggccccctctgcccgagccgagccgccggctccccatctcagacctgcgttgccgtggttgctgcctccacctccacgccgttgcctctgcctgcctccccatcttcggccccctctgcccgccgcctccccgtcttagatccgtgttatcgccgtccccgcctccgcctgccttcccatcttcatccccctttgccttgagccgagccgtcgttccccgtctcagatatgctccgccgccacctccagccgcacgtcgtcgcctcccgcctgccttcccatctccagcctctttcacccgagccaccgcctgcccatctcagatctgcgctgccgccgcctccacccccacgccatagcctccgcctacctccctatctccctctccccctccctagtgctgtagcctcagccccaactcccgctcacccgttggcgttgcctccatccccgctgactcactggggtcacctccgcctccaccaacgcgcacccgccggtgagagggaggggagagaggggaggtcaagagacgggatggtttgagtgggaaagagagattgagagagaggggggcaaaaaaat

SEQ ID NO: 9830 - DNA, 11087 bp, Oryza sativa
ggcgacgcacgggggatcgggggaattaaaggaaaggggtgggagtcctcactgaatgggacggcggcgaccgtcgacgatgagccacgggaaggacgacgtcggcgggcggacgagctccgagatgccctaagaaaggaaaagagagagattagagggagaggggtggtccacggcgggcggaaaccatggccgaaggcggcggtagagatggtgctcaccagagtgcgagggggtgagggctccggcgacgaacctcgacggaggaggggtgaacggggtggacctcggccgcgcgaacccaacggcgccgacggcgcggtgcggcggcaagtgtagcggcggctagaggcggccggagtagcgggagagcggcggcggatgggcgcacggcgcgggagcaatggagggcacgggagagagcggtggaaaaagaaaatatgtggaggggagtgcgggcatgctttataggggctcgggagagacggatgtggccaaggcgctcccgatttcaccggcgacgtgggaggttgaaggtgggggagagagagagagagcggcgggattcaaatttgaatcccggccatctcggttgagggcccggcgagagagagagggggagtgggtgcgggaggcgcggcgcacgcacgggcgtggccgacgtggccggaggaggcggggtgcggcggtttcggcggcggatgggcgacgtgggcgagtggccggaggttggggaagggcccgataggtgggccccacctgtcggcgaccccggggagaggagggaggcggccggcctggctgggcctcggcctgcggccggcccagcagggaggagggggaggaaggagagaatgggccggcggcccattcgaaaaaaggaggaaaaaaaaagggaggaaaaagaaaaagaagaaggaaaaaggattttccctggaattaaaatattgcttgctcaattttaattggttaaaattatttctagagctctgaaaattccactaaaaatcctgttaatgaatttcgacatgtagaactcaagaaaaattccacatgtcaaatccgattattatttgcattactttcttagggttttctcttgatttgcacctgcattttcttggggggtcgtttataaattaaattttaggcctgggaggagaacttcagggtgtgacatacgggcacgagcatgggtagtgacccatgcccgcttcgcccgtttacccgcaaaaaccaactgacatgtgggctctcagtcaaattagtataaatgccaccgtctaggattgataaacttgtaatgcttgtattgtagaacttggtacaactgtaccctatctttaaactgtgataatatctctctgcttgtagagatttgtggttgaaggattgaactgtaagcctgtgatgggtaaacggatatgcccgcgagcacatggcgcccgcgggcgatgggcatagacaatgttccttccacgtcatgtagtaacgggcatgcccgcgggcacgagcatgggtagtcactacccgtgcccgtcgtgcctgccatccctaaatgcaatgataatgaaggggtggatcggacgctcaatgttcaaacttgagagcccagaaaataatttatattgcggcgaagcccagaagcttgtctatttttgaaaatgaataagtccacttgccgtccctcatctttatgtcgagtttaattaacatcccaaaactgcaataccataaatcttcacctccccccaaaaaaaaaataaaactttacaaaaccgttcaagtgaggtcccttggcagtatggatatttgttttggatgacgtggcatcttagtcatcggaaaaaaaagttaaaaagaacatatggggccggcccacatgtaagtgccatatcaccttcctctgccttctctcccctctctcttcaccaacggctagcacgcagtgggaatgggcttcagctccatgctgttatccatgcttgcctctgtcacgacgaactcccaacggaaatcggcttcggctccatgatgttggagctcatcagcgcggattccatcggctccgacaccggcacaaccatcgtgcgcaacttcttcggcatggcggctctacgtctcgctaatttttagagaaaaggtcagagacctggcttttacttgaaagccacatcggcggtgtcttttaacagctggggatgccagcgaaccatacaagagcaaaacaagactagtaagcttaaccacagcaaggagcttaggagcagaccaaaagctgaacaaacacttgacaacaacctctaaagccaacacaccaacagctaacgctaaccaactaacccacacctaatctcggatgccgtaggcctgtcatcacctttatttcttctgtcatagcttctagcttgatctcatcgttaggtttgaagagcctcctccactgcaaaagattagagataatttgaaagggcaaagttagtgtcacgcccagaaatttactagtaatttccgaactagtttgttgtcacgctcagaaattcactagtaatttccgaacttatttgtgcataaaatcctcgtccaggaatcagccgaggtacacaaactgacaatttaatatacagaatcatcaataatagtgttacatactttcaaaagaaaagaaaactgcaacggaattacggtctagcgaagctccggctccactcccacaggcagctcaactggggtataagccaaacgtcttctccttctggatcctttttcttcaactgaggttgattgattattgcaagaatgagcatatgacatactcaacaagccacacagcaaatatgcaagtgcacaaggataccaaaggatggcataatataggctcatttgcaaaagcagcatttagcaaaacatttaagaggagtaaaacagtggagtaattaatcagaaattttaatcaacactgaacagcacacccatgctgcacaggcccaaccatcctgaacaaccatacccggctgtacagatctaactccaaaccaggagctaagcaaattattaccagatataacatccataattattgtgagaggtgtgagactaatcacgaaaaacattgctcaacccgcccataaccgcgggcacggctattcgaatagttttactctagccagaggtgtaccactgtacccacaagacacagcctcctcatcatgtctaccatgcgtcgcgatactggaaagtacccgaatagaggctgtgacaataccctttgcacaacacaactcaccacagtgcaccattcctggatcataatcaccccctctataaatataactagaggcatggactccccagcgacccccacggacttctcgccgcttctcagtctggtgccccgcaatgaatcatgctatacagaaggtaaagccgttgcccatgctggcttgtggttggtacggttaatgtttcataacagtagctcgtgaaccggtccttaattgtcatgagcacgaccttcaaaaccatgtgctcacaacccaccattgtcaagttttagttatcaattaattatcataacacgattaaccatcgtgagctacgattaaaccatcattaaacaatgagtcataagttatcccaatagtgtgctaatgtttctaagcatggctaagcaatcatatctaatatctagctgaaccaatatataaagctcaactagtcaagttataataacccaaggtatcaaggaataaagtaatcaatgcaaattggccataacaaaggaataggttcacaccacccagtgacattcgaaaataaatgcacagttgaaataaatagagaatttaaatataggatcaacatgctcaaaggattgtgtttaggatctgtgtgacttgccttgcaataatcggtcttcaattaatcttcttgaatacttccggcgcactcacgaaccttcgcaacgacggaaacgacaaactaacacgcaaaacgaagaataagactaataaaaaccaaataaacagtacatataaagtaaacaaacatgtagatcctgattttagatgaatttagcaacttgaaccactcaaaaccgagttacgatgatttagttatgaatttccgaagatttaatctattagaaaaacaggaaaaagaaaaaaacgatgatgacgtcacctcatcaatggccgaaccaagatggcgacctcgccggagattggatggtcggctgcgactttggaggacaagaacacgtagaggacgacgagacgaacccaacggtacccaccctcgaaccaaacgacgaacgacgacggccggcgacgaggtctagcggcggcgcggcttcggtcgacggcggcgacggggctgcggtggtcggcggcttcggggagatagcggccgggcttctccaccctcccgcgcacctaacggtggtgacggagaccggcggcgacggcggaggcggcggcgcgacgcggatggagctcggccggcgactacggcggggtggagcacgtggcggcggcgctacgaggcacgggagaccacgggagagggggcaaacgaaagaggaggactagggggtcctatttatagccttggattgaagagatcggactcctcccgcaagaaatcgatccgggaaatcaaaaactcggttttggagataaactcgaaaacgagttcgattcggataagatactcaacgattagctccgatttttggggataaagatagaggaggataagaggaatatttcccctcaactaattttagaaaaacacaaggggaaaggtcagatttggaggagaaaaaccgagccaaatcggtctcagttcggctgctagaggtagaagataaacagtgtggagggaggcaaattagacttttcgtcttgggctggctgaaaacaaagcaaagaaagaaagagaagggggaagctcggctgggccgacttgggctgcacggccgtgcagacaaaagagggagatgggctggaaagggcccaagactaggaagaggattattattacttttccaattaaattaatcaatgaaatgatctttgaattgttaaaaataattcctatgctcaaataattccaagaaaaatcttgaacatacttggagacccaaagtatttaacaatattaaaaacagaccatttaatgattaatttaatatgtgggtaattactgaaatgctctttgtatgattaaaagttaagaattgagctccgaaacatctgagaaaatttcagagagtgtaattaatcatggagaatttaatcaaaattaaatccatccatgctttatatttaggaaattttatttcccacatttaacttcacttgtaaattaatgaacatttaatataaattctaataataatttattaaataatttataaatcctgaaacaaaaatcaggatgtgacatttgtgcataaaatcctcgtccagaaatcagctaaggtacacaaactgacaatttaatatacagattcatcaaattaactaaaacgataaatacttacttaagaggcacttagtcctcaccatgaagaaaactgcagcggaaaataaaatctagcgaagctccagctccactcccataggtagctcaactgggtataagccaaacgtcttctccttcgcaacttgtcttcaactgaggtttgattgattattgcaaggtgagcatatgacatactcagcaagccacacagcaaatatgcaagtgcacaaggataccaaagaatggcataatacagggctcatttgcaaaagcagcatttagcaaacatttgagaattgtaaaacaatagagtaattaatcatcaatattaatcaacactgaacagcacacccatgctgcacaggcccaaccatcctgaacaaccatacccggctgcacagatctatctccaaaccaggaatgtaccattccaaactaggagctaaattaattaccatcaattaccacattattattaatgagtagtgtgggactaatcacgaaagacattgttcgacccgcccataaccgcgggcacggctattcgaatagttttactctggccagaggtgtactactgtacccacaagacacatctccacaatatgtcaccatatcatcatgtgcccatgctgaacatgtcaccatttgtgtagttgtgacaagacccctcgcataacttaacccaaagcagtgcaccgttcctggattgtagtcaccccctcaaaaaccagaggcatggactccccagcgacccccgtgggcttatctccgccacttctcagtctggtgctccgcaatgagccttgttatacaaagtgtccagctgttgcccattctggcttgtggttggcacggttaatgtttcacaaccgaaactcgtgaaccggtccttaattgtcatgagcacgaccatcaaaaccatgtgctcacaacacaccattatcaagttttagttggcacattaattaattaaccaatcacgattgatcatcgtgagctatcattaaatatccatcattaagtaatagtgaaacattagttatcccaattgtgtgctaatgtttctaagcatggctaagtaattatgtctaacatctagctgaacaaatatataaagctcaactagtcaaattataataacccaaggtatcaaggaatagagtaatcaatgcaaacagaccataacaaaggaataagttcacaccacccgattgtaacactagaaatatgggccttcaaaaactttttaataaattgcatcatgccgattttatttgcctattttattggaatttggtttcaaagtttaccgatcgcgaataaggaataattaattaggaataaacactaaaattaaattggcaaaataactaattaaaataaagattaggtgagtttggaaataaataaaatattatcgcgaccatattggtaacaattgaatttaggtgcgatggaataagaattaaccctaattaaattcgaataaattaaatataaaaataaaaataaaatatgggtagtgataatctaagttagagcaacacaaatattgtgtaaacttgatttgtgcaaaaattagaaatattaggacaagatttgaataggaaaaacaaccaaattggaaaaataggaaaagtcactgttcattgccccataggtgttcgcttgaggtcactagccctaaccccccccctctgccccgcgcgtggccgccccgagccccgcgccgccatgccgccgttccatcgcctcgagccccgcgccgccgtcgcgtcgccgcgtgccgtcatcatcgccgcccgtcgccgtcgccgtcgcgtcatctcgcgccccgtgccgccgatgtcgcgccgtcgccgtcggccgtcccgtcgccgctcgcccgtcgcgtcgccgcctcgcgccccacgccccgtcgccgctcgcccgtcgcgtcgccgcctcgcgccccgcgctgatgccgcgccgcgtcgtcgtcgcatcgccgtcgccgtcgcgccgagccccgcgccgcgccgcccgcccgtcgccatcgccgccagccgcaccgcgcgccgcctgtcgcgtcgccatgaggccgcccgcccctcccccacgcccttataaaacccggcccctccccttctccaccccacacccatcctctccattttcccccttctcctccttctccatgcgccgccgccgtcgtgccgccgcgccgccgccttcatgcgccgcgccgtcgcctcgaagccaccgcgccgcgccaggtgtggtgccgagcgttgccgccttgcgccgccgccgccggtgagccgtctttcccccccccccctcgcgtccaatgccgccgccgcccgggtgggcaaaaagccgagagagagagaaagggagaagccggtagggagaggaggaagaaagaaaagaaaaggggaaggaaaaagagaggagagaaaaagaaagaaaaagaaagagaggagagaaaaagaaagaaataaaaaagagaaataggatagggaggttaataaaaatagaaaatttaaaataattaattatttaagtatagattaattatagtcgtaaaattgcaaaattaaattatattttggtaatctctatgagtaattaattttaggtaagaaattagatttatttaagcgctaaataaatacgttgaattcttaggaatttacttaggagacacaaaatatcataggttgaggaatagtcctatttcacgaataatatagttgatatagaattcgcctctcgcgctcgtttttcaatttggtctttattggattttatttgaattctaatggaattcaaatcaattcttcgcacgtacttgtagagcccgagggagttgcggatccgagcgaaggtcaagacccgcaagactttgagcaaggcaagtcatcactattctttgagcatgtcgatcccgattgcaaaatttattttgtttacaaataagattgcatgcaatgatgaacatcccacttgtgaaatatgccatgccttgattattgttcacctttaaatctttgtaaccatagatacgtacgagcccctagtcaactatgacaattgcttagaaatgctattttagattcatgcatgctcatattttatcaaatactatatgcttgggcaattacctttgggaaggtaattgagatgcggcatgtggaaacatgagcgccacattgccatgatatgatgacatgaattgtgaaaatagaaatgaaattaaacacttgttttagactggggccgacggtaagattgggtggtatctgggaaaggctagtaccgtccccggtcaattgaggaccgagccataaagttaagcatgaaacgaccccgtacaaccacacttctcgtatggggatagacctagcagagtaaatagctgagcggaggcagtatccatgcatagtggtttcttgatgtgtaaggcaggggctctacagtggtgtcaccattggtaggactgccatgtgataatttaaacataattataacttaatgcatgtgtgtgagtcttcccttcccggtgcgccagaactcctctcactgctagaaactgtgtacacctagagtgcatgaggatgaaaagttcatggagcgggtactgccaatgcgaggttatcgaaaagctttgccgtgatacgtctcatgtgttgggacgaggctcatgtgttgggcagtcgcggagtgtgggtaaagtgtacatccactgcagtgtgagtaaaacaaatctattcgattagccgtgctcgcggttattgagcaccgggacatgtattatacttggctagactctaaattcttaacttgtgtgggaagggttattgcatgatgaattttatgctgttggagccacttcctgagaagggggaaggtggacgttctcagaaaactatgacgactcaatggcgggaagctatccttgggatcacaatggatgatggacagaaccatcgttgtttaaatataaacactagtactaaaatttgatcagtcaatgctaggtcttaggcttgtgaaaagaattagaaaacttgctttgcgcaaaagaaccatagccatcctttgaaatacccctatcatgtgcattgttgatgtggtggcttgctgagtacggttggtactcacccttgcaaatataaacttaatcagaggccggagatgaagcttcggaggatccctatgcctattaccaggagggtgatgcagacgatggcgctcaataggtcttagttacggtcgttgcctgtggcaatggcatgccgctgctttatctatttctgctgtgggatgtattccggactgctcggttgtcacgctcggaaattcacaagtaatttccaaacttatttgtgcataaaatcctcgtccaggaatcagccgaggtacacaaactgacaatttaatatacagattcatcaaattaactaaaacgataagtacttacttaagaggcacttagtcctcaccaagaagaaaactgcagcggaaaataaaatctagcgcagctccggctccactcccacaggcagctcaactggggtataagccaaacgtcttctccttcgcaacctttttcttcaactgaggttgattgattattgcaagaatgagcatatgacatactcaacaagccacacagcaaatatgcaagtgcacaaggataccaaaggatggcataatataggctcatttgcaaaagcagcatttagcaaaacatttaagagaagtaaaacagtggagtaattaatcagaaattttaatcaacactgaacagcacacccatgctgcacaggcccaaccatcctgaacaaccatacccggctgtacagatctaactccaaaccaggagctaagcaaattattaccagatataacatccataattattgtgagaggtgtgagactaatcacgaaaaacattgctcaacccgcccataaccgcgggcacggctattcgaatagttttactctagccagaggtgtaccactgtacccacaagacacagcctcctcatcatgtctaccatgcgtcgcgatactggaaagtacccgaatagaggctgtgacaataccctttgcacaacacaactcaccacagtgcaccattcctggatcataatcaccccctctataaatataactagaggcatggactccccagcgacccccacggacttctcgccgcttctcagtctggtgccccgcaatgaatcatgctatacagaaggtaaagccgttgcccatgctggcttgtggttggtacggttaatgtttcataacagtagctcgtgaaccggtccttaattgtcatgagcacgaccttcaaaaccatgtgctcacaacccaccattgtcaagttttagttatcaattaattatcataacacgattaaccatcgtgagctacgattaaaccatcattaaacaatgagtcataagttatcccaatagtgtgctaatgtttctaagcatggctaagcaatcatatctaatatctagctgaaccaatatataaagctcaactagtcaagttataat

SEQ ID NO: 9831 - DNA, 9555 bp, Oryza sativa
gacggcgacggcgatgacacgcggcgacgggcggcgacgtgacggcggcgcggggctcgaggcgatggaacggcagcgcggggctcggggcggccacgcgcggggcagagtgggaggggggttagggctagtgacctcaatcgaacacctttggggcaatgaacagtgacttttcctatttttccaacttggttgtttttcctattcaaatcttgtcccaatatttctaatttttgctcaaatcaagtttacacaatatttgtgttgctctaacctagattatcactacccatattttatttttatttttatttttaatttattcgaatttaattagggttaattcttattccatcgcacctaaatttaattgttaccaatatggccgcgataatattttatttatttccaacctcacctaatctatattttaattagttattttgccaatttaattttagtgtttattcctaattaattattccttattcgcgatcggtaaactttgaaaccaaattccaataaaataggcaaataaaatcagcatgatgcaatttattaaaaagtttttgaaggcccatatttttagagttttgattttcgttggttgaattttcaggatgttacaaacctaccccccttaaataaatctcgttccgagatttcttaccggtcttcgaacagatgcgggtattctgtcttcaagaattcttcactttcccaagtggctttatcctcagtgtgattactcaattgtaccttgtacatatgccacactttggccctagtcctcttttctacttcatccagtatccgaactggatgctctgggtacgtgagatcattgctaatatgaatttcctccaacggagcttgctcctccggcactcgcaagcacttctttaattgggacacatggaagactggatgcacatcggcgatgttttctggtagctgtagctgatatgcaacttctcctcgtctagccgtgatttgaaagggtcccacatatcttggcgctagttttcctttgaccttaaaccttttcgttcccctcatcggagaaacctttagataaacataatctccttctttaaattccaggtttcttcttcaggtgtcggcgtaactcttctgtcgtgattgagccacttttagacggtctcgaatcaggcgaaccttctcttcggcctctttgataatgtcgggtccaaataccgcacgttcacctgtctcggaccacattagtggagttcgacatcgttgaccaaacaatgcctcattgggtgacatctttaggcttgcttgaaagctgttgttgtaggagaattcggcgtagggcaaacatctctcccattctttgctaaaatccaatgcacaagctctcagcatgtcttccaggacctggtttgtcctttccgtttggccatccatctgcggatgataagctgtgctaaaagcaagataacttcctagggcttcatgtactttttcccagaaatgcgaggtaaactgtgtgcctcgatcagatataatccttttaggcacaccatgaagacacactatcctggtcatgtacaactcggcgagtttagcactattatagtttgtcttgacgggaatgaatcttgccgtcttggtgagtcgatccacaatcacccagatggaatcataccctgttgtggtcttgggcaacccaactatgaaatccatacctatctcatcccatttccattcgggaatcctaaggggttgcaacaaacctgccggcctctggtgctcagccttcaccatctggcatacgtcgcagagcgctacgtattcggtcacatctctcttcatgttgggccaccagtaaccctccttcagatcctggtacattttggtacttccggggtgtaatgaatatgccgattcgtgagcctcctttaggattaatcctctcagtccaccctgttcgggtacatagatcctctttttgtaccatagaacacctttttcatcggttgaaaattcctttgcacatcctgcagctaggcgtcccttcacctctcggatttcctcgttgtccttctgggcttcttctatttgggttctcaaaagaggttgaacgtccagggtgtttatctatccatgaggtactatatgtaggtttagttgagccatctcctccttaagctcaggaaccatcccttccgtcctcagatgatggcaatggctcttccgactcaaagcatcggccacaacgtttgccttgccggggtgatagtgaacctctagatcgtagtccttgattaattccagccatcgccttagcctcaagttgagatctgactgggtgaaaatatacttcagactcttgtggtcagtgtagatatcgcaatggtttccaatcagatagtgtctccaaatctttagcgcatgaaccacagctgcgagttctaggtcatgggtggggtagttttcctcgtgtggtcgcaattgtcgtgacgcataggccacaacctttctgtcctgcatcagtactcctcctagtccttgccttgatgcatcacaatatataacaaagtctttcctgatgtcgggaagaactagaataggcgccgaggtcagcttttctttgagctgctcaaagctttcctgacactgttctgaccacacaaacttcttttccttcttgagtagttgtgtcatcggtcgggctatcttaaagaacccctcaatgaaccttcggtagtatccggccaagcctagaaaactccgaatttcagtcacagacttgggtgctttccatttcgtaacagcctccactttagcaggatccactgctactccaccggctgaatcacgtggcctagaaaagcaacttcttcaaccagaactcacatttgctaaattttgcatataacttatgctttcgaagtttctcgagtaccaatcgcaagtgctccacatgctcttcctcatccttggagtagattaaaatatcatcgatgaatactaccacaaatttgtccaagtaatccatgaacactttgttcataagattcataaagtatgccggggcgttggttaatccaaatgacattactgtgaactcatacaatccatagcgcgttgagaacgtggtcttgggtatatccccggtcctaattttcagttggtgatatcctgatcggaggtcgatcttagagaacaccttagctcctttaagttgatcgaagagatcatcaatccgtggtagtggatacttattcttgatagttacttcgttcagtgaacggtagtctacacacatcctaatgcaacatctttcttcttaacgaatagcactggggctccccaaggtgacgaactggggcgtacaaatcctttttcttgcaactctctgatttgcttcttaagttcctccaactcattgactggcatccgatatggtctcttggatatgggagcagttccgggtatcaggtcaataataaactctatgtcacgatctggtggcatcccaggtaaatcctctggaaacacatcaggaaatcgttgcactacaggcattcctttcatgggtagcatggtgaatatgcctccggcatgttcggccagtctaggatcttgatccatagttgttctcatatccgatccccaggggtggtcaaggtaacttttctacgcctacagtcgattacccctctgttctttgttaaccaatccatacccaatatgacatccagggtctgaggtatcaaaaccataaggttggagggaaacacaacatccctaaggcgaatatgtacgtctatgcaagcatgactcacagttatctcgccctcaggtgagtgtaatatcataggctttctaagtcccactagggttaagttgtgcttttgactagccttcagagatatgaatgaatgcgatgcaccagaatcgaagagaactttaaccggggtagaattgatagaaaacatacccattagtatgccctgatcttcctgggcctcttcagctcggacatggttcacttgtccgcgcccaaatctggtagcggtcctgttagtttgcggagtcttgaatagacctcgtccggcaatagggatagtagtcccacgaacagtcattgcattagcgctagtacggacaggagttttgcgtggatgagggcagttgttggcgtagtgcccatactcctcgcaattgaagcagtccacattcttcttggctccaggggcagccagagttggtgtaggggtgcggttctgaattgcaaccggcctgttgaaattgctaggtgcggcggggcggttggtcgccacaatagggggtttccacccagacgaagtggctcccttgagtcgctgaggcactccctgaggtgggcgattcatagcaagcctcctcttgcggttgtgctctacagtcctttggtcattctccagcctaacgactttgttgatcaggctctggaagctctcatggtcttgcccaatcataggtccacgcaattcatcattcagcccttctatgaacttgtcgatcttttcctcttcatttgcaaggtctccaattgcatagcgggccagctgagtgaaccggttcagatattcctgcaccgttgtgttcccttgtcgcagccttctgaactcgttcttcttcatacgcattaccgcagcaggcacgaagttctcgcgaaatgctgcagtgaactcttcccaagtgggttctccagcatcctcttcccgagcttccttgtaagtatcccaccaatcaccagcgggtccctccagttggtttactgcgaagatcactttgtcggcttcgcgcacccggataagggtcagtttcttctctatgatacgtagccaatcttctgcctccataggctcgtctgtcgtagtgaacgtgggtggcttggtgctcataaactctccaaagcttgatccttcgtggttgccttgattgtttgcaatggcttgcagaagttgggtttgagtggccataactccggccagggtggttaggtcaggtgtctgggtttcatcattgctggttgacgcccgacgtcggcttgccatctgtgtaggtcgattgagtaagtatcctaatctcctaactggctcttatggttttatctctttaagggaattgtcttgatgtgaactttgttttgcaagcatggtggaataaactcatttacaacacaacagcaataatatcataaataacatcacagagttccacaaatagtacataaatcgtgatgcaatcgactgcacacatacgcagtccaaataaggttcatccaaaagatacattgaactaatcatcaaactactcgtcgatctaggtaagggggggtgtctcgcatgctatccaaaaaccatatgaagcgagatcgaagctgcaaatagtcctccagtctagtcatccaaccatccgcaggatcctggggcaggtagagggtggttgctggcacgggcaaacctgagtccccacggcttggaggtagtggcctctggatctggcttgggcttcttgcccggggatcgggtgctcttgcgggcaatgctgagggtgtgagggcctccgatgaaggtgatgcggggaacaggggtctcatcctctgaaggatcagtgatgtctggctcgatctctggctcggtgtcggtcccctctgtctcggagtcgacctggatcggagtctccatactggaacccagctgtggtgacggggtagggaccagtggggtgtgcacaatctctggtgcaggtggctgtgtcactgtcgtgtccactaggtagggtgctgacttagtagctagcatgccaatctctcccagaagagtgtggaatgcgggtggatatggcggggtgaggaagaagtagcggtcacgccctactgctgtggaagtagaagctcctggggtgctgaccgtggctgctcgaagctgctcctccagctggctgacgtgctcctgactctctctcagctgctcctcaagtgtattcatcatcccgcggcgattgttgtactgatgagataactgctggaactggtcgccgtggacctggagctgtgccttcagtgagtctatctcactgccccaagcctggtgcacctcccctagctgaagctgttgcactgtgaggtcagtcacctcggtctccaactctcccacaggcctctgctagtcgtcgatctctaacagagcctcctcgtagaagtcgtctactgcctcagcccatcgtgacagtcgagtcactatcgggttgtagcagcaaggtgtgtcctgaactgtgcagacggagttactctcctctcgaaacgggtggtgagcaaactcagtactcgccaactcagctcggtggatagagctaagtcggagaaaggcctcccgggctgcatcctacatcgcggtctctggtaagtcacgacggtggcatgtcggaaagctatagtctgactctgaaggaactcgtgtgtgaacctcgactcgggcctcccaaacggatccacactgtctcactcggtagatcggaaatctggggtaccgtagacgcctcatcaaccgatgcagctcaatgacgtatccctctgagcggggtacgcccatcatccaggtagcgggtgaatcctgatctgccatctaagtttaagaaaaacccaaagtcagctgagagtaaaacttgttttgtgaagaaaatagttaagagtaagatgaaaatcgtatagagttttgtgaacatagcatttttatttttgaaagtattactaaatgggaatttctcccttggccaacttagaaaagggggtggggcgccttttggtcttttcctacagtcgtatggctctgataccagctctgtagacccccgtttttataacaggaatcaatcgtgtaaacagtaccatttccttggatcaagtagtctggtacacacgagttcatagccgagataccaaacgcacatacacgagagtctagtgcaaattattacaacataagcccgcaggcgtagtcttaaatcatcggaccgagcggtccggaatacatcccaaaagcagaaatagataaggcagcggaattaaggcagcggcatgccattgccataggcaatgaccgtaactaagacctattgagcgtcatcgtcttcatcaccctcctggtaataggcatagggatcctccgaagcttcatctccggcctctgattaagtttatatttgcaagggtgagtaccaaccgtactcagcaagccaccacatcaacaatgcacatgataggggtatttcaaaggatggctatggttcttttgcgcaaagcaagttttgtaattcttttcacaagcctaagacctagcattgactgatcaaattttagtaccagtgtttatatttaaacaacgacggttctgtccatcatccattgtgatcccaaggatagcttcccgccattgagtcgtcatagttttctgaggacgtccaccttcccccttctcaggaagtggctccaacagcataaaattcatcatgcaataacccttcccacacaagttaagaatttagagtctagccaagtgtaatacatgtcccggtgctcaataaccgcgagcacggctattcgaatagattcgttttactcacactgcagtggatgtacactttacccacactccgcgactgcccaacacatgagcctcgtcccaacacatgagacgtatcacggcaaagcttttcgataacctcacattgacagtacccgctccatgaacttttcatcctcatgcactctaggcgtacacagtttctagtagtgagaggagttctggcgtatccgggaagggaagactcacacacatgcattaagttataattatgtttaaattaacacatggtagtcctaccaatggcaacaccactgtagagcccttgccttacgcatcaagaaaccactatgcatggatactgccttcgctcagctatttactccgctaggtctatccccatgcgagaagtgtgattgtatggggtcgtttcatgcttaacttcatggctcggtctttaattgaccggggacggtactagcctttcccagataccacccaatcttaccgtcggtgccagtctaaaacaagtgtttaatttcatttctattttcacaattcatgtcatcatatcatggcaatgtggcgctcatgtttccacatgccgcatctcaattaccttcccaaaggtaattgcccaagcatatagtatttgataagatatgagcatgcatgaatctaaaatagcatttctaagcaagtgtcatagttgactagggactcgtacgtatctctggttacaaagatttaaaggtgaacaataatcaaggcatggcatattttacaagtgggatgttcatcattgcatgcaatcttatttgtaaacaaaataaattttgcaatcgcgatcaatatgctcaaagaatagtgatgacttgccttgctcaatgtcttgcgggtcttgaccttcgctcggattcgcaactccctcgggctctacaagtacgtgcgaagaattgatttgaattccattagaattcaaataaaatccaataaagaccaaattgaaaaacgagcgcgagtggcgaattctatatcaactatattattcgcgaagtaggactattcctcaacctaagatattttgtgtctcctaagtaaattcctaagaattcaacatatttatttagcgcttaaataaatctaatttcttaccgcaaattaattactcatagagattaccaaaatataatttaattttgcaattttacgactataattaatctatacttaaatcattaattattttaaattttctatttttattaacctccctatcctatttctcttttttttctttctttttctctcctctcattctttttctttctttttctctcctctctttttccttccctttttattttctttcttcctcctctcccttccggcttctccctttctctctctctcggctttttgcccaccagggcggcggcggcaatggacgcgagggggggggggggggaagatggctcaccggcggcggcggcgcaaggcggcaacgctcggcaccacacctggcgcggcgcggcggcttcgaggcgacggcgcggcgcacgaaggcggcggcgcggcggcacgacggcggcggcgcgtggagaaggaggagaggggggggaaatggtgaggatgggtgtggggtggagaaggggaggggccgagttctataagggcgcgggggaggggtgggcggcctcatggcgacgcgacaggcggtgcgcggtgtggctggcggcgatggcgacgggcgggcggcgcggcgcggggctcggcgcgacggcgacggcgatgcaacgatgacgggcgagcggcgcggcagggtgcggggcgcgaggcggctactcgacgggcgagcggcgcgcggggcgcgtggcgcgaggcggcgactcgacgggcgagcggcgataggacggccgacggctacggcgcggcagcggcggcacggggc

SEQ ID NO: 9832 - DNA, 19150 bp, Oryza sativa
  unsure (1)..(19150): unsure at all n locations
ggaacgaagctagggttcacgggagagagagagagaggagaccgggcgggaggaaggagacgaccggcctggcgcgtgggccccacgcggtcgggcgcgcggtcagcgcacgcgcgggtgcgtgcgcgggaggggagcggctcaggcaggggcgcggcgtgggccgggcggccggcccaggaggagaggaggggaggggtggcccggggagagagggaggaggagggagtgggccggggaaggagggagggaaggagagggagagaaaaagagggaggagagagggacttcgggctgggcttggcccaaaggaggaagaggatttatttttaggtttttctttttaataaactttgataattgtttttgttgcttaataattatttccggtgttctgaaaattcaagtaaaatttgagggctcattttagaccaaggagaatttaacaaaaattctccgggccacatttgaatttttcttgtacgtattttagtgtttgccaatttcttttcgaattttaattaattctattattccttttggaaaatgatttttatttcgggatgaatttatcaggacgtgacaaatccaccccccttacaagaatctcatccccgagattcgaggaggctagcatgaagataggttgggcggtattctcttcttgtctgacttcttccgtcgcgtcttttataacaaacttgcctagcaaaacttctccactctaggctgcttggctcgatcccttgttgtagatggaatcttctcttcacctgacttgtccctggttgaacctttagctgacttcgactgggttgcggcacttgaagatggggcttcagttccagaacttcgcatagttcatatctttggagtcaacctcatacaagttacccacttcatgtcatgcgtcgagatcagctcgtcattactaggataccatgcttgtcatcatgagaataccatgcttgtcatttacttctaacttgccaccaactgcctcatattagctttcctgctctccgggtgctagctacttctgctattcgatgcaagggtcggtaactttgcctttgaattatgtttctaaaaagaaccaacttatcccacttgacatgctttgacgtctccccaaatgactttactactggacctgttatggtatgatcgttatcctaccaaatctgaagcttcgttgttagatgtgattttaatctgacctctgtagactatcttcgaacatatcacttggttcataactgggaatagctcccacgaacaagcaactcggattcactttctttatgtttagtttactttccactattctcttcatgttgtcatcatttagcattcaacgtattcctttacaccttcgaccttgatgagttccttcccattggatcatctcccaagacatggcattgcctggtaaccggtgcctgcacttttcactccgtgtagcatctgataccgagttgaagatttcactccttgccttcatagaaacacttttacctaggtcatcttgcttactcacagatttatttttttttctctcaatgacaaggtgactgttgcagggcgattactgtcaggagtcttccttgtgtgatgcagagcatgtttctgattatcctttatcaatcacctttcggcctacgtctttcctgctagagaacatcttggccaacctcttttatcaatcatctttcggcctatctctaacaggtggtactctttaatgtgggttgcggacacttctggtggcgatggggtcctttggtctgctgcctttcagtgaaaccttgaagtgttttcgccaaaagctatactgactgtcattgcctttgatccgaaaaagacacgtgtgaaactcttagtccaaacaaatgtctctttggttaatcgcttgattttcttttccatcatcaggttggttattaactcgaggttagaacatagttcctctgaaatgagaccctaggtctcctttgacagtaaacaattatacacataatcccatatcagcatcttctgaaagagtcctcatagaacttgtttttattacacatttctcccatattacatgaatacgaggcactaccttaaacaaaaagggaaggtgcttaacatcggtacattgtatcctcaacatgaatcatccataaacatagtaaactcactgtttatagacatgaatatatttatttattacatgattgctgcaaactttcgattacacaatgataagtagcgaattgaaaaccacaaacgtggctgctcattttgattctggagagatatagctggcattgttctagtaactgcatcatccttgattggttctgtgatgatgtgataggactgcatattgctatcattcacgggagaaacttccttctgattgctgtttgaagcagataacggtcttctgcttggtatcgccctcctgaggttgattgcccttcgctcagcctagagtaggtcggggagagaaacaacttcttccatcgacgacaattctttgctgaggccgtaggtgcagagaatggttggtgctgaaggtattattgttatgatttattgcagagtcaggtgcagcaggaggagcattggtgctgtggatgatatcgtcgatgttgctgttggagctgactagctgatgagacaatcgtagggttgttcgttggatttctgcggtcttggtcaacaacacactgagttggcaatccgtgggcacatggtttgtaccttcgcacagaaaacatgtgaccttgtgggtgggacattcacctggcggatggtcttcttcaccatgagggcaaagtgtgagacacctgctagcaatgtgtccaattttctccacaacgggtgcatgcctttgattccatctcttcctcgccgagatgtcggggagactcttcttcatcatccgaggagacttgatctgacccttcactatcagatactctgccaccatggcttaggaggtgctgggtcaactatcgtgcacctcggaaggtatttcctctttgacgtctaggaataggtatccctgctggaggccattcggtgttggtaatagtcatcttacgtacttcttcttcagttcgcatcggcgcttttctcttctgattcttactcttcttgcctttggcttgcttagtacgtgaccccacgtggtacgaaaggctaggaggaaagcatttcccgggattccatggattctctccattgggctctctactttgcacactaggctgcaagcttgacttggtgtgaggaggctggtttagcgatgtctgccctgctaaaccaaaggaaggggcttctttggcatatacccatggacaattcagggcatagtgtccttgttctctacaatcgtgacaaaaggggacatcctcttctggcattggaagctcattgacctgggtggcaaatgctcgatcaaacacatagtgattttggtcttgacttccatccaatggtagctgcgaactaagcagcatgcttggaatggaccaagggtgtgccctggttaactctcttgaggccagtggtggattgagttgaaaacttgagttacttgaggcatacccgctgacattctttcctttttctctgttaaacatctgttacagggattgaggtgagagaggaaacaagccaggaaagaatagaccagaactagagacaggaccttaaaggaactaactcttcttgctgatgtgttgtttgtttcacttattctgcaagttgattaagcaaacaacctagcatggttacatcacaccccactgatgcaaaccaagcgctacacacacaagcaaggaaacacacaactaacgactctaccctagagggtggcttaggttctgcgacgggttctccaagatcttcactccttcacagctggcttcactgcttcctccacttcgctagcggatcctacagtcttctggagcttcggcaaacaactgacgatgtcttcttcttcactgacctgaccatccagtactagttgaaatccgaagaaggaagaagggagtaaacattttgaaaatagcattagggaaaggaggaaaaggaactttcgcaaatagtttcatttataaaatatgtccttaggttttatccacttggcttatcctacagtcgagacggctctgataccatcttgtcgcgaccgagaaaattgcattttcccgaacgctagtgtattaatccccgtcccaggaaaagccggggtacaccatacaaacatgatataaaatacacatctttattatatcgataatatttacattattacaaaggcacttaaggcctgacaatcaaaaataaacagcagcggattagcgggcctatggctccatcttcacaggcgctcaactggggtgtaagccaagactccacctaagacatcttctccaaagcttctcttactgaaggggggagaaagatagagcaagaatgagtacaaccacagtactcagcaagccacaccggcggatgcacgattaatgcaagggggtacaaggggtaatgatataggggttaagttttgcagaaaacggcatttaaaaatcacttagttgcccaaagccattttaaaaagacgatcctagagctacacagtattattaatcaaggtcgtgaacccgcacgaacctgccttaacccaaggcctacgatgattcagaccgaactggcaacccgaccctgggtcccagctcgtcccaagccaacccaggccaaccattccacattttagctgttaagcaaattttaagaattaaaacactaacttgggtacattgctcggcttgcccataaccgagggtgcggctattcgaatagattatactctgatcagaggtgtacatctttacccacaagacacatcttcctcacgtgtaaccacgtgccacataccaccacggtatacggacggaagacgtgacatagttcccaacccatcctagccataaacaagagtaccgacccaaccccacctacggccggaacctccgggacaggtaggcaggattgagcccctagcagcaggacaccagccctgtaccatgacatctcgactaccgggccacatctcgtgtagccttcatttgtcctagagatgtccatcgacccccgacttcgtccatctccatccgtgtacttttgtttataaccagactgagccacaaactaagccttacccactagacatgtggaagtacggtagtgctttgcaacagaggcccgagcttaatccttatagtacccgaggtacgactagcaaaacccaaccacgcacctcgagcccagcctaaaaccattttgggggttttgaatagagggggaggtgtgtgtccaattccaacaaaagccaaccattccaaagtatccaagtgatatgaatattcccaaagtctaaagttataaaaccacctaatgttgcctaattaatcagcgaagcatctacctaaattcatactagtggaaccatgaatagagtacccactagttggggttttgtttaatctagggtgaacaaggtaataatatcaatagcaataatattaaggtcataacaaaggtaaataggcatggccaaataaaacagtgataacgcgggaatttaaataaagcgataatgcaataatttaaatcaaaataattttataaactgggattcaatatgttcaaggatgatgtgacttgccttgctccgggagaacggccttccgaaccttcggcgacgaccacgaaccacgcttcgggaacctccggaacgacgaaagctacgcgaagcacacaagcaaagctacaagcctataaagaagcaataacaatacataaaaagaaagcacacggttctttaggttataacaaacattaggagacttgaacgggtcgattcagagttcgtatgaccaagatatgatcatccgaagtttaatgctgttacatggagatttgcggattattgtaatgaggttttgcaactataaaacatgtggaagcgctagcctggaaaagacaggaaggctgcgttgttgacatgcggaccccacatgtcaacctaaaggaccacggtagaccgagtacacagagacggtccacgggtcgacggaagcggaccccatgtgtcaaccgaggcgagtggccaacaaacggactccactagacaccacacgggctgcacatgtggaaaccatgctgctactgagcggacacactaacacggacaccacacggtcaccacccgcacacgtgaacgactaccgacacggtacacgggtaccggggtcgacaaccgcacaacgggtacggggcgacaccgaaaggacgagggcggggcagcgagaggagagaccttaccaccacgcgacgaggcgtgagaacgacaacgacgaacgggcgcggcggagacggacggcgagggaacgacttcggcggcgatccttgaacgaaggcgagacacggccggcacgaggcttgacgacgcggaggcgaggacgaagacgacgacggctacagcgaccttgacgaaacaccgaggacggacgagaacggcttgacagagggacgaacgccacgacggccgggaacgacgggaggacgacgacgacgacgaccgggaccggcgaggagacgacgagggcagccggcagcggctgcacggaggcgaggacggcgtggaacacgccgcagcgatgcccacgacggaggcggcgccgcgagacgacgaaccgggcgaggatgaacggtgaagacgacgacggataccggcggtgttcggccgaaggggaagcgatgccgaggacgacgtcgcggctgcgatgccgaagatggtggaggtgtggccgaccggtgcacgggcgaggagggacgggcggccgaacaactccggcgaggcggatggagaggttcgcggcgatgtgcggcggcttccgggcgaaaccgaggggtggacgaggtggagggctacgtcaccgtgccgagggagggacggcagcgccggctgatgcacgggcgcggcggaagggggctgccggaggagacgtcgacgaggaggaaggagaggccggcgcgggcgacggcgttccggcgaaattcgggcgacgccgtggcctggccgggaaagaggacggcactccggtgccgggagaggtggtggcgacgtcggccggcgcacaggggacgcggcagaggcgggcggaggcggaatcgtggcggcaacaccacggttgccggcggggaggcacttccggaggtctccgcggaaaacagagggtaggccggcgaagaggaggcggctgcgatgctggaggaggcgacggcgcgaccggacggcgctccggcgaggagggagaggcggctggaggcggccggaggcacgggagagagaggaggactgcggggagaggtgatacgaccacggggagactcgggatgaggttaaaacgatagaacggaggatggggattccattttatgggatgggggagggagccggccacgggaggagcgggaacggcggcaggaaacacggccggcggcaatggaaggcggccgggaatggcgcggccgttcccggcgattgggggcgccattcaaggggaaattaagggggaaagagagatgagggaaaggggattaattccccccaattaattttggaatccaacgcttaaatcgcgcggattcaagggaggaacgaagctagggttcacgggagagagagagagaggagaccgggcgggaggaaggagacgaccggcctggcgcgtgggccccacgcggtcgggcgcgcggtcagcgcacgcgcggcgtgcgtgcgcgggaggggagcggctcaggcaggggcgcggcgtgggccgggcggccggcccaggaggagaggaggggaggggtggcccggggagagagggaggaggagggagtgggccggggaaggagggagggaaggagagggagagaaaaagagggaggagagagggacttcgggctgggcttggcccaaaggaggaagaggatttatttttaggtttttctttttaataaactttgataattgtttttgttgcttaataattatttccggtgttctgaaaattcaagtaaaatttgagggctcattttagaccaaggagaatttaacaaaaattctccgggccacatttgaatttttcttgtacgtattttagtgtttgccaatttcttttcgaattttaattaattctattattccttttggaaaatgatttttatttcgggatgaatttatcaggacgtgacattggggaatcaatatcctgaatgagaaaagaagggaaaagaaaactcttcagggaaaattggaggagctagataggaaagctttagaagatgacttatcccctgaagaatggaattagagatatgaggtggaaagggatctagaacacacttataagatggaagagttgtactagcataaaagatgtggagaacaatggatcttggagggggataggaacactgagttttttcatagggttgctaatggcaggaaaagaaagtgctcaataatctctttgatggatggagatacagagctgactagtaaagaagatataaaaaaaatcatattgtctcttattacaaaacccttttttagagctgatgttttaactatacccacttggctcgagatatctggagtggcggtctgaacctttctgctgacaacaaagagagtttgattagacccttcaagattgaggagttagataaggcgcttcaggaggcaaaattgaacactgctcctagtccagatggttttagcatccttttttgcagagcttttggcctcaagtgagaaatgatttgtttgagatgttgcttatgtttcataatgaggagttagatctcaagagactgaactttggggtgatttctttgattcccaaaaacaattagcccacagacattagacaatacaggcccatctgtgtgctgaatgattgcttcaaatttctcagtaaagtggtgaataacagactctcagaggtagctaatgatgtgatttctcctacccaaacaaccttcattcctaggagattcattcttgagggctgtgtgacaatccatgaggtgttacatgaaatgaggactaaaaatagagaagggattattttaaaaattgattttgaaaaagcatatgatagggtcaaatgggagttcttgatagaggttatggaaagaaaaggtttccctcccaaatggattaattggattaagtcttgtgtgataggggccgggggagggtctgcattaacattaatggggataggactgagttttttagaacctttagaggccttaggcaaggggatcccctttctcctctccttttcaatctggtcaatgatgctttagctgcaatgttggataatgctaagagaaatggagttattagtggcttggttcttgagattgttcaaggggattacccatttacaatatggtgatgatactgctcttttcattgctaatgatgtctctcagattactgccacaaagtttatcctttattgctttgaagagatggctggtctaaaaattaattaccacaagagtgaggttttcactatagggttagaggaatctgatactattggagcttctcaaatgcttaattgtcctataggtcactttcctatgaaatacttgggcttgccaattagccctgagaaggttttaaatcctgattttgatttcttaggtcagaaactagagaagagattgggaaattggggacctggtagtctttctcatgctgggagagctgtgcagattaatgcttgtatgtcctctattccttcttatgctatggggttctatcttcttcctgaaggggtgcatcagaggtttgacaagataagagggaggtattactgggctggtaacaaattgaaaggtaaatatcacatggtcaaatgggaagacatggcttttcctaaggactttggggggcttggttttactgaaacaaggaggatgaatgcagctctgctggccaagtggattattaagttggaatccaatgatcagagtttatgccttcaggtgctgaggggaaagtatatgtaggaaggtggtatgtttcagtgtaaatctgggaatggttctcaattttgaaagggtttgttgaatattagaaagtgagtgcagcttggtgctgaatgggttttgggatgtgggaatcatatctatttctaggaggatttctggttacacaattgtcccttgtgagttatgtatccaaatattttcaaaatttgtaatcaacagaaggtgctggttgcacaggtcattcagagaggtgtggagtgtctcactttaggaggtcctttggccctatagaaagtgtagaatgggacaacctgaaaaatgacatagagaatgtgaatttgagtaatgagcctgacaagccgatttggggtttagcctctaacagaagattctctaccagatcactatatagagctttaacttttagaggtattagagaggtgaactcagagttgtgggctgccccctgcccaatgaaaatcaagcacttcctctggcttgctctaaaagatagaattcaatctgcagagaacctgaaaaagaggggttaggagggttttgaattctgtcaactttgtgggcaaattgagactactagtcatattctttttaactgtggcatggctaggatggtttggtgcatttgtagagatgctttgggatggggttccatccctcgaaattttgatgagttctttctattatgccaatgtgactgtaacccatcttctatgcatctgtttatgagtttgcttgcggctgtttcctggaatctttggctaactagaaacaatatggttttcagagataagatcttgtactccccactaactgtcacagcctgatttttcgttttaggatttataaattatttaataaattattaatagaatttatattaaatgttctttaatttacaagtgaagttaaatgtgggaaataaaattttctaaatataaagcatggatggatttaatttttaaattctccatgattaattatactctctgaaattttctcagatttttcggagctcaattcctaaatgatacaaaggacagttcagtaattagttaatcaataatcattaatgatttaattataattatgttaagtgcttttcttgtttaaaaatccttaaattacaaattgttgtttaattggaattagtagaaatgatcttaaaagcttaaaagaaaagatctaattttaatttgttaaattctaagataaaagtgggctagataaaatttcattaaatactttacttgattctatagttcctaaatttttctgggatttatttgagccaaggaagtatttttaataaatggaattgcatttcatgaataatttaaattgaaaaaggttttaaaatctccctttttgttttgggccgaaagtcggcccaaaagccctctctctctccccggcccaagttagcccaccagccgagccgccgctcgcgcgcgcgctctcgctcgctgacaggtggggcccacctgtcaggaccttcttcctcctcgcgccgtcgcccggccgagctctagccgagccgcgccgccgtctccttccaaatttggtcgcacctttcctgctccggccaaatcatttgaggggaaataatccccttgatctcctctatcttttcctctatagaaacttcggataaaatcgtttggaaaccgatggatttgagctcgattcggattcgtctctctcctctaaccctaacctttccatcgccgtcgccggtcgctatgggcctccgtcgccgcctcctagcccctataaaagcatccccgggacctcctccgtccgccgccaccctcgccttagcccgccgccgtctgtagcgccgcctccgcgtgagatcttgcgccgccgtcgccgccgtttgtccagccgtgcgtcgccgtcgctccggtcgtcgtcgtcgctcgggaaggccgccgtcgtgatcgccaagtcgtcgccgtcctcgtccacccctccgtttccaccgaggatcgccggagcatcgccgtcgtcgtcaagccgatcgtcgccgccgcttcatcctcgtcgccgtcgtcgtccggttgtcgtccgccgccgttcgtttctcggtaaggttcgccgcgtcgcccactacccgttggtgtcctccgtttgcgccgctgcgccgtcgttcgccggcgagcatgcaaggctgagccgccgccggtgatgacgtcaccgctgacgtcatcgacgccgtccgccgtagaccacggtagaccgagttgatctcggccgtccgttttggataggatagatctcggccgcccgttccgtagaccatcgccgtgcactcggtccaccgtgagccgagcccactgacgcaataattcccttttccgtttcaaaaataattctttattgcgtcataattcaattaaaatccatataaatgttttaatccggtttaatctttaaaaattcataactaattcatattagctcggttttagttggttcaagtctctaaagttgtataaaataaagatctacatattaaaattatccataaattgaattaaatttatttaatcctttttaaataggctttaattagattaaatcttgtaaaattcgtaattatttcatatgaagtcagaatgagcccgttcaagtctcataattcatctaaaatcatgatctacacatttgtttactttatatgtattgtttatttggagtttcttagtctttttccttgttttgcgttttagcttgtcgtttccgtcgtttcgaaggttcgcgagtgcgccggaagtattcaagaagattaattgaagacccgttattgcaaggcaagtcacacagatcccaaacacagttcctttgagcatgctgatcctatatttaaattctctatttatttcaactgtgcatttattttttaatgtcatcgggctctgtagacccccgtttttataacaggaatcaatcgtgtaaacagtaccatttccctggatcaagtagtctggtacacacgagttcatagccgagataccaaatgcacatacacgagagtctagtgcgaattattacaacataagtctgcaggcgtagtcttaaatcatcagaccgatgtcacatcctgattttttcgttttaggatttataaattatttaataaattattaatagaatttatattaaatgttctttaatttacaagaaaagttaaatgtgggaaataaaatttcctaaatataaagcatggatggatttaatttttattaaattctccatgattaagtcaactctctgaaattttctcggatttttcggagctcaattcctaaatgatacaaagaacagttcagtaattatttgatcattaatgatctaattatttttgttaagagcttttcttgtttaaaaatgcttaaattataaattgttgtttaaaaggaattgttagaaatgattttaaaagcctaaaagagaagatctaattttaatttgttaaatctcaatataaaattgggctagataaaattttgttaaatactttgcttaattctataattcctagatttttctgggatttatttgagctaaggaagtatttttaataaatggaattgcatttcatgaataatttaaattgaaaaaggtttttaaaagtctcttttggctttgggccgaaagtcggcccaagtcggcccagtccgccgagccgccgctctcctctctctctcagccgctgacaggtgggtcccacttgtcagggtcgtcgtcctcctcgcgccgccgccgccgcccgaaaccctagcgcgagccgccgccgtctccttccaaattcggccgatcctttccttctccggccgaatctttagagggaaaatgatccttgagatctcctcttccttttctcttttggaatcatcggctaaaatcgtttggaaattcgtggattcgagttcgattcggatcggcctctttcctccgaatccccgatctttccatcccgccgccggtcgccgtgggccttcgccgtcgccttccaacccctttaaaaggacccccggtgtctcctctacccgccgcctctctcgccttcgcctaccgtcgtgtgtagcaccctagcctcgtgagcttttgcgccgccgtcgtcgccgctgctccagccgtgtgccgccgccgtttcagctatcgccgtcgctcgggaaggtcgtcatcgtggtcgccgtcgggatcgccaagtcgtcgccgtcctcgtccgcccctttgccgccgccggagaccgctggagcaccgtcgccgccgtcgacccgatcttctccgccgctttgacctcgtcgccgtcgccgtccgttggtcttccgccgctcctttggtcaccggtgagttcgtcgtgccgtccgcttcgtcccggtgccttccgttcacgccgtcgcgccgtcgttcgccggcgagcgtgcgccgtccgagctgccgagccgcccgagccgccgccgccggtggtgacgtcatcgctgacgtcatcgtcgctgtctcccgtgagccgccgtggacccgatcgatctcggccgtccgttttggatagggttgatctcggccgtccgttcccgtgaaccgtcgtcgtgcacccggtccaccgcaaaccctagccgctgacgcaataatcctccttttccttttcaaaaataattcattattgcgtcataattcaattaaaatccatataagtgttttaatccgatttaatctttaaaaattcataactaattcatttgaactcagtttaatgtggttcaagttgcaaaaattatataaaataaagatctacatattaaaattatccataaattgaattaaatttatttaattctttttaaatgggctttaattagatttaattttgtaaaattcataataaattcatttgaagtcagaatgaggccgttcaagtctcataattcatctaaaattatgatctacatgtttgtttactttttatgtattatttctttggtttttattagtctttttcttcattttgcgtgatagttagtcgtttccatcgttgcgaaggttcgcgagtgcgccggaagtattcaagaagattaattgaagaccgattattgcaaggcaagtcacacagatcctaaacacaatcctttgagcatgttgatcctatgtttaaattctctatttatttcaactgtgcatttattttggaatgtcattgggtggaattaacctattctttgttatggcccttttgttcttgattactttattccttgataccttgggatattataacttgactagttgagctttatatattggttcagctagatattagctatgattgcttagccatgcttagaaacattagcacactattgggataacttatgactcattatttaatgatggcttaatgatagttcacgatggtcaatcgtgattggttaattaattacttgccaactaaaacttgataatggtgggttgtgagcacatggttttgagagtcgtgctcatgacaattaaggaccggttcgcgagctactattgtgaaacattaatcgtgcaaccacaagccagcgtgggcaacggctttacctttgtataacatgattcattgcggagcaccagactgagaagtgcgggaataagcccacgggggtcgctgggagtnccatgcttgtttataaagggggtgattatgatcaaggaatggtgcactgtggtgagttgtgttgtacaaagggtattgtcacagcctctattcgggtactttccagtatcgcgacgcatggtagacatgatgttgagnctgtgtcttgtgggtacagtggtacacctctggccagagtanaactattcgaatagccgtgcccgcggttatggacgagttgagcaatgtttttcgtgattagtctcacacctctcacaataattatggatgttataactggtaataatttgcttagctccggtttggaatggataattcctggtttggagattagatctgtacagccgggtatggttgttcaggatggttgggcctgtgcagcatgggtgtgctgttcagtgttgattaaaatttctgattaattactccactgttttacttctcttaaatgttttgttaaatgctgcttttgcaaatgagcctatattatgccatcctttggtatccttgtgcacttgcatatttgctgtgtggcttgttgagtatgtcatatgctcattcttgtaataatcaatcaacctcagttgaagacaagttgcgaaggagaagacgtttggcttataccccagttgagctgcctgtgggagtggagccggagctgcgctagattttattttccgctgcagttttcttcttggtgaggactaagtgcctcttaagtaagtacttatcgttttagttaatttgatgaatctgtatattaaattgtcagtttgtgtacctcggctgattcctggacgaggattttatgcacaaataagtttggaaattacttgtgaatttccgggcgtgacaagttggtatcagagccatctcgactgtaggataagccaaatggtcaaaccttaaggactaattttccgaaaacatgatttgtgaaagtttctcctttcttccttatctagaattctttgcaaattgtttcattgtctacttccctctctctttcaacttgagtagttctgaaactagttgttgaaacttgaagacgccaatgtggtctacttatggaggttaagtcaagtggatcgatgaataagaaggtgatggtcgatctgaagtgcccagatgtcaagatggaatgaagtttggatcctaccttagaacctatgccgccaatctatccttgaagaatagttagtagggaagagcgtttgttgtttgctttgtttgtaggtatggttgcattcccatcattggagtagttcattgatgagtgtgtaactatactaggttgcttgcttaatcaacttgaacaatataatggtctacgcacaccagatcagtggtaacctggttaaggtcttgtctttagtgtaacctctctccttctatcttctctaatatgcaatagatggtgaacactcgcgccagtggaagtggaaacaataacaatgaagggaacccaactcttgctcaagtcctggctcaacagactcagttaatgaacatgatgatacagcagatgcagaaccagctcaaccaagggaacaacaatgctccaccgccgcagaacaagttaactgattttcttcgtgtaaggccacctaccttttctagcactaccaacccagtagaagcaggtgattggctacacgctgttgagaagaagttggaactgctccagtgtacggatcaggagaaagttgttttcgcttcacatcagttgcaaggacctgcatcagaatggtgggatcatttccggatgaacagagcagaaggacaaccaatcacttgggaagagtttactgaaggattcaagaagacacacatacctgtaggagttgttgctttgaagaagcgtgagtttagggccttgaagcaaaaggatcataccgtggcagagtatcttcatgaattcaatggcacgttatgctccagaagatgtgcgtactgacgaggaaaggcaggagaagttcttggaaggcttaaaggatgaactgtcagttacgttaatctcccatgactatgttgattttcagcagctggttgacaaagcaattcgacttgaagacaagaagaacaggatggataaccgtaaaaggaaaatgattgtattccaggaggcacaaggtagtagccagaggcagcgtatcaagccactccaaattggtgaatcttcttccgctggtcaaggacagtcgcaacagttgaatatcgctggtgagatcaaatcagagactaatgaaagcaatgaagttaacatcgagcaaataaatcagccgatgccagttcagcaggatcagtctcgggagaataacagtagtagaagggagcagcaggtatgtttcaactgttacaagccaggccactttgcaagagagtgtccgaagccgaagcatcagcagccgcaaggtcaggtcaacaacattgtcgtcacaggagccaatgcagtaccagttgtgtcttcaagagttgcatcttcaagtgttacagctcagccactagtttcaaagcggcagtagttttctataaagccttagaataattatcggagttatggaataagatagactgcagtttacctatgcctttttctttctagccgttccgaatctcgggacgagattctttgtaaggggggtagatctgtcacatcctgattttttcgttttaggatttataaattatttaataaattattaatagaatttatattaaatgttctttaatttacaagaaaagttaaatgtgggaaataaaatttcctaaatataaagcatggatggatttaatttttattaaattctccatgattaattatactctctgaaattttctcggatttttcggagctcaattcctaaatgatacaaaggacagttcagtaattagttaatcaataatcattaatgatttaattataattatgttaagtgcttttcttgtttaaaaatccttaaattacaaattgttgtttaattggaattagtagaaatgatcttaaaagcttaaaagaaaagatctaattttaatttgttaaattctaagataaaagtgggctagataaaatttcattaaatactttacttgattctatagttcctaaatttttctgggatttatttgagccaaggaagtatttttaataaatggaattgcatttcatgaataatttaaattgaaaaaggttttaaaatctccctttttgttttgggccgaaagtcggcccaaaagccctctctctctccccggcccaagttagcccaccagccgagccgccgctcgcgcgcgcgctctcgctcgctgacaggtggggcccacctgtcaggaccttct

SEQ ID NO: 9833 - DNA, 4823 bp, Oryza sativa
gccgcccgttgcaaaccgcgcgcgcgtgctgagtggcctaccgcccggtcgccgccgccgtcagcctatgcacgcgtatgtcgcccgtgtagtcgcgccggtccaaaccgccccgcggtcatcgccgtcgtcatcgcccggcccccgccactccgcgcgctagcctccaaggggcggaggcagagagcccctctccctctgccgagtcgccccgctccctcccccttttcccgaatcggcaaaagggcaagccccttttctctcccttctttttccccttttcctcccgccgacgtcatcctcccttcctcctgtcgccgttttggccgctagccggagcgccagctcgcgccttgaccgccaaagtcggtttccaaaccgacattgccgccccctataaacccaggcgccctcccttcccttttctcccattcttccctgtttctcgcccgcgccattgccgtccctctcgccgaccgcagccatcgcgtgtgtgccggaggagccggtgcgcactaggacgcggaaggggactccgggcgctcgtcttcctcctcttccccggcccgaggccggagagatcactcccgcgccgtcggcctctcgtcactgcgccccgtcccgcacggtagtgtctctctccgttcttcctcctcgctccatctcctcccccctagctttcggtagtagcttgagtagactccccgtagttagccggcgccgccccgaccgttgccgtcgctcgccgtgtgctcgccgccgtcgccgcccgagctccgtagcacccgctcgtcgccggcctcgctcggcgtagttccgcccaatccgacgctagcgtcgagttcccgaagccgcgtagatgctctcaccgccgggaatcgacctctcgtgacctcgtcgccgtttccctcttctcccgccgccggttgccgccgccgcaatccgccgccgtcgagcaacctccggcgaatccgagccgttggctcgcctccccttgtcacgtgcaaccgcccggtgtgctcgctgttgcccgtatcgccgtggttcgctccgccgctcgccgccgccgcccgccgtccattcgcggccgggtcgtcgtctacctcccgccggcccgcgtggcagccacgtaggcgccacgtcggcgccaacttagccagaccgggtcgggccgaccccggtcggtccctccgcgtgcgcgcgatccaccgcgagccgtgaggctgcgcgtgggcccgccgcacctgcgtccaccgtggaccgcgcgcatgcaccgcgtcccttccccgcccgcgcgcgtgcgtcgcgtgctccctccgcacggtgagccgagccgctgacaagcgggtcccacccgggaccgcgcgtggtgagcccggtccaccggctctctctctcctccctcccgcgcgcgcgcgagtttgggccgccttgggccggccggcccatttagctcggccggaccgctccatttctcttgggccgcgccctagccgtccgagaaaagtctatattccctccctcccttcttttctttttcttttccaaaaaggatttaattaaatccttttcctttagatcaaaaattcaataatcttagaaattcaatatcttcccaaccgtaaatccgtttgactccgttcaacttccaaaattccccaaatctcgagatctatctaatggcgcttagaggtctttaatagggctttattttcgccgtttgttgagttgttccgtttcgcgtatagtttcagagcccgaagacccgcagtgcgaggatttcgaggatcaagctccagatctcgagcaaggcaagccacctttgaacatcttgagcctatatttgaaatttaattatgttgcttgcaaaatattatgcattgatagatcgcacttaatctgtttgtcccgtctgcaaggcagattggcggacctacctaatttgtcgcatttgatccttcctttgttaattgctataccatgtccccttgtaaccacccagttgcgcctcgatactcgtgcactctgtgcaagtatcgacggtcgtcttcaaacttaaaatctgagtaacaacttgggtaaaactggagttttacaaaagacttggaaaacccgacacctgggtcggtgcttgcgaactaaatgaatttccaaaaccgcggaccggggaacgtaccgggtgtacggtttcccgctcttgcacttaaggaccgtttccttggaatttcatccgaacataagacaagtacgaccacatgggtggaatgggacgcccctggctgagtaaattgctaatcgggggagccttgatgccgagagacatgtggattcgccggggtggtgtcggggaggacccctgggcttcctggcacagtatggtctgggacctaacctgttgttggtctgggacccctctcgtcggcatatggtaaacctgtatcgactttcgaaatgccttgtcatgaaagcttggaggtctcccgacgtggctgatccccacgggctgggtgacccgggttagtaatgtcgtgtgggtaaagtgtaccccctctgcagaggttaacaaactgttcgaacagccgtgcccacggacatgggcggatgtgaggtgattcctagcgtagttttgtttgtctactgcttgtgaaattgctgttgtgaaaaggggttcgatgtttgaaaaatctgcagctgatgggatcagctaggcccgggtggccgtttggaaagttgttggcccgggtggccgtttaaaaagttgttggcccgggtggccgtttaaaaagctgttggccgggtgccaaccttgttgcaatcctaaagattgacacattgcacatactccgaccggacgagacgcactgtctcatccgtgtcgtttgagaagcactcacttagttgttttcagaaaagagttcaaataaaatcaattgcaaaaactacagccttcccttgaagcctgcattaaacacttatttcccctggcttgctgagtacccccgtactcacccttgctctatataaatatcccccccagttgctgaagaagatgaagcggatcctgctgatgaggagttcttccaggagcaagccggctacgatgagttttagggtttcggcctagttcccaagtcgcgcctgtgatgtttggcccaagtcctggcttccgtttcccttttgtaatgcagttgtgagctcgggatctgtccgcagcccaacatgactgtacctctactctataataaagagacctctgttgctgtgatattctgtctccctgtgataccagcactgtttcctgggactggtatcgattaacaggctaaattggagcgtctcgggctagttccggtcgggactagttcggggcgtgacattgttaaactgagatttatgtataattgggacttttgttaaattggcacctatgtcaaatggagatttctgtttaattgtgactgatgctaaattgggacatatgttaaattgtgacttatgtgaaattaagttattgggacttatgtgaaaataagttaaattgtgacctatgttaatttgagatttatgtataattgggacttatgttaaattgagatttatgtataattgggacttatgttaaattgagatttatgtataattgggacttatgttaaattgggacttatgtcaaattgagacttatgtgaaattgcgtaaaattgggacttacgtaaaattgggacttatgtcaaatttttttacgtcaagttggaagatgtcgaacgaaaaggttccatcgaacgcaccaatagcgcctcaagaaggtaacgctcctcaaaatttcggtagcaataagcagccagacgcttctagtgaataaacgtggcgcacaccaagtgacccgtttccaatggaaataacacaagtcgccccccgcgatgatgatccggactacatacctatcgaacaggccgtaagtgctgaaaatcgttagccatgtattattccctaactatgatgtgacatgaaacctaatggtgtatagagttacctattctgtgcagatggtagtccgacgccgctcgaaacgtaaagccgggaggaacaggacagagcaagaagttgagatggacaccgctacgtctgcacctgaacgtacggagacatctacaagtgcaggcgggagtgggaaaaaaagacgtggtgagagaagcaagaataaattacccaaggaaacttacaacgtgattgctctcgatcaggatgggaagcccgtcgagccaccgatagtgcggttcaagttcagcaacgcctgtggcactctagtcaggacgcgttgtcccattaatgtcaagttgtgggaaacagtggacgacaacatcaagacacttctctggaatgagttgcagaagtattttgtgttccctcctggatcagaggtcagggggagagattacgcacttaaaaagatgggagatcgatggcgacagtggaagtccgatctaaatcgggattatgttcagaagaatctcccaccgtttacggattatggacatatatcgcaggctgactgggacacgtttgttgcggatcgtacaatagctgaagcattggctttgaggaaaaaaatgtccgagctcgcgaagaagaacagatatccccatagattggggtcgagcggatacgctggtcacgtcgatcaatggcgggagatcgagcaaagatttgccgcggccggtaagcccctgctggtagaccccatggttgaacgtagcaagaactgggtttgggcgcgcagcacaggtcaagtctcggatgagggagacatactattcgagact

SEQ ID NO: 9834 - DNA, 26728 bp, Oryza sativa
gaggtctcccgacgtggctgatccccacgggctgggtgacccgggttagtaatgtcgtgtgggtaaagtgtaccccctctgcagaggttaacaaactgttcgaacagccgtgcccacggacatgggcggatgtgaggtgattcctagcgtagttttgtttgtctactgcttgtgaaattgctgttgtgaaaaggggttcgatgtttgaaaaatctgcagctgatgggatcagctaggcccgggtggccgtttggaaagttgttggcccgggtggccgtttgaaaagttgttggcccgggtggccgtttaaaaagctgttggccgggtgccaaccttgttgcaatcctaaagattgacacattgcacatactccgaccggacgagacgcactgtctcatccgtgtcgtttgagaagcactcacttagttgttttcagaaaagagttcaaacaaaatcaattacgaaaacaacagcctttccttgaagcctgcattaaacacttatttcccctgacttgctgagtactcccgtactcacccttgctctatataaataatcccccccagttgctgaagaagatgaagtggatcctgctgacgaggagttcttccaggagcaagtcggctacgatgagttttagggtttcggcctagttcccaagtcgcgcctgtgatgattggttcaagtcctggcttccgctttccttttgtaatgcagttgtgagctcgggatctgtccgcagcccaacatgactgtacttctactctataataaagagacctctgttgctgtgatactctgtctccctgtgataccagcactgtttcctgggactggtatcgattaacaggttaatttggagcgtcacgggctagttccggtcgggactagttcggggcgtgacagccactggccaagaatgctccgcccccgcatcaccccaggtgcgcataataacgactctctctctctctctctctctctatatatatatatatatatatatatatgtgtgaaaatagttctatacaccggggagtacgtacacctgctcccatccaccgtccatccattcaaccagcgatctacccgatcgaacctccccctaacgggtatagttgcattgacccgttaacattttaagtaagatttaatccataattatccagggataatttaactaaccatcgccgattatttctcactaaagcgacacatatctctcgcaatacagacgcgtgggcgtgcggccatggcgcgatccatcggcgattcggccacgacgcgaggcgtggtggctacaggcaatccggcaacgatggcgtggtggttcatcggccgatcggcgtcatgacctgggcacaactggcgtcggaggagatcgtcctcctcgttgttggtaccaatccttgatttctgactgctagatatatattctgattcatggtcgcttctaaatctctgctatcctttcccccttttgcaatgagacaaggatcgtacgagaaccgtatcaatcatggcagaggtttccggccaaaccgtccaacgatggcagctgctcacacggatcctcgatcaacgatggtgtgtctagtcaatgaatcacggcaacaacgtcctgtagaaacacgtactgcaccatgtttatggttatttgatttcaggttcagagctaatatcgatctgccgaaagtcagaggcgacacctaatgcatttgttccaactcccagagaactgaatacattctgaatttttcagcagcatatatatctacctctcggcgtctcggagggggcggcgtgattcagcgatgacgggacggcggcgagattcatccgcagcggcaccaaatccacctcgtcgttccctggtgcggcctttcgttcaacgcgatggtgtcggcgggcgtgcaaaacgaccaccggcggcgccggcaatcagcacgccaggcccaaagattgcagtccaaacatgggcagcgcgaggttctgaggagcagcgacgccgtgcgcggctagtgccagcctctaaagcagaagcggcgtagctggatccaagcggcaacggcgtgtcggcgtcctagcttccagctatgaaccgaaggcctggatggctcatgcaggcagcgacatgatcgagcgatggccacatgcgtcaagcaaggcagcgacggcggattatctaatgatgctgccatgctgtggcctgtggcctgttatatattgcttctctgtaaaatttcttccgatatgtagtagtgaatagatatatatactgcctcctaaaacaaacagtaaaaaacagtatactgctatgcacaaagtagtacatactgctgctttatttgaaggatacactacctgctactgaaagaatcaaagtacattacctgtaaagtggtatatactagtaatgcagtgaatttggtatatatactactatctcgaattagtggtatatatactacctttgtcgaaagaaagtatgtatattgtttcagtgtatacttacagaaatcaatatatactcatttcatgaactcgttctgagttccgagaaaaattcagtctatatactcgttctaagaagaaatcagtatatactcactccgagaaaagttagtatatacttactctgaaaaaagtcagtatatatatcactgttttaaatagcggactaaggcatttagcggttagcttctaaaacggctatagcggcagctatagcgggctaaatggagctatagcagctaaatagtacatgagagcaaatagctagaacccttctcaaagagctataacggaagatttaaaaccctgatatatatactcattatatttggtcattccagtatgcaagtaccaattaagaagaagcaatcagtatatacttattaattccgaattcagtgtgtgtgtgtatacttctgcaatgaaaaaaaaagtagcatatacttgtacatgaaaaattaaaaaaagtatagcacataccagtctataggaaaaacagtatatttgtactccaatgagacatatactgcacgttaacaaaaacagtatatactgcttgatatcctaaacagtatgtacagctttttcaacaaacgggtatatacttctttttatcataggcataaactgccttttatcgtatatactggttttcaatagggtacatatatatgctgcgagtagaaagtaactgctgtacgtacgtacttatgaaatttgaatctaactgcatgcatgcactcgcagttcaaatgtttaccaaaatcaggtgcgtcacctgccgtgcatgcaagcaacatatgaagcaatttgattttcagccggttgaattagatgcaaatggattatccgctaggaagaaggagtatatatatatatatatatatatatatatatatatatattgttgagttgtgatccaaatttatttgcagttaataaaggccagctccggaggtgcgggggcggagctcccacgaaacggatcgtcatcctttttagggttccaccatatatatacctcttgtaagccgccgtgcggcgttgtaacctcacctcagatatagtgaagatattttgctggctaccgcccgtggttttttctctcctgatttggaagggttttccacgttaaatctcgtgtcttctgtgattgatctattgttttttatcgtttgtttgcctatcgttttctaacatagatcacatgctcatttaactgtcaggtctttcttgtgctggaattgccatggatgtgatgtggtgcctagttggatttgttcgtgcgctggatgaaaatgccaacattttgtttcatttggtggatcttttgtatgcaggattagagctattacgccatatagcgtggcgctggtgggagtgacagcatgccctcctcctcgccgctgccgcagccacgaagaactcctcgccgtagggcggtggtgtaggacttgttgtcggagatggtctggttgatggcgaggtagtccgcgatgtgtttgtggccagtgcgccgcatgacattgctcctgcacgacgacgtccccatagttatcgggcggcccgtccggggacacacccaccccgcgccgtgccatggtagtgtccttcgaaggggaagcaaaccaagcagtaggggggaagagagagagcgcaagccctaatttttttttcttctcacttatatgtgggtcccatttatttatttatttttctgattaggatgccacgtcagtaaagatttctaccataggatctactttgcatagctgtatagtttagaagtgaagattatattttttatattggggattaggatgttatacgataggtgaacttattcgttgctacgcaacttccgcgccgcccacgggggatcaggtcctctgcagtaactacaccgtgccattgtcactaggtcggcgtctgtaacagtaatcgtagcacgtaggtacgttcctcttcctgtactcgtgtaaaccagcacagtgccgcatgcagtatgctctgtgcgcgcacgcgacaccgcgtcaaagattccagggttctctgttgcaaccggcacctgcagcagcatcgaccagcaacgtactactagcgcgcatataaccggtgacgactgacgatcggcacgccgcacgcatatctcgcacatcgcatgagttttcaccgcgaaggacggcccgccggggataatttctcccaacttaatcaccacgtaccgcacgaacgtgacggcgcgcgtgggtcggctctcgcgggcggcggctagcgtccgacgagatctcgcgcggtcggccggtacagcatggaggctgggcgtacgccgcatgagcgcgcagcaggggcggatgtgaatgtgatcccgtgcaacgctggccgcctggccggcgccagatcacgacgttggttgcgtgtggctgcggcatcgatcaagtggctaccgtacaagtagtttttactctacttccacggttctaaaatatatactccctccgtcctataatataagagattttgattttttttacttgcactgtttaaccactcgtcttattcaaaaaatttgtgcaaatataaacaacgaaaagttatgcttaaagtactttgtataataaagtaagtcacaaataaaataaataataattttaaatttttttaataagacgaatggtcaaacagtgcaaataaaaagtcaaaatcccttatattatgagacggaggaagtatatatatatatatttaatataataacttattctaaaataaagctattttttcatctatttaaaatcatataatattattactatttatctatttagaatcatatcattatcagggatgaagttaggatttgagatttggggaggataagccacaggaccaaacggccaaagtccgtaacaaccagatacatacagtatctagtgtaacacactataacctccatggctccattgtagctagataattaaccaaaatgtttttagagatagaaaagaaggatcaagtgttcatatagctcctgcagcctccaagacgcaaacatcacataaaccaggctgcatatgttttgccataaaaaaaacgtaactaggcaagcaatcgagagttttcctttctatcttggctgaaattaagataggaaataaaaaaaaatccagtactcaccaatcaactaaatgtatatattatctatgtttctaaattagggacaaatgactaccgtacaaataaaagaaatgagaaaactaaaagtcaagcaattaggatattttgctgtattgggggataatggagaagaaacacacctccgtgctatgtccgatggcgacgtttggtgtgctgcgtgctcaatggctgagatacacgtgatctcgattgaagggtgagtcacaaattatggagaggagctcaccgcgtgcgtcttgtatcactttgccaatggccgctcccatgcatatgatgtgaagttgaaaagataggacgaggattaaggaagaagccgagtcgtcgaatcgctattctctactcgttgatcgttgattctctcgaccggacagatcttggactggaatcttcctaatgggcttcacatggggtcttggcccatatcagataggagggtgccctgcctcctctcccacccatcaattaataacaattgatgtgatatgacttaattaaaagaaaaaaagagaaatataatttagaccatagattaatcatttaagcactaagtgagtatgaactatataagtatatagggtatcataaaacatattaaagatatacattgaaacattatgtgaattatgttggatgataatttaatatgtttgtatttgaaaagctcttaaattataaaaactatatagatatagcatgtttgcatgatgtttaaatgtgatgattgttagtggatgatgatgtggcatcttgttagtggatgatgatgtggcatcttgttagtggataatgatgtggcatctttacatgttaagcttaaggagttagtgggagataactttatagtaagataggatgtgagatataccattttctaccctttaaatattgttggagccatatgaggccactgtatttttatagagaaaattccttacatacccttgaaattttagccgattccttctatgccctgaattttcttcactcccttgtatacctctgaattttgatttggatccttccatacccttgccgtcaattgaccgttagttgaccgtttaataggtatagaaagttagttttacccttcaatatgtgacgaatatgtatcaatttgtaaactatattgtcggaagtatagaatttgttgtgtgattatcatattcataagtttgttgtacataaaaaaattaacatattagaaaagtatgtgtagcattttttaaatgataaatatagttttggaaagcattccaatataatatatacaacaggagaaaatatgttaaactaccataaaaaaagctaaatatactcttttaataagtaaataaatattagttttatgtcattatgtaaaaaataaactttgccatgaataataccttgtaaaataaagtcatcaatataatagtcttatataacaaaattatacacttcaacaatatagctagtctacaatttttagatttccttcacgtctaagggcaaaaaggtcattttcattagaattaaacattcaactagcggtcaactaatggaatgggtataaaagggatcaaagttaaaatttagatgcattcaagggagtagacaaaacttggggggcgtagaagggattggctaaactttaagaggtattaaaggaattttctcattttcatatcgtccaaaatacccctatgtgcattggataagtgagatatgtcattttctatgatgaatgaaacagtatttcattatcttaaaaatagctactccctgctcctgaatagggatcaatcagacgtgtgactgttctaaaaaaaaaatcagacgtgtgactctgtgttgggagagagatgctacgagtaatcgtgtagaccacaggacaagctgtcgatgccgaatatagccagctaactcgccattccctaggcttgaaaatgacaaatcgttcagtccaacgaacacattgccttctgtccatcgtcttcgaattcgggtacttcgaccatctgcctaaactgatgtactaataagcaccctctaattcccattcctgttatattaaaatttgatgagacatggtaaccacaaggctaaacatctatacacacttcacagttaacaattgtcttatgccagataggacaagaaatgaaatttaagcttgtacctatcccaataatttgatgcttagactctgcaacttgcttcccattggatggaactttgcttgcctgataaagttataggagtgtggagtatttcttaggttatataagttgcacccaattattcagaatttgctgttagaaagctacatttctttttggtactcttcagatgtgaccataattgcacgatcattgattttggaacattctgaggctacccgacatggcaataatgttcacgtactgatccatagctaacaccaaatgttatgttgatatgattacatcatgatgtccatattaagcactttcaggctcttaacccagacctcagagcatgcatgggttggccccatgttgcccagacgtaacccctccaaaaacctcaattgattggtatgtgtcgacatctccatagaatgtgaccataattaatgtccttgatgtgtaagttgtgaccaaattagaatcttgggcttagttacattcggaattaatgggttatcagataatcgtttagtatactcagatttgaagaattaagtaagaaggatgattttcccaacatagcaccacctctgaagttgaaaaactagtaaaagattttaagagacattatagctgttagaatatctccaagctaggccacaaatactggaggaatagcccctgatggcctgatccatatcaggattccactctctttcaatgccaaaaaaatcgacacagaacaagaagggaaacacttctgctggacaaggaaaaaaatagggttaattggatccacacaactacaaatatgctaaattagaaaaatatcactcctattcgcgatatcggctgccactgaaattttggaaaattggatctatgtcactccgtcgcgtttttcatccactgtccattaatttcctaactccatgccgttttccaactccggtcgagcggtggcgaatgagctcggcgggtacgcatctaccagcctcgccaccctgcaggtggccgtcgtgcctcctacgctagccttgccgccctcgcggaggaatccgcgcacaaggcggagcatgaaggggacgtccagcctcgcgtcgggcgggtcgcagctgtagcggaacgctgggatcatgacggcgccgagcgacgcctggtctagccgccacgccgcgcgcgcgtcgaggtcggcgaggagcgtcgcgtcgggcccggccatgctcctggcgtggagaagctgaagcaggaagtcgcacttgacgcccttgcagagagtgctgtagtggtccaggcaaacgaagacccgaaggtctggccggcgcgccgccgcggccttgacgcagctgagcacgacgtcggtgagcgccatcccgtcgtgcgcatcgtccaccacgacggcgccttagcgggtgaggagcaggtcggcggcgagctcgtggaggtgtacttgacgactgtgtcggcgtccgaggagcggtcatcgagggcgatggagtaccccacctagcgttcgagctcgacgcgcatgtcggccgcggcgtgggtcgcctcgagcacagcggcgaggctggtacgtctgggagaagacgacgcagccgtggccggtggcatggagcaggcacgggatctggctgctcttacctcttgccccgacccctcacatcgacagcctcatcggcaatggcacctccgccaccgggagagggccttcgatccgccgccaccgccgccaatgtcaatctcgcctcctccccttacttggccgaatgacggaatgcgtcgacggggctcggagaacgcggcggctccggcgactccgccgctctgcctttgccgttcactgtccgccgcccacgacgccagccttcgtgcctcacctcctggaaaaagtgacgggaaggatggaaagagtgacggaaaggacggaaaacctgatggagtggcgtggattcaatttctcaaactttcagttgcacctagcctagctgatatcgcgaatagtagtggtattttttctattttgccatatttgcagtaatatggatccaattgaaaaaaaaaatgctgccagtagcaacagtactttcacggccttaaagttaaaacttgcacacactgttggtctgttgctcattcaatcgtttgcatgccctgcaatcctgataccctgctgttgctcatgatcagtcagttgctcccgagacgcaacaacactgttgctgctgctgcatgaatgcatcgatcatgtagcctgcacgagcagcgaaggcagccaaatttatgctttttttttccctgagaacagtgcaaacgagagctaccggctacttgtgtggtagggcaaatagtggtgtgatcagtactctccatggcaggcgaactggcggaggctgggctcgccatgccgctctcaccttggctgactgcgctacggctagattcagccaaactgcacactgcttcgcgagttcgcgtgacggcccgggctgccacgagaacacactccgcggcgtggatttctacgggtctctgccgattttctgcagagtcgtggcgctagctagatcactgcctcactggcaagcaaagcaacaacacagtggtatgtgcatggctccaaataaccaaccgctgtaccgcccagtgcccactatggtctacttgattctaccggcaaattcttgagggcatctcgatcgatcacataccggagagtgctaggcacatgggttgcaatttatacctgtgatcaacgtggcggtcgtacgtgcatcaccaaccacaatatatgtgccgtgcgtcagtgtgtgtttgcatagggaataacaggaacttgggagttctatatgctcggtctggttttaaaatgtccattcagtgaagcaatggataaaataattttttcaaactaataattgcacatgggaaataaagacatcttgggatgtgtccaatcaagatttttaaatttaagagagaaaatttattatggagtattacctccgtcctaaactgttactacttcgtctgtttcaaaataagtacacatagtacatgatgtgatatatcataatactataaatttggacaaatatctctactaatgatagcaaataattttgacaaaaaatttaatccaatcctctttttttctatagaaaagtgtgagaataatttcacggagttcgtgatgtaaagttcctatatttcaaagaaaccataaggggcgtaggattttcaaagcatttagctcaagtccttgaaaacactcataactcttccattccaaagaagagtttgatcaaagtgtggcatggtgcttttaaaatccccttaggaacaaacaatactcactccatccaaatatatttatacgagaatgctaaagaaagtttcccttccaacgcatgtgcacggtatccgacatccgctatcgcgcctaccacccacgtgcacgcttctgttcctcttcctgttcgctaccccaccatgatcatcgatatcatcgttgttttctcgttgcgaagaccacaacaccacatagtcccgttggtgctaacctcctctcttgcggtggtgcccttgccacccttccccttccacaacttgatcattgttgccatcccgacctcgccgtttggtcaagtgccaccacaaaggccatggcgagcgaccagccgccgtcgacgttggctgcatcacaagctaaaacatgtactccatgccgaccgccttcttggactagacctacgccatctttgcctgatggcaaacacgagttgtcgatccacctcgctagcgaacacgagccatctcttctcctgcaggctaagcctcttgcggtggatggtgagggcctatcaccatgaggtctacccacctgcgcccctaccgctcaattccacagttgacgagctagatccagatgagtgaggttgtgagtttcatagatggtggcgttggagcacaaagcgttgtcgttggcaccattagggtaccgggtctagtacccacctgatatcatcttgttctagaatagattaggattcagcatgataaggtgtatttcatttcattatgataaggttttgaccaacaaatattagaatattttttacacaaatttgatgtcactatatttgtactcgaattaagtacttactattattcttcttttgtattacataaataatatattaacggaataactgccaatcaaagctttatcctaatgaactattgaaacaccatacttcttgtatttggacgggcggtaattcacagtccaatgataaaacaatccactgatatttttgttccaaaaaactttaaaacggttggaactcggaaatgataaaaaaaggataaatattcttcatcatcttagccatgctgggccgggtttttgcaggcccgtccgaggctcggtaaaagttccgttacctttttgggcgacaaaagtacgtcttaccccacacgaccaaattatggcctaatcacaccaaaatccactcccttccaaaccctcccatcaatcactcctatagtatactcgtactatactacactctcatctccccctgctcgttgtcatgctctcccattccatggctccatccatttcgattcccaaacagccgcagctagagctagagctgagctaagctagctatttcacgtgtccatcgagccaaagccaacctgttgctacaaggtgagctgctgccgcctacaacaaccgcgcgctatccaatggaggaaacctagcttcttcttgatccacagtttgttttgtgcgtgcaaaaggtgtctcgttgagaggtgagatcctgcggaggcatggcactggaggccgtgctgctctcgcgtggtgatctgtttggtcgtcgtcgttgcgccatggaaggaggaggaggtggttggagcagcccgttcagtggcttcgagggagtgatggatttggacggcggcaactgggacgccgccgcgtgctcatcgatgcttctgcatggcttccaggagctagagatccctgcggccgccgctgctgctgctgccatggcgccgccgccgccgccggtagagcctgctaattgcgcggagaatgcaggaggggttggtggtcatcaggaggatcaggctgcggtggcggcagcggcgacggcggtgcagtcggggaggaggaagcggcggcgggcgagggcggcgaagaacaaggaggaggtggagagccagcggatgacccacattgccgtcgagcgcaaccgccggaagcagatgaacgagtacctcgccgtgctccgctccctcatgccgccgtcctacgcgcaaagggtaacacagctagcttgctagctcacctcactgccggtcattccacggcttcgcctcgccggccggccgccggccgccggccgtactgcttttgagttttgatttatcttgcatttgcatggcgttctctcttcatgcatgtactgcttatgtgcgcagggtgatcaggcgtccatcgtcggcggcgcaatcaacttcgtcaaggagctggagcagctgctccagtcgctggaggcgcggaagagttcccggcaatgcgcggcccacgacgcggcggcagcggcggcgccgttcgccagcttcttcaccttcccgcagtactcgatgagcgccgccgccgccgcggcgccggtggctcccgttgtgaacgagttgcacggccgtgacgacggcggagcaggcaccgccgaggccgaggcgtcagggtcgaagccgtcggcggtggccgacgtcgaggtgaccatggtggagagccacgccaacctgcgggtgctgtcacggcggcggccgaggcagctgctccggctggtggtggcgctgcagggccaccggctcaccgtgctccacctcaacatgaccagcgccggccacatggttctctactcgttcagcctcaaggtaaaaaaaaaatccaagtacgactactacaaatctacaatctactacgcattcctcacatctagtaccattactaaacaatttgatctgattgcaaactaaacatatgtgtggctctcaatccaagatgcatagtacctatatctggttagcaatatcacactgaaacaagttgttggtgcctaggtttccgtgcattttgtatcttgctttgtcttgcacaactgctccaaattcccccatctgtttactttaatggagctcagctggagtagctaaaaggttgcggttccctaaaaaagggccattgtttgacctgccaatggatcgtcatctcaagtgatctcgtcgtcaatggcaggtggaggatgattgccagcttacgtctgtggatgagattgcaaccgccgctcatcagatcattgagaagattcaagaagagcagggctgtagtttagattagcaattagcataccaaccaactacgtttactagcatgtatgaatgatgatgattagttgttctagcaagtgaagccacttccttgtgcaaactaatattattgtgcctttatgtacttagcagtttcattaatcattagtgttgaatcatttcataataatggactgatttgttcatatgtggagtgtgcaagtgaaacgcatgcatggttagctgtgtacgttacgtttgaaaataaaactacgaatacttatatgctctagctagagaacaattgcatagtagacatgacacatgacattccttgtgggtgctaccatgttccttaggacctgacacaattgacaggagctatttcaataccttcttgcgaggattctgtttcccttgtgaagcaccaattactgccaaaataccaaagattccccatcttgtggccacacagcttgcccgttactttcctgaacgttcattctgctcctccatcctgtgatcaaccaagtgaagttcatgcaaatagccaaaaagccctctctaaaaatagttcttcggtttattctgctgtgtataccgaaattctaaatattacgagaagttcagataccatgtaaaggaatagaagcccaacaaaagaaaatgctcaatcaggcctttagttgggcacttgaaagtgatgggtttaaaaagtttcagtgtaccataatcagttcgttacaataaacaagatagaagcctttaaaggaaagcacaaacatgaacatcaaatcagcaaagcaaagcaaaacgataccaagaaaacgataagaaagaaatgaaaataggacgcaagctgtgtcctctcattgacccaagaaaagattctacaacagggtcctttacctgattgaccttttaccgtttctatctaagcatgattgatcaaatagtgaaagagctgcacagccatttcacctatgtgatgcttgcaccctgattgattcgaccgacaggacaaaacacatgtgccacttgctctcatgctgcatgtcgttttcgctcttcaaatgttctgctccatcgaagcatcatctggtaaaataaagaagtggagccacctgagagaaaagaaaaggataaacagcaacgtcagtgtggagttaacttcatgcaccaaccaatcaccccaaagttcaccaaccaaccgttcgcccaaaaggtcaagttgctagggaaagatgtgcaactctactagtatcacacaagtaaaatgaagaaaaaaagatgggcaactcgatgtgtgcgtataaatgtatctgtgcacgcatgtgagtggccatgaaaatgacagatccgtaaaacaaggaagcaaaccaaagaacacaagatatactggtaggatcatcgagttggaccatgacagataaacttatgcaccttatgcctagacgtatgcataatgcatatttgcatagatggaaggatcgcatctcatacattgattcaatagaatgcaactactttttgcagtatagggacaccaaaaaggataaaaaaaacatggctcaaaatctgcaaaacaggctgtagaccgaaacaagatagttgttacttaagtagaataaccatagcttattataatagtctctgtgacaaccaatctccacagcagacatagcatagatcacaaatctttataaagacctactcctgagggtctataggttagaggcgacttatcttcctattccaggactccataagaataatgacagaaaaacctttatgctccaagttgaacacttgaaccttgaaacaagcaaaagcacggtgtcaggaaatttataatcctctgtgaattgaataatagactataaagtaatatacttcagacagaatttcctaactgactccattcagatgaacctgattcataataaagtggtcccatcaaactaaccacgcatgagatgaaaatgttagtgcttcatcttaataagaaaaaccttcggacagacacctacatgcatgctaatcacaactacagggaaatgcaaaaatgtaattatttagtagtacaaaattatcaggctaagacttctaagcagacaactacattgaattctaaacaagattgatactaaccgtagttgttgaagatatgtaagtagaaccataccgcttgactaaaagttatatgtaacaataaccaagaaattgtagagtcttcccacacctattagcatgtcatacacaacaaataaaaactctaaggttttaactgtacaattaatttttgtgaataaatttattctgaaatgaattgtttgatggaagcagtgcccaaatagcacacaaagatacaccttaagaacaggtttagttggctagagagagagagagagagaaacatctgtgtattaaatggaacggaaagcataaatattttagggggaaaaggagtgctgttcaagtttcaaacagtggaagtctgtcatacatattgaaatatatcagaatagaaaagcgagaaagctaatataacaatgcatgtcgaaacaaatgaatcatgccaacctaaatgggtgcatatgttacactataaaagtacacttttcctgctcatcaaccaaagtagtcagtggacaactggaaaacagcagcgcaaccccatcatgtagcacagaaacaaaaaaaaaaaagacagcttaacagatgcataatttttgtttgcttgcatttttaataaataaccccatttgaacaaagggttgggaacaggaagagatgaaacaatgattgacaaagaagacgtaaaggttgcaacaaagtcaagcataactgcatcagtggatttttcagtggttgcaaaggtagctaaaagaagaaccagcagcagcaactttgatgaagcacgagcgaaaaaaaaaatttggttggtgtgatattttatcaaataagacaattttatctatgcattagctcccaaacaaaaaatggtctactatgcagtctgcacatctatcaatgaagaaatttggaggtacatgagagctgaattatagctgtaaaatgtttgttgcataagcttcaacatattaacaatccaagttccttccagacatgtccattccttaatctgagatctcacccaagcatgttaaaggggcagtaggtagaccatcaagtaaactaacacaggaaattcaaaacacaagtacaatcaatataaagatatttttgttcatctatcagaatagcgaagtaagtggtaaaaaacaattagtcttttagatgtttgatagaaagaatttaacatggttgctcaagtcacatttatatgtgctgcagtgcttaaaagtgaactaaaggtatgattgtagaaggtagttatatattcttaaattcattataatccagaaatatatggattcttaacagaattccttgacagttgggcatattgatatttaccagaatttggaaggtggaatagagctttaagagaagacacatcagaatgttgatatagtgatcccatatcttttcaaaataaaaaagagacattcattgcataaaaaaataacaggggaaaaatatttgttcaacttctttaagcatgaattgacaaacttgatcctcactgaacaggagaggaatgccgagacaaagaacagagatattgcacagaaacacacaacttcactaacatggagaagctgcaacagagagtaaatataaatgtgtgatttttacttttactaaatcatcttaaagcctgcaaagttataaaatgaatagttttagcgatttctactaatgtaatttgttgagacaaaaaaaagagcatagatggttgcaatgctggaaaaaaaaacaattcctttttctaattaaacacaacgtcaagttaatttataactgtcaagttgaatgtctttctttgagataaatacgatttaataagagtaaatttaaatcagtgttttaaccaaatatcgcataagacatttaatgacatagccacagccggtcagctactaaacaaaggccaagagaaactgaaaaaaaaaatggcaactgagtgatacttactgcatctaaatgcagaagttttgcaaaactctgaatcctatgctaaaggctaaactgcacatggagaagcaggagaggagacaatttgaaagttatagcccttttccaacctgacttactcacaaaaatggttagctgatatgctagttctccacaaccactctttgcagtttggcctcccctaaggctgtcatttgctttgtctctaatcccacttttgtacagatttttggtaaagcaattactgtaattcagtgtctcatacaccagcattcaggctatactctgaatcagtaacttagaggttttcttaataggaacttcttgacaggctgactattatggaaacagaggtacaacaaataaaaggataggagtctgattacaaaaacagaatagatcagagccttcaagtgcaatttgtctaatttgaaatgtaatggaacttcttgaaatgcaccttgctttgggctccaaaactgatacttataaagaagcgaggaaagtggaagagctgatatgaggtaccttgatctggtgaatccttcctaaatctgcaggagaagccacagcattactttttagttcatgtatatcctgccaaaaaataaagcctcattcacaaaagctattatatgttagctcattagtgtcgaagtaccaattacgcataatatttcagagcatccacttgataaatatacgtaccaaatttcataacatcgattgataaataaggttagcagatgctgaattactaaccaagccctcatttctatatgtcctcaatgctatccatggtttcatgcaaaagtaaatgtctaataatagcatcagccattgtcagcaaatgttagtttacacagctatagataaattgttttagtgcatgtgctattttcgtaggtgataatccaaccctacttgcattgtgttactccctccgtttcacaatgtaagtcattgtagcatttcccacattcatattgatgttaatgaatctagacatatatatctatctagatttattaacatcgatacgaatgtgggaaatgctagaatgacttacattgtgaaacggaggaagtacatgatatagagagaagacaaacttgagtttgttccttcaaattcactagatcccaagctcaaaactatgatacaggcaacctgggaggtacaaatttacacgagctcatcaactcaagaagtacttatcacctccacagttacaattgtcaactcatttgtctcagaaggagattttctccaagagctacttcagctctctggttatctggtatacgctttctatcaaaagacatgacacactaccagctcccagctttgctgaggctgcaactccctttgacagcaaaatcatgccaactcacagtggtaacacagcactactggagcgcccattccgtgagaagaagaacccctgcccactgctcgacatcgatctgccaatcccaaaccgccctgcctgacaagaggaagaagacgtccctgttgcatccttctctttcacgctgaataacttcatctcttgaccattcggaaattttcgatcaccccgcatggcatcgtcctgcgcttcaggcacaaccaccaggaataacggtgagtccatggacgccgagcgccgtattggcttgggcatcaccctcccaccatcctctggtgaagctgctgtgtcctcactttgagtgtccgaagaggtgtcagaatcctcggagacatcggcacgtgattccgatagcgagatttcatcaaacacctggtgctcttccgcttgcccaccaccctccgcctcaccttcggtagccgtggcggggagatcggagggaacgacgactggggatctgcagagcgggcagttgacgtgtgcgcggagccaggtgtcgatgcaaggcgcatggaacggatgcgagcagcgcgggaggaggcggaccaactccccgtcgcggaactcgccgaggcacaccgcgcagtcccctccccacccaactccggcgcggtactccgcggtggctatggacgtgatggtggcctcgtccagccccaccgtgcggatgtaccacacgtggtgcacatccccgccgccgccccccgcctcctcatccccgtcgccgaacccgtcgtcgccggggagcggcgcggtcgcggcccggcgccggcggcgcaggacgacgcggcggcggtagagcaggatcgtggagacagagagcgagatgaacaggaaggcggagaggagtgagacggtgaggaggaggcgtacggggaggtggtggtcgtcgacggccacgtcgacgcgcgggaccaccggcgacggcggcgggggctcggcgatctcgtagcagctgccgcctgggcagaccgggtggcagtcgagcgggtaggccgagcagtcgacggtggccgtcccgttgacgcggctcggccgctccgggtacaacatggcggcgcggaacacctagcgacgatccggcggtggcagctcggcggcggcgacggcggcgcgcatcggtgtgagtaccccgcggcggcggcggcggcggtggtggtggaattggggtggagacgtggagtggattggtcgttgttgttgggtttggtaaaggtttgggggggaatgcgtggaggtggagctggagagcacacacgctacgagtgccaaaaaattaaagcacagaatgacctaatcttttgtatgcagtcactgatactgtgggtccagattgccaagacacaaattggggcccactactcagtgacaagcaatcggttttgctgtaacgtatggtcgtgcacatagcagcaggcggcgacctcggtttacggaaagtcaaaggcgataatcctaattttgaatggaaacactgcaggcgaaaggaaagctgaaggagttattctcccgtatctgtagaacggcagtagcaagttgaagagatctaccccgttggttttggcatctgacggcctcagttcgttggtgagagaggcagcgagatttcgttagtggccctatttggggccatgacagtgaagtgtcactacttaatactacgagtaatggagaagacgacgactgcacgggttaattatgtggccgacagtggacgactttgtgacgccgccgctgtttagggtaatttttgtccgacggaatcgggttggctctgttaggcaatatatttaatccaaatcctaacgcaatcagtgggagatcaatcgcaaaatcaccatcatcgataagctttttctgaaactttccaccgccaagtatttgatggtctctgaattctccttgcgattttgaaacgacactgctgcgtttgactgggagtactggaccaagaggggaggactaaaatatgacccgggccagcataagaattgctgggccgtcccgaaggagtacgtgccaagtcggcccatcaggcccacgtaaacgggaggtaattaaggtctgcgtcacgaaagcgattgattgatcatcaggtaatcctcatgcgtaaattgtactcgttcctcttcctcctctactactccaagtcgtttttatcgaatttttaatgcggatgactaatcacttcatcagaaacacgatagaacacggcaataacatatgggtcgtttcttccctccgtccacctaccgcttgttcccctaattgatctctccccatggcaaccctcacgctgccggcgaccggagccgccgcgcaacccggccaggaagacccaaggtatgcgttcccttggttgcttatttctaaagaattttacctttaaccaaagttggatgtgaaatcgagtgatttgttggatttgctccgtctcgatgcagcgggatcaagaatcctggcgatggtgcgggagattcgagcggcatcgactccgggtatgtggtctctgagcaagaacagcgctttctcttgcttgatttttggagaattttaggtcaagggcttgtattaagatggttggtttgtgtggtcagatgggttgttctggggaaatctgacatagttccggcggatttggctgccgctgccgctgacgccggccaccgacagcttgggttctcgccgttaccgatgcttccaatttggtaggaattgggggaagaaataccgtattgtactgctgttctgagaaccattgcgattgatatctctcgtatttttctcagggtgcagatggtgcttggaggcgtagtctacacggccgtgccgttctacaatagggccaggaaagccgaaggtgcaattacacaaatccaatacctggttgctttagagtttagacccaatacaactgctaatttgcaaatgttataggagtaaatcatttccccttagctcattaattgtttgtgatcgctttagatccatacaactactaatcttgcaaatggcattggagtaaatcattttcaccatagctcactaattgtttatcagttattcatatcaactaccccttaaatggcatacccatataactctacttgtgttgctatgttagatgaggtgacaaaaaatgtggaaactgcattggaggttgtggagcacgccgcggaggtgacagagaagttagctgctaatgtggccaatgctctaccagagaatggtaccctgcataagttggccgaggaggttgagtacattgctgagatagtggataaggatgcacagaaggttgaaatcatcataaagaaggtatgtatgtcaattgttgtgtatatatatcatcatgtcaaggatatatatattagtaatgagaatgttatgtccacggtacatgattagcatgctttctgtttagatgtagtagaagttacagttagaaacatcatatgcaattacatgtttctgaccatttcagactattgaattggcttttgactaaaggttagtttgttgttgcttgcaaggaaccatggacagattcaattctttttttcagcagcttcataaactatgaattggacagattcaattctttttttcagcagcttcataaactatgaattagacatggctttgggctggggaaagcatatgttcactttgtactgggaaagaaaacaaagagagttggacatggcttctctcgaaacaagctttggtagctcaattataaattttcaagagaactctagcatctagatgagatgaaaaacagcttgcttttgttactgtatacactatacatagtttcttgttgtcattacctgaattatcaatattaaatttgactgtttaccattatcctgttcatgttgcagattgaagatgtcagcaatcggatagacgctgctgtggagcctgtcattgaagagctcgaaaaggaattcaaaccatagccaagcatctggtggatcagaaggcccaaaattattcttgttgtaaatatcgttattttctattttgttctttctaagcatctattgtgtacatatatattgtgatgccctaaaatgaaaccacgccgtagttctagcaagactaggtgatggtgtgttggatgctcgaagctgaagcatcctgtaatctcgttgtaaaatacaactgaagatctaaaacagtatatcggattgaaacttgaaagaacatattcttctgctgttgtttcatgcgtgctaaattactcttttgatgttgctaattattttttccctttgtttgaagggaggccatgaaatattaatcagggttagcacactcaaaattcagactgattggattgtagtaactcgactatcaattgccttgccaccaaaaatctagtccagaaatctttatgtaaactggaagagaagtcaatcagatttattacttcaatattgacattccaagatcatacttctcacctagcttatgaattcaactgctcttctcacttcaaagtttcaggcgaaagagactctgtaatgttttccgtttcagatatgcaaagcatgtctttcaatttgcatgcgtggtacgatcaaatatgttcacatttgtggatggtatatttgacctagagatctggcatgggaacgaaccctctacgacgattagccaagattctcgtttgtctgcctgaaggaaaaactgtcagatgcatcagcttcataaagcttgtcaattcaactcgtctgctcatttaacagtctcagcgtgtctgtcgagtgaaggagacgagaaatgcctaggggtcttccggctagctccacaaggtggtgggctagacgacctggattcaaagcctcacccctcctaattatttgatattaggtccttccctaatattctagtttttcgagtgaaggagactatgccatgtttgtttttctgatatgcacaacagcacaagttgtcttctttttgcggtcaaatgcagtatgactatgagcagacatggttatattatagacttgaaatgtttgcattggtgagtgatgacaggcgacgaggagttcaatctgcactcactattccgccgccagctgccggagcaagagctcgggccacatctcagaatagtgaggtgttattggtgttgacgacgatggtcaaggagggcggtaggaggaggatggccactgaggtggaggaagaggacaaagcgctgctgggatggaaaaacggatctgggagatactaatatttagcccttatgcgtcaagatcatccctcacacggaatccctaggctacgtatctgaagcgcgcaagctcgatctaacagacaaacaagcgaccggttgagagaaatcccatcgatatgagttgcacgtgagagccatctccaacagcctccctaaatctcactctccaaatatctatttatcaagtcaaaatcgttgtttgctccaacagtctttccattcaccctctctactctaggtctatagaaaaaaatggtggaataatttgcatgggacccactagcaataggtggagtgagggagggcatgggcaatggtggagagagaaaagggaaaaagatgatgggcccacagatgtctagttcgtgtggatggccaacggctggccaaatttggctagcttgagcccatctttagccattgctattttttggctagggggatagccattccgttggagtacattttttgtccaaagttgttaaaatttggcttggagagtgggatggggaggctgttggagatgctctaactacgtaagtcgacatctcaacgcacgtaatccacaaccccgttgttaatcctccaataatccaactccctttccgacccaacaaatatgggcgcagctggttagtcgaaacctgttccggcctaactaaaatgggccgcacgtaactccgaataaaggaataagtttatataggtctcttaacttgacggcgcgtttgatcattatcattgaaccttaataccagataccatgaggcattcaactgtcaaaaccggtggacggcacaggaaagccgaaagctatacaagctcctcgccagcctacttcatcatcgccgtcgggcacaccgcatgccgcgcgtcgcgcacggatgcatcgaggtggcggcacgggcatgccacgccattgcccgctgccacaacgctgctatctgacccatcgccgctcctcagggacacctgtgtggtgaggcttgcgtcaccgcacccgcgctctccaacgcgctcaagcgggcgcgtacacgcaccaccgccgcaccggtagcgatggtgtcaagccagatgaccaccacatcggcttcgagatgaagagggatgtgtcgcttacatgtgaagccagagcagctcggcctcacagcttgcgtggtcgctaccaccagtgttgccgccgacgttggcactagcctaccccctttgtcaccctcctcgttggcatggatgccctcgccatccaagtgaagagaaaaagagataggtgaagagagagaggagtaaaaaggccttgacatggtgaggcccacgcttacttaacgctgttgctcgggtcaaattgctacgtcagacaaaccacccgctatattgtcatgggacctatattacaccagttttgatagttaataaacccattgtatatgttattgtggttcaagaatgagtatcgagctcgttgtcaacttaacgtgtgggccccacatgtcaggtctccacgtcaactctctctttcccctcctctctttctctgtttctctcctttctccctccctctcgctctctgctctcgcagggcatggggatgccggcgctagggcgcccacggcggcgcgcgcggccggggttggcgtcgtcggcggcggcgggaaatgggttgtcatcgtcgtcgatgttgtcgaggaggctgaggaggtcgtcggccgtggagatgat

SEQ ID NO: 9835 - DNA, 20058 bp, Oryza sativa
tacacggccagaggaaatatcgaggcacttgtatcctttgtgttgattactatagccaaaaaaagcacaacgtttagaacggaattgaagcttatgtgcattgtatggtctaagattaggccaacaagcacaaccaaatactcgtaggaagtgatagtcaggtttatggccaaaaagaagttccaaaggagtagaaaaattgataactctactaggaacacgattgatcaaatatgtggctgtgagaaaagcttcatcccaaaatttaagaggcatagaagcatgagcaagaagagacaaccctacttcaacaatatgtctatgtttacgttcagcagagccatttttttgatgtgtatgaggacatgagatatgatgagcaatgccaatcttctgaaagaaggaattaagcttctaatattcaccaccccaatatgtctgcatagacagaatcttcctattaaactgtcgttctacaagatgttggaaatttgtgaagactgagaaaacatcagacttattcttgagaagatagatccaagtaaatttactaaaatcatcaataaagcttacataatacttgaatctccctactgattgaggtgcaggaccccaaacatctgagaacactagatctaaaggagcagatgaccgactagtagatttaggaaaaggtaattgatgactcttagcttgttgacaagcatcacacaccacatctctatgaggctcactaacagtaacattgttttctctaagaattttgctgacaatattaaaagaaggatgacctaaacgactatgccatctagactctgaagaatttgtagttgcaagaacttgacgtgtttgacgagcatctattttctcaggaagaggatagagacgtcctcgagctctaccttgaagaagtgttgtcttcgtgacctgatccttgatatgaaagaaatcacgatgaatttcaacaaaagcatgattatcagaggcaagacgatgagcagagatcaaattctttttttgctttggggacatataaaactttattaagataaagatcacgagtaggggtatgaataatagtttttccaatgtgacttatgctcatacctgtgccatttgctgcatgaacttgatcactaccatgatatttctccttcgttgtcagcttatcaagttctgaagttatgtgatcagtggcagccgtgtcgacgtaccaatttgtgtcaacaccatatgatgatgccatagcagaagaggctgacctctgaacttgtctttcatctcctctgtaagatcgatcaaatctcttccaacaagattgaacagtgtgtccaatcttgctgcacaattggcacacaggacgtgtatcttcgccaccaccatgacctcgtccaccacggccgcgaacaaaaccaccacgcccatggccacgattctgatagcctcctcgtgaggcagtatttgcagaagattgatagcctccatcagcttggagcttgagatgtgcctcgaacgagagtagttgtgcatatagatcactcaatgacacataatctttagcagaaactgatgcgacaagaggattataatctgcatctagccctgcaaggatatatgagatgacatcgtcatcatctagcttcttcccggccgccgccatctcgtcggccaagctcttcatcttggtgaagtatacagcagccgaagaatctcctttctgctctcttgctagctgcgaacggatctgaataatccgttcccttgattgcgaggagtacatctccccgattgcagtccatacctccctggcactatctagatgtgccacttgaacaagcacctctcgtgtgagagatgagaggagatatcccaggacttgttgatcttgagcaatccaccgagaatacgccggattgtcgatcatctccttcacgatcttgtcatcgactttcttgacgacgctgatcatcggtgacggcacctcctttgtatcgtccaagaaaccagtgagttgtaccccacgcacagccggcaaaacttgcgcacgccataccaaataattgtctctggtcagcttttctgagacaggatgacccaacacgctcgaaaacgatgaggaactcgacgacgccatggctagatgaactatgtggaagggaatggctctgataccatgaaaaaattgttgtagcgttcctacctccaaagagaccgctgtacgtgtttatatagcaaaaacaggaagagtacaaatcagattacaatccgagtctgaataagttctttacttctatctacagcaccaacctatagcaggagtacatgactctatatctctgaaacagagtcagacaagaaccaaactaagactcgacaacaagtctgaaactatctctatgtttaacaaggcatatgtggtacgaagatacgtacgaaatcacgcagcacacatcacattaatttagatctttgttattctttcatgttcgtttaccgatttaaattgcggggccggttttataacatcgaagaccccgtgttcgtaggccgtgtgacgatgtacgttgttgtcagtccttttcagtgttcaaacaaatataatccacaggacaaattcgttcatatatactatattattatgtttcttcttttcgctctctcatacaatctgttttattggcaccaaccggaattcagctggaacactgaacacacacgttcgcttcctgtctcgtttggagaagcactgcactttattgactatatactccgtagatatgcatgtattgtcttcaccttacaccctgcaaaccacaaacacattggtcgaacgaatgatcagccgacatgcattctatcatcttctgatagtagtaccagataaaaattgaaaaatagaagtggatcgatgagattgagaatttgagatgcatgtatgcgagtatatatgtaacgtactggcggtagtcgatcttgatcttgccggcgtcggggttggcgatgatggcgaaggcctcctgggagaggtcgatggtgccctggcagccggaggggcagtggtcgacgatcttcacggtgacgctccggccggtgcacggccgcggcaccccctggttggtggcgcccgtgcacgtcaccacgtaccgcttcccgcacgccgccccgccgttccagaacacgtcgctcgccgccgcgatcatcgtcccctgctcctggaacccgaagcacgccgatgctgcacgcacgcacgcatttcacacacatctccacttttacttcacgtacgtgtacccagtggatgcatggtggagagagaagaaaaaatactgaacatacgcgtgtaaggaggcgtgtagaaagtcgcagtgccagagatgccagcgaccagagacaccatcgccaggcctaccacggctgccataacaaccgaagtcaccttaggcatcgtcgtcgtcatcgtaatcaattcagggtgtatctggaaactggagtacaagatcagagtgtctaaaagattagttctgcaggagggttgcatggtttagtgtgcaccggccgttttatagccaaaatcagaaggtcgatcgggtagaaaaacacgcaagggtgggtcgtgttttcaacgtttgcgtctgcatgtactgatgtacatggcgcgaagatgcgatatcttccaatgcgaagagaagacaggcgatgtactgttgcccgtggagaaaaatatgtgagatagcaaatacgaccggttgctacgcgtgactcaccacctctcgtcttgaagctttgcacgtcgttgtagtgtgtcactgcacgcttctcctcgaaacacggcgcagccggctcggttgtccgatgcgtgcggcggcgagagagagcaggcagccacgatgattaccaactgcaaactggggcgtagaatcgagcgcgcgcgcgcgcggctctccgaggtccaaggcaagccgcgacgcgagcgtgtgccgcatgacttgcaatcttgcacgagctacggcccggctgcttggagtgctggaggcttcgtcgatgggccggaggccttcgccgcggcgcgcgcaaaggctctcaaaagtccaagaaggccgatcaatgacagcgcgccgtcggacggactggatgtcttcgcagctacgagcgggccgggtcaccgcacggtctgaaaagcccaggaaacctgcaaacgagcgccgaaggaataagatcactttgactccctcaactgacaactgaatctaaattgtatccctcaactgtaatactagaaattttaacctctaaacttaaaaaaccggtgcaatttgactcccttagtggttttggagggcggttttgctgacgtggcgcacacatggcagtgttgatttactctttgtcccacgtggcattgacgtagggtttatgtggcattaaaataaaaaaaatatgcgggcccatttgtcattaaaaaaaagtgtagggtccactgacatgtaggccccacatgtcatattctctctcactacccttcttcttcctcctctctcctctctccactaacatgtattttcatccatctcatctgcatttgcatctgtttctccctctcactcttgcttcgtgttcgtcctcgtttggtctctgtttcttctcgatttggtttttctgctatggagcccatgaagcagcgagcagcagagctcctctagctcagcccctaacaacctaaactcctgaagaaggcacttacgtctgcgccgagcgtccatctgtacacacgttctttgttgacgatttctttgcctgttgctgaattgagcatcttgaggatgttgttgattcggtaggggtggagatggatgaggagtttgcagatgggtgggggcgtcaagccggagttgtcgggggcggagacggacgagcggctgacgggtgactgcaaacataagggcggcgcaaggaaggtggttcatggcgagcggggacgccacgggcacacatgcgctggtccttccttggctcgacggcgagcgcctcggcgtcgtctgtctccggcaccaccgggagcagcagtacggtgtacgggggaagcccacggcggctgcctcctcctcggccatcttcccattggtgaagcccacggcggcggcggcgtttctcggcctcgaggcagcagcgcgaagcgagtggtctccggcgacgccttccaccgagccattaccatctccacccgtcgtggccgattcggagttttggatctgggctggtggagcttggtgctacgccgcggagtcaccatgccctcctgagctcctcatgcatggctgcgcgacgccgtcgacggcgccaccaccatcgtggtccaccgcgacaagccaccgccgccgccgccgctcctgcacccgcttgccgcacacggccgaagaggtcaccagtgacggtcggtggcacagcggcggcggccatggcgtggctgcccgccctcccgcccgccgctgccgctccgtccatcggccaccgtcgccgccgccgatccggacgccgctccccacgtaggaagagaaaaagggagagatagagaagggaggagagtgaggaggaagaagggataagagaggatgacatatgggagctacatgttagtgggtcgcacacttttttttttttgtgaatgataaatggacccgcatatatttttttattttaatgccacctaagcgctacgtcaatgccacgtaggacaaagactaagtcaacactgccacgtgtgcgccatgtcagcgaaaccgccctccaaaaccaccaagagagtcaaattacaccggttttacaagttcgggggtcaagatttctggtattgcggttgagggataagatttagattcggttgtcagttgagggagtcaaagtgatcttattccagcgccgaacgcgtggctaaccctcccagcatttccacgcggaataagttcacttagtgactctcaaaggtgatcgaaatctaatccgtgaccctaaactataaaattggatatctcgacacccaaactctcaaaaccggtgcaaattgattcccttagtggttttggagggtggttttgctgacgtggcgcctacgtggcggtattgaccgggtctcctttacacgtggcgttgacgtggcgtttaggtggcatttagaattaaaaaatatgcgtgagacccgtttgtcattgacacaaagaaattgtgggacccacatgtcccttctctctcccctccgtccggttccttctccctcctcgccgctccctctctctctcccgctgcgggcggagacggcggcgagcggtggaggcgcggacgtggcgcggcggcctgcgagcggcggagacgcgggagtggcgggggcaggcactggagtggagacggtggcggcgcccgggccgagctctaccgcctcgtcactgacggcgaccaggtgttctacgccacgcgccgaggcacccgcatgctcaacatgtccgacttctgcgaccgctcccgcaccgacgcctgggacttctccgcgttcgtccgcacctacgccgcctacctcgacgaccggctcgagtaccggatgcaggccaagcacggcggtgccgcgcaccagggacgaccgctccgcgagcagctgtacgcgtcccccgggaaccgcttcaactacgacgacttcatcatgagagacgacgaggccacgaacgccgaggccgacaaggcgatggcgctcgtagcgagggagacgccgacgagcgagatgacgctggagcagctcctcgcgaaggcacaactcctcgtgtagtaggacaactttctttaaggatggccgcttttcactaaccacccgattaatccattacttagttaattactgtggttgcaatattaaaaattggagttaaaactaaatttagccgtgattgaatttggcttgcagctggcgccgcattgtcttttgctgccagtggcgatggtggtggtggttcttgctcttgagaagaagctgctggtggtggtgcttggaggagcacttgtagaagccggaggggtcggaggacatcaggcttctcgaggagaaggcatccgtgccgtcgtcgtcggagatggtgaagccataggggttggacgacagcttcggcttcttcccaccattgaaatgcccatgagaccgtgacggtgggagcaatgccggttatgctcttcttcttctctggaggaagcgggtggcggaggaggtcaagcgtcttagagaagggtcgacgcgggggaggaaggcggcggcggtgacggtggaggacgtcgttgtcgtcgaccccgccgcgtgtgcctcccgccgccgccgcccgccgtcctcctgcttgaacgcctggtcgccgtcggcgaggaggcggtggagctcagcccgggcgccgccgccactcccacgtctcccccgctcgccaccgtctccgcccgttgcgggagagagagagagagggagcggcgaggagggagaaggaactggagggaggggagagagaagggacacgtgggtcccataatttttttccgtgtcaatgacaaatgggtcccacacatatttttttaattctaaatgccacctaaacgccacgtgtaaagaagacccgatcaatactgccatgtagacgccacgtcagcaaaaccactctccaaaaccgtcaagggagtcaaattgcaccggttttaagagtttgggggtcgagatacccggttttgtggttttgggtcacggattaaatttcgatcacttttgagggtcactaagtgaacttattcctttccacgcggcacacggccgggtgcatgcggaagggccgagagcttgctactcctccatcctcctataaaaaacaatcaacaaaaatagtacggatcgtgatgtattctaatagtataaatttgaataaatatctatctaaatttatagtgctataatatatcacatctcatatttttttatagacgaagggagtagctggcaccattaataacccaacattttcatgctacacatacataaacgacatagtagcacacatatataaaaacgcggatatcactacgtaaatatgtataagcaaagctcttagacacctttaaatggacgaaagcctagctgtactaaccttaatatggggtagaattatatttcaaagtatactcatatatgtgtaatatttaaaggcatacaaattttaaccctaatatattgaatcatgtccccacaaacttaacaccacataaactattacatcgtttccaagctaggtgcattcccatgtcatagagatcttcaacattatcaattttatagtgaaaatgtattcgcatgtgtatactgtaggtgcatccaaatttaaaaccacggacaaataattatatcataaatttttttatgtatttaaaagagaccttcctaacacctatttccatcccggaacttttgtgtggaaccaaaacttttgatccgggaagaattcaagacaaagaactcccgctggaactaattattagaaggtgggacgtggaccggaacttctactccgggaatgattcgaggcggagagcttccacccgaacttctaggtgaggagtgaggaccaaaacttctagtcaaagagagatccacttagagcaagtttaatagtatagcccactactagctccaattcatctatagccaatctaatagccaattcatacaataattgcttactatactattagtatatggtcccacctgtcatacatacattacatcttggagtccgtgctgcagctggctatagatctgtaacccgctgctcttctctctcatcttatctcattaaaatatgcttgtagctggctaatagtctgctaatagagacattggatcgactgtaactttaaaaagacattaggtcagttttggataaatcagagttcaaatttgatggggttttaccctatatacgaggcaagatcacccctcttataaatataggaggagatttattgaacccctaaacaatcaatctactccctccgtccactaatataagggattttgacattttgcttctactgtttgacagcacgtcttattcaaaaaaatttgtgcaaatataaaaaacgaaaagttatgcttaaagtactttggataataaagtaagtcacaaataaaataaataataattctaaaaatttttgaataagacgaatggtcaaacagtgcaagcaaaatatcaaaatcccttatattaggagacggagagagtacttctttctctttctaggtctaggagtaatttagctttttttttttgctgttttatatgagtaaatcattatctactcagggtagccgaaaattaccatgtattgttttgtcctataaaccatcctgaatctccaggaaaaccagaaagctatttaccactcgaattggcgagttcttgctgatgtcttgctggtccgaaacttcaagaacttacggtccatccagagttcgctagggggctcagcttatcggtgtgctactgtgttctcgcgctaacagcaagtactagaataaccctaacatccataacttgaccaccatactaaagttgcttccccgtgtccgtgtgtatatatctcaactattataaaaattgataaaaattgaaaatgtttactttgttacgtcactcgtataggagtcggtttttaatttcgttcgctttttgaaatgcatatccacatttgttcgcttttagaaatacagaaggagtcatataagaaatcttctttaaaaaaactcgcatgctaatttgagataatcggactcctaattaactacaactcatgattatatatatatatatatatatgtgtgtgtgtgtgtgtgtgtaaattaactggtgctacatggagtatgggctccaagattcaaattgagtatatacccaatttaaatgagtatgaattttttttaaatgtttaggtatgaacattaacttctttactaacaagttcaaacaagtttgaactgagtttgaacttttttttttggttagattttggttctaggtatataacatccaaacatataattcgctaggtatgtaataatgaattgtgaaataaagttgagtttgagttattttgttttaggtattggtatgaatcaaattcatatacctaggtatatactcacaatttaattttttaaaaaaatttgagagattttgttttatcacggtgaattttattttaactaaaccatatgataataataaggttaaaatagccttcacccgttgtaacgtacaagcatttcttttctagtggagtatatgtgtatagagctagtatatttctttggtcaaagtcagactgctttaagtttgactaagtttataaaaaaaaattgtaacattttcaacccaagacaaatttattataaaaatatatttaataattgatttgattaaactaatttaatattataaaagttattatatttgtctataaacttaatcaaactttaaacagtttgaaaatgtcttataacctaaaacggagggagtataatgcaacttgattttaatttattggataaatgatccaaaggtataaaaatttacaacactatatacgctcttgcacacagtgatcattatacatgagctatacactaaatacactaccatatgtatttaatttcgtccaaaaaaatacactaccagaacatttccagtatgtagtttactaccgccatctgcgaatattttgcatgtacgtttaccccaccagggcacaaccgcctccacacgtatcatgagctgccgaaaccctgctcagtgacctgaactgacggcatgtcgctcctgaaccggagcctctgcaccatgggcttcatcttctcgatgagctttacgatgacaaagaagagcaccctgtacagcaccaccattccaatgaggatggcgaggtcggcccacttgctgtacccgagctgtacctgccagtagttcgtaaggatctcttcaccggtgatcacggtgccggcgccggcttgatcgttgtatttggggaaggtgaggcctaagaactcgttcttgtagaatccctggttggcgtacttgtggaacgcgatgtagtacatgggatacttccacaccggctttggaaggtcgttggggaggcggaagaagccgccgttgagcatcatgacgccctggacgccggcgccggtgatgatgcccatgaggaagtccggcacggcgctggccacgatcatcatgagcccctccaccaccatcatggtcgtgaagagcaccgccgcgaagtagccgaagtgttcgccgctgctctggaggccggtcaggtagtaggcgatcgcgcctggcaccacggagatgagagctaggtacggtgtagacgacagcgtgttcgcgatcacgaacgacgccacaccgtaatggccgttgagcctctccctcccaaatatctgcatatcatatcaaaatttatggagtgaacatttggttggtgtatatcttggctgttcaaaatatatcttggttggtgtaaaagtgtccttaatttgacattcaagaaaatcagtgaacaaaccttcatgtcctcaacgaaagaggggaagccaccgatggccatgaaggtgaggaaggcagcgacgaacatgagcatggagccacgggcctgcagagattttcagacggtcatgcacacacaattttgccaatgagtaatagatattaaaccgcgaacaaattaatatggaagactgtgccagagccatgcatggccagcaaacctggatggatccataggaatggccgacatcgtagtagatggtgccgacgcagaggcagagcgcgacgtaaatggcgaaacgcagccagtagtagcccaagtccctgtacatgttgacgaaggacctcttcgtcagcacccatgactgcgtcaggaaagttggctgcctttccttcttcaccaattgcccttcctgcagagataaagaaaattacaggatgtgtaaagcatgcatatattatatatatatgtagcagaaaatgctttgcgagatacattattggcgcgtatttcttcgatctgatgcatcactttcgccaagtgaacggaggatttgtatgagttgacaagtgtgtcgattgcttgggtagtggtcatcgtcttcccgtccagacctacctcaatgtcctgatgaatgcatcgtatagaagggagtaatttatttaggacatttagtcactttctttttgagaaaaaggatatttattcactgattcagtgcattggctagcttgctctcccatgatttgcttctcaccttgtcgaagtccttgttgatggtcctcagaaaatggtcagaagggttcatcagagacggacaagggaatccgctcagagcggagaactaataaacagtgaaatatagtcaataaaaaaaattaggaagtgcttagctagcaaccggaataaattctcatgatattagtcaatacaaaatagcatgtacagtcaatactcaattcaagtttgttaagtgcttcacattcagatcaaaatctcacaatatatatctctgtttcatttttaagaaaaacaatatatatcttggaccctcccgagatttttttttcgaattggatgaaaatttctgatccattcaaatttctttaaatctagttgaattttttgtttaaagtggttcagattcagaaaaaaaaacattgcatatgtattccttttcttttgtttaaagtggcggggatgctgttttgttcaacaaaaataagcggcatagaaaattttgctatacttgttcaacactgttttgattttgttccacaaatgctgttttgttcaaccctattttgattttgacagatcacagatttgctagggaggagaaatatgctttccatcacgaaactagtgtgacatctcacggtctaggttactccaaattagggatgaaaacggttcagaaagtttctgatttccggatgtattttcgaaaacagaaagtgtcggaattttttcggtaagtttcagaaatggaaacgaattcggattttttttcttgaaaatgaaaatggatacgataaggctactatccgtcagaaaccaggatcgatcgagaacttttcataaacaaattcggatttttttcctcagaatcagaaatgaagtacttctcacatacaactaatttgctctaaccttttctactctaaatgtttagatttatactgagtacactgagatggttaattagttgaatggagatattgttttctagttcagtactttagatctgtttttcttttttcctaattactatttttgttttactaggccatgccaaacaaaggttgtcaatttcagtttaaaatttcagtaatttcgccacccccactggcaagtaaatatgtcagccagaatttttgttttttcccatttttttgtgattttggaatattcaatcaatttttgttaatttttcaaataattttggcgaaaaagtatgaaaattcctgaaattttcagaaattttgagccatactacttacagttacagtatagatgaatatagttcttgttttcatgaaaagtgaagtgtgccactagctgtattattattaattgataaaaaatagataatgtcgatttgttgttctaggaaaaaaaaagagctacatcactttgtcgatttgagaagttcaatttgaggaggttttataatccgataaatatctgttaccatattagcttcgatttgtgttcgctctgttttcatattcaataataataaattcggttttcgtatctagagtttctgattcctattccgatgcccaaaaaaaatataaaatgaagtggtagagatgatttctgtttgtttccgagtcgttttcatccctactccatatcatagatataatgatccttgcttaattagcaaccagtaagttcagtttgcagatctgagcctagagtgatgctacacgtatgatttgccgtttacgatatttgtacgatgaaacagcttatgtgtttattgacgctgatgctggtatgcagcagtcgactcagtgccatgcatccatgtcatcccgttagatcgtaccatgattgtaagtccaaatcatgcgcacaacatttttctattgtcttaagcgccgatcaagccattcgccacaaatcccattgtaaatcagaaaagacgtttgttttctacttaacttcatggttttcttttgctacatatagtaacttctgcctatgtatattaccaacttcgtcccaaaatactaaaatttatgtgtatgtatcagttagaagtttctatattttggaatgactgtactacttccctactctaggccaggtcaagtatttaggtttaatttgaaaaaccaataaccggtgccgataactggacaaaagttaatttaaatccaaatttctgaattcacaaaccggttcccggcggttgcagctttagaaatctcgtggtgacctagtgcttcctaatttcgacttcaaaccacacttgaatacctgatacctttgttgtatcaggaattcaggatttgtgcagtgtgtcttacctactaactgtattgtaggatctttgcatagtagtatagaacctgatttgcagctttcagaactgaaattttgccaaaactgatgcatctgcaccactgtatactagatatgatgctggcacgcggcagcttgcagccggaagactactactgcagctgcgtcttcctgttgggatcaatgaatccgtcagaagggtaagctacagaaagcacaagaaggtgcaaattcgcacgtcaccgactgattggagtcactgtgcgagtgtgtttcagtgcattgaatgtgttctgttgcttctgttcatgagtaagctaagtcagcgtcatctacagttgcaaacggtatagggctagggctttcggatttcttaaccggtctcatctcatttaagctatatatcggatgtggattttcatcccttgagagacatctcctcgttatttgcatgtcatctaaataattattaaaaaaataaaaaaatgacagtatagattaatatgtaatatatcactccacgaatatgcaagactaaatttaacttttacaagttgcaacaaaaataacaaattaaactgaaaatagttattgcacattcgcaactatatttgttatttttgttacaacttgtagaagttgaatttaaactttactatttgtagagtgatatattttatattaatctatgttaccgatttttttttttttataattatttaggtgacacgcacaaaacgagaggatatatcccctcataaaataacttttccctatatatccgaattctgaattctgatacagtatgtttggtaacaattctcattttgccgtacaactttgcaaatacggatgcataatttgtatttgggacaaaatagtttgtacctgggcggtgtcggcggcggggccgaagaagacggtcttgccgtaggcgaggaggcagaggccatggaagaggccgaacacctcggtgctgggctggtgcacggcggcgacgacggtcatgccctcgcggcgcgccatgcgggcgatgcggctgacgacgtggtacgacgcggcgctgtcgaggccgctggtgggctcgtcgaggaacagcagcgccggccgcgtgaggatctccatgcagatgctcacccgccgccgctgcccgccgctgatccccttgtgcgcccacccgccgatccgcgtgtccgccgcgccctccagccccatctcccgcagcgtctcctccgcccgctcccgcttcgccgccgcgctcatcccgctcggcagctgcagctgcgccgagtaccgcaccgcctcccgcaccgtcagcgtgttcatcagcacgtcgtcctgcgtcacgtacgcctgtggcgcgatccattcatgcgttccacgacacgagatctcaccatgcttgcatcattgctcgaatctttatcaaagaaaaaacgagatcattcgtcgccgatcgactcaccgacgtgccgaacgccagcttctgtctccggccattgatcaggatgtctcccttctggctcacgctggagcctaaccttcctgtacccagaattcatgcaattcgatcggtgatattcggtgtctcggaacacacgcaagccgaggtgatcagaagagtggcatgcatcatatgtaagggaaactattttaatccctcgagggatattctcttgttatttacatgtcacttaaatagtcatgaaaaaaattgataagatgtattaacatgtgatatatcacgccacaaacatagaagttcaaattcaaattctacatctcgcaaagaaaaaataaattaaactacaactaacgtatattcacagttaaatttgctttttcgttgcgagatgtagaagttaaatttgacttgcatgtttgtggagtaagatatcacatgttaatatatctttttaattttttttcataactatttaagtgacatgcaaataaaggatcaaaatccactttctcaaatgttacctgctaaggagtcaagaagagtggacttgccgcagccggaggggcccataatggcgaggacctcgccggggcgcgcgtagccattgaggccacagaggatgggaacgcggcggcggctgccgccggcggtggacacccagaggtcctcccacgcgaggacggcgccttgttccggccggcgcaaggacgacgtctctcgagcgacgacgaaggcgacacggtcgttctcgtcgttcctctccacgctaatctccggcgagggctgctccgcctccgccgccggcaggaacggcggcggctggaacgatcgcccgctgccgaagggaaagccttcggtgccgcgcatggaggcgccgagatcggagaccatgccggctgcccccttgcgatcagcctcgtcgtcgtcctgacgccgccgcgggctcggcgtccacctcggcacggcggcgggctgctgctcggacgccatgcacgcgggaatacttgctggtagtggaagttggcgggagctgatcttgtgctgacgatcgatcaaaatggaatgcttgagcttgagctgatccgagctagtgagcgtgtatgaagaagaacaatgagcatgggttgcttaaatagaagcttgagggactacagatgaggttactttgtacacttgactattcctaactcaaaaatcatgaattagtaaataattttcacctacattgtaacattatcatttcttcggggtatatatatatatatatatatatatatatatatatatatatatatatatatatatatatatatatatatatactccatccattttaaaatacaaacatttctatgctttttagtaaaattaaggtagagagaaaatttctcttttagtcacttcagtggtcaaattttaaatgattatagctatatatatggcgctatatttttcaaaaaaaatatttaaatcattgttacactataaataacttatgcttattacattagaagtttcaatttttcacattgtaatttttctatatataatacacaatttattagagagttctgattaagaatagttcattatctacttgaaagaagagataggagagatagaagaatactagtatatgtatgggagagagagcaacctgaaattaagtaaaaaaaatgtggcgccattgcctagatttcctatttcccttcacaagcttcttattagctaaaaaatgtatagatttccgtgcattggaatcagtgccccaacaatgtttatacagagaggtacacattataaatcctcaaaatacttacattttagaataaaggaattatatgtcatgtaaatgattatttactcgcttgtcaagcactagatgaatatccaattacataaacttttttttgccaaagaaattatgaatgttctaacgaaagaaaattataactggatcttgattcctgcacaaaaaaaaaagatctaatatgtaatcatagaaatgtatataaattaatcttggaaatgaaacaacaaaataaactaaacgttgtaatttgtttgtatcaaagttatagctatttatactattcaagttcaaatgactggtagacaagaaaaaaagataatgccaaaatgacaaagtcgtctttaaaaaagtgttaagtaagcgtacttgatattatttgcactggtaacaattattataatatttttgcgtggtaccgaggactacaataaaacacgagatatgcctctcgatactgtgtagggaagactatgacctcaacatcttcacatgtgcatcgacatcggtcgtacccatgcaatcatatccattcgttccccctttcctcggcaataacggcgataacaacacaagttgtcaccgttagttgtctcatgttgagtttctcgacagtacttgatagttgatactagcaatgggatagggttctcactttggacttctcattatgtctagccaatcccatctttcgcattaatgttaccttttgctagcttagactattttgtccataatcactatcgtgcacacccattataatggtccattcgatttttgcagtaaaattaccgtacttcttcatttcttcaccactagaagtttgtagaatctccgcattgaaagtttctacattttttaaacgattggctcatcctagagtggaaattgagtcatttttaataattttgtggtctgatttgtctaaaatggtgacaacgtattccctctataattgcaatgagcatgcagaaataatgggtgtgacaaatcaataaatattctgaagcatgccatttcccactgcattgaattttactttttacagtaaatatatttagttatactaatataatctggttgatcagtctattgcccccaagattatgtgtgccacatgtacactagaaaaaattcgagtgtgaaacacattttgtgaaggatatatatcactaagtatgcatatctcatgatagttttacatcaagaaaaaggtttaaaacaaaagttgactatctcatgtgatatttttgtttcacaatagtgcgtcaaatctgttacaccaataatatggaaattacgtaataacccattgatgtgaaagtgagattgcacagtcatttatcacgacaacaactcaaatgccatcaataggttgcacgtacaagacatatgatgaatataacatgttcatctgccaacttcccaccatgctgcaatatattatgtgcatgcatgtaacatccacaataatagcaacttgcagcctttcctagccgtacgcaaaaaccaaaaacaactgcaatatttttgttctctttctttaaaaaggaaggtaattccactgcaccaccaatcaatattaattagtatttgtgatttttttaaaagtaagtgctccataatgtttttacatgaaacatattactccatccatttcaaaatatagcaacctaccaaattaaacatatcctagtaccataaatcataaatctgaacaaactaatgttgtactaggatgtgtcatttgtacatattcgttgtatcaggatatgtataatccgatactaaattgatatattttagaaagaaaggggtatgtactaagaatattgtatggtaaaagccgacacatggacattcctttactcactacctatctcaaaatatagcaacctagtactagatgagacacatcctaatacaacaaatctagatagacctctgtccagtttatattattgtactaggttgttatattttaggatggatatagtacatgtcagtctaaaaaaaagcctctaaggtttatacttattgttttttttaaaacacagtagaaatgtagatgcttatatacacgtgcatgcactcgcccctatagatacacacgcgcacaccctcttcgatg

SEQ ID NO: 9836 - DNA, 25294 bp, Oryza sativa
ccattccccataccagcattcctgagtggcaaataaaattgataaggaaatagggaagacgatgacagtagcaccacggttaaaaaatttcactacttaccactttctccacatatcaggagctttacgcacagttccatcaccactacaaggcacatcacacaatacacgatcaaattccaacctctgcagtttggactcatccgtgcatgtttctgaactaaactttgcaagattacagccaggaaagttctgtgcttcatgattcgtcacaatcaagttggctgtgcacattctctttgtctgatgaataagaagattgcatctttgcacatcaacatcattagctaccacctgagtacaaagtatgaaacacaaaatcagaaaaaaggttttgattcaaagtttttttttctatcgttaccagaaactatagatatgtgtaatagaatgtgaaacatacaagggcatttggaagcattccaggctttgtagactgatggatcatctcaagtaactggaaggtctttgatcctggagcagcgcacactgcataggataataccacaaaaattcacaagaccaatattggagaagtcctcctctaaaaataaaattttcaaatagtccatgtgtaacctacttttaagctcaaatgcctcaaaagctaagtctgatataaagctaaagccaaacagaaaaggctaggtctaaatgataactacggggtattctggtgttctcatttttttcctttttactggtactaataaattaacatgttcctgagacttataaacttttattaggaactattgcgccagatgctttattgagcaattagttttaaacattacaagctggactacagaagagcaaagttaggtcaaacatgcaggtcaagagacagacagccagctgcataaatagcacaatatgaggaatgatggaaaagaacgtggatatacatactgtcaagaatatgatgatcaggttgcacattcagaaacaaaggaggaacctgtaaaaatattacatatcattttaacaagaagaatatccgcaatatacatagaccatcatcaataaacaatatactcatatagctcatcttaatatatataaggaacttaccatgctgacagcctcttgcctagttatattgccaacttcattctctcgcttcaagaattcatgaaaactggagagggaaacaaatattacaaaaaagtattatgtctcaatagaatattaaatgagcgcctccaatgtttcaatggcagcaattgttaagtgcaatttttttcagtttctttttcaaaagaaactagccctaaaaaatcttatgaaaaactgctaacagtgatataacactaaatctgcaacaaaaagccaaacacaaatatttgagaagttttggtgaacttttggtgatggtttagtagagaattcaaggcaatcactgatctataaagccataaattggttagtaattcatcatttaaggggcaaccatgttctcaataaattcatcaatttacacaaactagtaatgtgcccgtgctaacgctatggtgatatttagtaatgatggtatatacatgagatgacaaaaaccaggtgaagggagttttattgtaacaaaaacatcagtttaccacactcctaaaaaacaatcatcctatatactgcgcattgttgacacaattctcccaagataaacattatgcatacccctcaagtgcctggtttctcctcagctgcattcgagaaaaattcaaatgccatgcaagattgccagggtaccaaggcaaaggccgaatagcatcttcttcatgctcatcactaacctgtccatgcaaaaaaaaaaaaaaggattacaaaatagaattgtgaaggacataactaaaatttatgcacaaaatatagaagctacctcagtttccaatgacttcctgaagtcattttctaactgtgagcaaatatcttgataaaattgacagctggaaaggtaaggacaacattagcatactagaacagaataatcatcataaaacaagaattagttatgtgcaatgataccagacatgataaggtatcagtaaaatcaccagtgcatttcatgcaaatgcttttgttctaactatatgatcaattgcacatagaactggagatggttatatctgaagaatgaaccatggcagggaaaaaacaggagaatcaggatagagataatgtccttttcttttacaaaaggacagtgaaagttatatggagtcaagtaaaagattattcaaacagagcatggtttttatcaattcaaacaataggcagatatctagaacctatatatgattagagtttaaataacagcaatagagagttagcaagataagattaaaagttttgattgtatagaaaacagtataaaatctatatctatatctttttataagctaggataatcccccagattcatttttgttggaacaaagttttgagagcttatagatatttcacccagaacatatacaacaccaccaaggaatttttgccttcttggtgatttcgagcaatatcgcaagctgtttggtcatgaaaagctacattacacaatcatcagaactcaaggaatgattttctttaaaatgtgatgctgctatattgcaataatcaaggtagtgtcataaacaagctaactgcactgccattcaatacaatgtgaccaacaaacaataaatcattaggccaaacatgtggatggagtcatgttgcttcagatgaaaacaacattacctcgcattaatcctgaaagtggctggcagcggtttccggagcatgttcatgaagtcgtcccactctccctccggaataatttgctgtgcctataagccataaacatgtataaacattctaattcagaagttatgcatccaactgaaaaactaagctaataagcaacaacagtataagctaatgcagtgcgtccagttaggcttctcttatcgtaaggtaagtctagagatcagtactcgctactcagcatcacaatcaaaatagagcagttgcttcttgcttgaaagctataatatccgcaatcaacaagacaacaaatcatcacattctaaacgaagtacacatacctagagcgagaccatacgatcaaaaccgagatgccgctagctcagctcaatttttttactaacacaaccaaatcacacccaaaaaaagtaaaatattaagcaaccgcaccttgtagtagtcctcgaaggctgggttctcggtggcgaagggctgccacgaggggttcccttcgcgcccctcggcagcgcctccttcggctccttcgccgccagccgccggggggcgctgcgggttgtgcttccagacgttctcccgcccctgcttgaagtggcggcgctgcgtgcgcccgcgcttcctgccgcctcccatggcttcctccctctctcgcgcgagctgctcctgcttccgccgctgctgctctccctcccggtgacggcgcggatgcgggcggcggtggcgcgaggggaggagggggttctcttcgaggggtttaggagcggcggcgagtgatgcggggtggggaggaggaggaaaggcggctgggcgaggaggaggaggtcgtcgaggtgaattagttgggccgggctccgtgtgggctggagacgcgcggtagagtagttatgggcccactatttcacgccataaacctgatgtgctagttgtcttctacgcccaataagatgttgggccttgtttcccttcagttccataaataagttcatttatagatccttaacttgaaaacaagtttgatttcgttcctgcaccgaaataccggatacaatgggtccctgtccctcaactgttgaaaccggtgcaatatgtgtctcatggtagtatagcaggtggttttgtccaatgtgacaatttaacccgaatcaacagtgctaactcagcttgggacttggtgaagaagggcttttggtggggtgttggcaatgggagttcaattaatatcctcactgacaattggatcccggcgttgttgcgggacatctgaaaactctaatcccaattcctgaagataccaaggtgcagtcctgatgaatgatgaagcaaatgcctaggatagtgatactgtcaaggcactgtttgaggaaggggttaattgccaatgagatacttcaaatccctatcaatcgttttggtgacgaggacttcacgtcctggccacacgacaaacatggcacctacacagtgcgctcggcttataacttggcacggtctaacactttccttgcttcacagtgtaacaatgggagaggacttccttcttctctactggagagtcagaaaagctggaaagctctgtggaagatcaatgcacctgggaagatgaagataaacctctggcgtgcagtccaagattgtttgcccactggcttccagctgagaaggcgtcacattgattctaatgacggctacgttttctgtaatagggatgatacgttggaacatgtctttctttcatgcccctttgctagctctgtttggcaggaaattaaacagatatatgatatcaaattgaagagaagggggatcatgcacttgagaaattggatttttgacttcctggaacagaattcaagctttcaacacactgtccttatagtaactttttggcatatcagggaagcaaggaacaatgcaagaaatgggattagcgccctgcatcctcggcgcgtggctcagaaggtgtttggttatgtcgatatgataatgcaacattgctccaaatctcccctcctccattccaaggtggattccaccgccggaaggaacagtaatgatcaataccgatgctgcagttttccaatctactcgtcaagtgggaatcagatccgtgatcacacaggtatctgcttacttgtactgaatcatgcagcgaacgagtgaacaacatcgtcctccctgaaatggctgaggcactggctattcgtcgggcactagtactggcaacagaagagggtttccagcaggtgttggtagcctctgattgcatgtcagcaatacagcgaatttaggcaccatctcgagatcgatcaagggtggggtgtctgatccaagatatcaagaagattgcaattggtttccaagcctgttcttttatgcatgttaaccgtctctgtaatgcagtggcgtagataggatttagagtaaaagtggtccatctatatatataataggtcaattaaaagggtagtccactataaaatttttattatattaactagtactacatatactatagttttaatctcgatcaaatttttaagtggtccaggacccacagtgccacctagctagctacgcctctgctgtaatgtagcggctcacactttggctcattgttatgagcaattctcttgttctgtctatcgttctgtgattccggactgtatccgggaaacactctgttatgatgcaagttaatcaatagaattccaacattacctaaaaaacagagtaaatattgctagtgcaatacttctcaaacctctaagggtgtgtttttttagataatggattacattaaacccagcctctacaccttgtgaggacagcctaaaagtcacaaacatgagtacataagactctcccattacatgggtaaagcataaaaagtttttaaagacagacaacaagcaaaaggaactaaaagctaagcttcaatccttcttctagagttccacccaaagatagagaaaagctccatcatacgcttctctaaaagattgcatttcgcgattacttcaatgccttcgtcttccttaagaagcaaagaccaaagccttcccaactgagttgctttgaaaattacctgcaagaaagatacgtggttgtagccattaaagactaagtcattcctactgagccacaaagcccaacaaatcgttgctatgcccacccaagtttgtcttttaagtttagattcaaaacctcttaaccaatttccaaacaagtgtgagctattacggggttgcttgattccaaaagtaagatagatcgcactctaaatgtatctagctatgagcatatttcccatccttaaggaggtaccacgaggtaccatcaggtaccaatctaatctaactgttggtttaacaggggtaggattgtctaatgaaaatgaggtgcccgtgctaatgaccgcccactcggccaatagggagttcgtctgtgccgcccacttctcttccattctgccgcatcgtggttgcatcgaagcttccccggcgccgccgtatcgagcctgttctcccaccacggcgccatcgcatcgaccccggtgcggctgccgccgcaacgaggctgccgcatccagcccgccgtcccgcggccgccgtctcatcgagacagccgcggtcccgtctcatcgaggccgctgtgcaatttaaagaagagatgttgaattgattcattagttacaaaagctacaaagcaaactacgcttctatctatctttcttttagtaagattatctttgtgtatttagatggagtaacaggctcagatagaattggccgccgagggaccgggcgactcgcgcgcatgagggagagtgcgtgcactcgcatcctccccatccttttctctccctcttttcctctcaacctctaaattctcccggttgaatgggtatcatgtactactatttgacatgtctcaatcatacaagacttgacactcattgaccagtctccacaatgacagtactgcactgataagcttattgctactagacatcctggaagctagctctcatctcaacaaccggcaatccggcatggacttggagactagcgagtccctctgggacctcagaatcaattcctagcctgaatcggggaatttcttcttcttttttaaaatagaaaggcctgacagccttccccttttctcatatcagaaaagcagacagatttaaacttgcaaaatggaaaaggaagaaataaaaacatccagggaaacttcgcacacagctcatgatcaagtccatgccggtttagatccaaagtttggatccaaacttcagtacttttccatcacatcaacctgtcatacacacaacttttcagtcacatcatctctaatttcaactaaaatccaaactttgcgctgaactaaacacctaagcattatagggcacgctagctgaaatggtgaaaaatcctgcgtgtcaatggcgcacaccgacaaattaccccttcgtcgatgacgacgacgcgagtcacgcgatccgcctgttcctgttccgccgtgtgcgtgcgcgcgccgcgtttcgtcactcgtcgtcgtcgttgactcgttgtcgtatgcagcggactcgatcggctaagcgctctcgtctggttggctgcagggtggttctaataaatgtggtgtgtctcccgtcctgcgtgtaagtaatccatcatcatccatggtaatagactttggttttgctgggtcaatgcgcattatatattgatcggctgccagtatcttgggttcggcatgcaactacttatgctacagagcactcgcctctgatacagagagtaattgtgtgtgaccataggattgaggtgttcagcactacttcagcggttggcatggttttacagtttgtgtttgtgaatggtagacggtgaatcgggacagattcctggctgccggtgaactgtgactacaaacaaaattatgctcattcacacaattgatcacgtcgtcagttcgtcactgaaaattccctgtactgcagacgttgagttcacaagaagtgaccgatgtagtggacagactcaatgatagcattgatcttgaagatactactagtagtacatttttagtttctcgttctgttgttggcagttaagtaaactagaagtaacaattatgaagtggcttccccaaaaagagacaaatattatatttcttgtagtagtttgcgtttctcaaattatacaagtcatgatggatatgtcgttacttcaatctgtaaatttcgcctacaatttgtagtttgtacttcaatgatgtgatcaacaaggcaggggttgaggaaattattatcttggccctggctagcttgtcaatgcgaattattgatcggctgccgatattttgggttgagcaacaactcgtatacatggtacagatcgctcgccttgatacagagagaaattaagtgcaagtgtgtgacacgtctctcgtcatgcaagatttggacttattcatcagtctccacaatcgtggacagtagggcactgctagatgactgctacgggatctcttggaagctagtagtagctctcacctcaacaaccggcattgacttggcaagtctccctgggaccctaatcaagattagagagatgttgagcagcggtagaggaggagctgaccggttgaccggccggctgaggaagtgagaagagcttaattagctgacagttctgcatcattggcgcaccaacaaaatagtgttttgcccttttgctttctaagtcgcttccagcgtcgtcatcgtcgtccaattagacaataataaagtgattttcggttgtgatgatgcggtctatatataccgggattgatcaacgttgataactaattagttaactaatcgtcaatgtcactagcttctcaaatttgctgggccagggatacagtcagttagtgcattcctctcatctatttaacactcggcccagccccaggcccccagcagcatcacacgtactcagaattcagaaacacacaaccaccaagagagaattaaccaaatgaccaagcttctccactccgcctgccttctcatctgcatttcaggcgccatcgggttggccgcggctgctgccggacacccaggctgccagacgaggtgcggggacgtcgacatcccgttccccttcggcatcggcgatcactgcgcgattcacgagggttttcggctcgagtgcgacaacgccacgaaaggcaccagcaatcagaagcctttctggggggacttcgaggtgatcaagatctccatggaagacggcaaggtctgggtgaaggcgtacatgtccaggcagtgctacgaccaatccacgggcggtatgtcatacagcgacgcatcggcgaatttgagtggttcatctttctggttatcggacacggataacaaaattaccgtgatcggatgcaagactctcgcctacatgacgaccgattctgtaagtactatttcagtataatttagtaaatctgattttcacaaagttgtaaaaatgagtcacccttatttttattttacttttttagaaactagaaaaaaaatacccgtgtgttgcaacgggtgaaaactattttaatcatattattgttagatttttttaaacaatatatgggatttttattttgatagtattgatatctaatttggaacttttattagaatgatggctatatcctacgttgctattttttatgctttagcaagaattctaaagcaattagaagtccaactctcgtcccaagttaatatgcgagttttttaaaaagatttttatacgactctttatgtacttttaaaagtgaatgaacttagagcatcaccaacagtctatctatctgattttcaaaactgatttggagggattttaataaaaaaaatagctccaacagatcccctactcacctacccaagttttggagttctcttctcccgattcctcgctccgtttatatgcggatgcgtgttctcgcaaaagtcgctcccaatctcgcactcccgcatctctcctcccgttcccgcgtgtgggagatagcgatctttttgcgatggaagaaaaaatagaattttttgttagtagtttaacaaaagggtccattttaagttttagggatttaatttaggctatctgttagagggaggagttttttcacttcctattttcagtttaggaaacccaaaaacaatttttggagggaagattatagataatctgttggtgatgctcttaaaaactgactcaaatacgaacaatgcaccaaaatgtcaacaaaaatattttcaatttttataatagtagagatagagatttatagatgtccataaggggtggaccaaggtttctcataagacctggaccagcttatgggcatgtttgggggagtttctagctgttgcagcttctcctagaatcagaagctccccccaaacagtccagcttttggtccagattttgagaagctgtagttgtagaatctataaaatgaactagaagccagcttgctaccaaccagctgcttctcagaatcttaagctcccaaagcaggcccatgtcatcttggtctaagattagagttgaaatattacggtgttttgttggtccgtccctgcgtccatagattgattgggaatagatattattatcccatttgcttatgttcttttctccaataaaagttggataaacttttggatactcgtggcatgtttttcaaattgctaaacggtgcgttttgtgtgaaaattttctatatgaaagttgttctaaaaatataagattaatctatttttcaagtttgtaataattaaaactcaattaatcacacgttattaccacctgattttgcgttaaacacttaatcttaatctttatcttcatcttcaggagattcaaacacgctagttgtgtccctagttgcagtcgaatactacacctaagtgcgtgaagcatgatattaaataaatttataacatatgtaagtttatgatactccatatttaatattattagaacttttcaaggaaaatctacatatattatttctttttctcttctctactattataaaaattgaagatgtttttgtcggtacttttgtacgtcatccgtgtatgagtcggtttttaagtttattcgcttttggaaatatatatttgtatttgagtcagtttttaagttcgtttacttttggaaatacataaggagtcgtataagaaatctctttaaaaaaactcgtatgttattttgagatgattggactcttaattgcagttcatggtttcataaaaagctatatattcacgcgaattcccatagtgaattttatcttaactaaaccgtataacaataataagattaaaataaccttcacccgttgcaacacacgtgtattttttctagtaaaattaaacatttgagaaattattgataatcaaagtttcgaaggtctgatcagatctcatcttagctaaatgtcaaatatttataataagaggaaaagtaaaaattaagaacgatccggtttttcacatgcatttcaataatgtgcggttattgcatcaattgccattgttgttgtcttctacagtcaactattagctattaggttgggtgggataaaatttacaaactttgatataagtttatagaaaaatatatttataatatataccaaataaatacactattaagacatattttttatggatttaataaaaactaaattgatgttgtagatgtggtgcacttttcttatgtttaaagttagaaaattttgactttgaatataaaactaaaacaacttagaatatgtaacaggaacagagagagtaatttgttaatcatgaaaaaaaatatttgttgcttttttttaacgaactggtaaagatgtgccaattttattgaatatagaagtaaaagttacaattacaagaataaaaaagaactgtaaaaaagggcaaggtctaaggaattaaaagcgcaaggtgtaaagaattgtacaaatttcattgaatattcgttgcttttgatcttcaactaaatagctttctgcatccatatgtaacaaatgcagtatgtaatcgggtgttcgtcagcatgcgacaacaaagtgaacaaactaactcccaagaatggttcatgctctggcgctggctgctgccaggcaaatgttcctaagagcatacagtactaccagggttatttcaacgaaggctacaacaccactaaaatatggatgagcagcccttgcagctacatggcagtgatggaaaccgcagcattcaactttagcacaagttacctcacatccagcgtattttatgacacgtacaaggggggagttccggttgtctacgactgggccataacatcaaaaacatgtacagaatctagaagaaacaagacttcctacgcatgtattagtaacaacagtcagtgcattgacaacctgacgaatgcacaaggttaccgctgcaagtgctccaatggatatgaaggcaacccgtacataaaggatggttgcaaaggtactgtgttgcacctttaattttgtgtctgctgcttatgtacacttgtatgtaatgtgacaattctgacccaatgtggtggttcgatttcagatattgatgagtgcctcaacaatgctacttacccttgcaaggggatatgcaccaacacgttggggaatttcacctgctcatgctccccaggaagttatatgatgaatggagattgtatgccaaagaagaaactacgttttgactcagtgcctgtggtagtaggtgagctcctatattctgtaagaactactaccatgtctatggatcaccagtttaaatactgcgtagtgtgtagtcataccatacaatatgacaatccaacacttctccctctaaacaacaccagagcttttctgaaataagtaataattaaaaaaaaaacttgtttggccaaattttgtgtagtcgcgttggccaacaagacacaactctagcacctttcttcattgcgacattgcagggatagccttaaatctgctcagtattggtccatagaaaaaaaaatgtaattgctggctaggtgatggaatttcatccatatcattttccaacaacgtgcaggcgcaagtatcatatctgttgtcctggtgattaccataatgtgtgcttacttgatcaaagagagaagaaagcaacagctcatcaaacaacattacttccgacagcatggtggtctgctgttatttgaagagatgaaatcgcaataaggtgttgcattcaaaatcttctcacatgaagaattacaggaagcaacaaataggttcaatgaacaacagattcttgggcaaggaggccatggaactgtttacaaggggcttctgaagggcaacatggaagtagctgtcaaaagatgcatgacaatcaatgagcatcagaagaaagaatttggtaaagaaatgctaattttatctcaaatcaaccacaaaaatattgtcaaactattaggttgttgtcttgaagtagaggtccctatgctagtatacgagttcatcccgaacggcacgcttttcgatctcatccatggtaaccatggtcagcagatctccctggccactcgtcttcagattgcccatgagtcagctgaggcacttacttatctccattcatgtgcttcaccaccaatccttcatggtgacatcaaatcatccaacatcctccttgatagaaacctgatagcaaaggtttcagattttggtgcttccattctagcaccaacagatgagtcacagtttgtcacactggttcaaggaacttgtggatatcttgacccagagtacatgcagttgtgtcaattaacagataagagtgacgtatatagcttcggagttgttctcgtagagcttctcacatgccagaaagcgttcaacctcaatgcacctgaacatgagaaaagcctatcgatgaggtttctcaatgcaatgaagaataacaagcttgcagatatattagatgaccagatcaagaatagtgagaatatgccatttctcgaagagattgcagagttggcagcacaatgcttggagatgtctggtgtgaataggccatcaatgaagcacattgcagataatcttgacaggctgagaaaggttatgcaacatccatgggcagaacagaattcagaagagttggagagtttgcttggagaatcgtccatggtcagctcaaggtataccagtacaggaaatttcagcatagagagaaaaggtgtcatggagctagattcagggaggtagtagctatactttttttttcaaaatcttggtgggcaatgtcagtattatctacttaaaataatcatatcacagatcttattacagtaaatatgcaatatcatattgttggcaaaattacttgcattgtatgtaggacaacaaagtaatgttggcggctgctcaaggaataccctcaacaatcttggtgttagtgtcgagaagaattgtcattgattattggttatcactatatttcaaatcacatcttagtggtcatagaaacatgcatactgcatgtacagctagtccatgagtgcttttttcagcattccttacatacaagcatgcctggcttgctcacaattggtgacattgcactacactttgtgtgtttatcggtccagcacaacaaggacgcacgcatatcatacagctagtgcacatcgcgcacagtggcacactggcccatcggtatcaacctcccactctcccagcttctgaaatctgaattctacgaacaggaccgagaagtaggtataaatttcagactttcagtagctaccttccaattccagcttttccagggattttccccaggttctgcttctgccagcccgttcccgtagtcatctaaaccacttcaccacaccaaactctgccttgtccaagctgtctaagctaccctgctgtgccgctgccctgtttactctgtcaaccgccgaatgcccccacccgtaaatcgattcagtgcgtcccagctttaggcttctattaccataaggtaaatctagagatcaatgctcactactcagtataagaatcgaaatagagttgtgacttcaataataataaccgcagtcaacaaattatcacattctaaaacagaatataaaactaacacattgagaggacgtgagctagcacacctccattctacactataaaagctactggtataagccaataaggctataatcaaaccaaaacacgccaaaaatgttaaaatgcgtaagcaacgcatgatctgaagcaagcggccgcaccttgtaagtagtcctccaagccgggttctcggtggtgaagggctaccacgaggggttcccctgcacccatcaccgcttccttcggctccttcgccacaggagggcgctggggtttgtgcttcaagatgttctcgcgcccctgcttgaagtggcggcgctgcgttcaggacctttcatctggccggctcctgacagtgcgccctcgcttcctgccgcttcccataccttcctccctctcgctctctcgcgcggtctgctcctgctgcagctgtcgcctttctcactcccggtgatggcgcggataggggtggcggcggcgcgaagggagggggggaaaggttcatggggtttcggagcgacggcgaccggaaagcgatgagggcggctgggcgagaggcggaggtcgtcgatggtggcaccggttgggctcaatgtgggccagcccactcgttgtagaattataagctgcgatgggcatttaactatgcaaaagtacactttacgtcccttatcttgtcgtcgagttttcaaaaacaccctgaaccacaaaaaccggatgcaatgcatcccttaacttataaaactaaagcgcacgaggtcttaggacggtttggatgatggttttggctaacgtggtgcctacgtaacttgtttgactgggtctttatcccacgtggcgttgacgtgacaatttagtctagaaaaataataaaaactatagggcccacgtgtcagttacaccacaaaacaattttaaaaatggtggggcccatgtgagccccacgtgtcatcctcacacctcccctcttctttctttcctctctcttgcatactcttggtcttcttcctcctctttccccctctctaatctcttcctcaccgttccctctactgctcctccacactcctgacatgcccgaatggtggcggttagcttctccagttctcctcaccccaggcgacgacgtcgacttcaagctccacacctgctgccaccatcgctcgctcgttcacacaggaatgacactggtggtgtgtgaaaaatcgtggcatgggcgaggacgcgtgagaggatggggaaggaagcaatccttgccattccacctcttcctcactggacagaggtcgacagggccgtcaggtccaccgggctgggacggtggtgtgtgcgctcgacctcaacatcgttgtcagcgagatgacccaacagcagccactgagggcccaacacgtgtggtagctttcggtagagcgcatggaggatgtcccagaggggagacaggcggcctctgccacattcctcgctgacaaacaactacagtagcgggcctcctcgaaggaggcggtcgatatctgcctccttccttactgacaaatgatagcgtccgaccagctgcaagatttgggcgtcggccagccgacagcagggacgtggggaagaggaaagggccggccgccacccttcaccggaaccgctgctcaagctctgtgccccactaccacctcgtcaagctccggagctcgtccatcgctggcctgtcgacctccggagctccgagaggctgagacagaggtccgtcgaccagtctacgacctcccgtcctttagagggagataagatgggggatagagaagaggaatatagagaagagagttggtgacatgtgggtccacatattttttttaaccgacaacccgctgacatgtggggctatctttttttcccttatgactaatatatggatccccttgtttatttattaaaaaattctgcctataatgccatgcaagcgccacgtgggatgaagatctactctaactagccacgtaggtgtcatataagccaaaaccaccatccaaaccgccttaggacctcgtgcgcactagtttcgtaagttaggggatgcgttgtatccaaccgtactccgtactcatccccgcagcccatcgtgtgacccatcttaaattgcctcaaacttattttggatgagccggtaagaatgcaacatttttcaggtatgcatgtaaaaaattctaatacacaaacgtattataaaactgtttaattatttaattggttgatagtcatggaaaatcaaagatatatcaccatgtggcattcatatcaggtattttgtaaaaaaaaattgtaagaatctttttacatgtatcactttacttttcagcagtatctccgaaatgcaaaagtctactccttgtagtggaaaaactaattctgcacgacgcagccgagccaggacgccgagaatttcatgtaccggccgcgtttttcattttgaccatgtcgatcgagcagtactccgaagttgatacagattacgcagaggtgacaacatatggcgcatttaattaccgcaactagggtgaaaacggtcagaatcagtaaatgacactcgatcgactaataattgatcatatttatcatttaaactggtaagtatcaacattaatacgatacagaaagaaattagtaaaatcaaaattcataaatagccaaaaatggtacgatcgaaaacggtaccccttatacaaatacgaaaacgatatttagtcgaccagaaatttctgtgaccgttttcacccctaaccgcaaccactggatcagcttcatgcaatcttcattaaccgtacacctgccactagccctatgaatattggagaaggccgagaccgctgcgaacttgcgagcccctatcatttgttaaggtcttgtttgattcagtttaagattatgataatctgaattattaggagtaagctgaaataaacagatagctaattatgataaatcattataatctataagccagattactataataatccactctaaaggtgctttttctaggggcctgttcatttttataccattttcaaccttaccaaattttggtaaagttgccaaaaaagtggctacatttagtttgctgccgaattttggtaactatataagaaatcctgccaaaattttggcaagttaccaaaattttggtaaggttttttttttgcatcaaagtgaacaggccctagattattgggtgtctaacagctaataatacagagaattaaacagctaacagcttagcttattttatgttggcttattataatccaggttatagtaatctgatttaataatctagattataataattttaagctgaaataggaccttagaaactatataatcccaggagcgtgcaaccatgacccagtcacgccatcgcatttagggcctactggagtacacttttgactaacacaaaggctctttgtcaaacgaagttaattaaaaacgtgaggaggtacatgtgaaaataaagtactgcaaatcacataacatatgtaatatcaatatgtaaattaactatcatcggataaaaaatgaacttgtttatgaattatccacgttatcttgagtaaaactttactaatggtgatgtaaacaaatatcagacacatccatttttaaatttttaggtttacgatacatatttttcccatagggccatatacaagtacttagcattttattggtcaaagtcagcctatcccaacggtaacatctatttccttatattaattagcaaaggatctcgtacaaccctcacactaatcaagctagaagtagcaaaatcagtaagagacaagctaaaaatattattcttgtgttaattaaaaaagataaaattatacccgtcatccatcaaatctagagcggagatattccattacagaatacgtggatttatagaattagaaattaataaatatcactctcaaatataatattttcacgacttaataatttaaaattataaaataataaagttgaattttactggggcgtcagttatgtaagctttatatatgatttaataagggtacatagcgaaaacgatccttgatttctagcattccgtattagataatatatgctgtgtcatacagttcaacgtatgctcaacatatgctgtgtcatccttgcaagaaaagtcaacatttaaatgcctattatacccttacagataccatattaaaaaatagaaaaagaaagtaaaaaacaaacagaaggtgccgtcaaccttattactgtttgttttctctctctcttttttttttcctttcacttttttaagtatatcgtttaaacgttgaccttacacatgcaagtataacatggtatatatgcccatacgggtttaagtcaaaactctctaggtttgactaaatttgtataaaaaaataataatatctacgatatcaaattagtttcgttagatttaacattgaatatattttgataatatgtttgttatgtattaaaatgttaatatattttttataaacttgattaaacttaaaaaagtttaaataagaaaaaaaaattaacgacttataatatgaagcatagggagtacgtaataaaatttaaagtctcatttagacaggaacataccctatgcacacaaaaagtcttctccctatttcgggctcttcacctagatctggctgcacaactcatcaagggtgcagatgatgacaacgaagggatcaggctaatctaattgctcacatgaaacattcgtcggtgacggcgttcacctcctcctctagtgctagctcctcctatttctaagggtgtgtccgtgtgtgcctgtgttcgttagccaaggtaagggacggttatggagtactgcaatgctcttgcaacttgctttaaattaaaaagaagtcctgcatacaagtatgtgtgaatatgtactgtatttgattactactactatttctgctagttgcatttactgtataaaataataataatgcttcttcatcgtacacacatccccctccctaaaaaaaatagagaaaactttacggtattcagccgcccacgtcaacaaaattacgtactatacgcgatacctgcgctgtagaatatctctctcttttttttttttgagaactccactgtaggctatctctctatatattctctatatatataggctagctggagcgctgacctcgcaaacaacgggcacaaccaacaaagatgaagttgcagtatacacgggcagttcttgccagccttttttgtgtctgtctgtcggctgtctgggtggcggcagcaacggccgatataccggcagggcaacgccccggttgcccggagaggtgtggcgacgtcgagatcccgttcccgttcggcatcggcaagcactgcgcgatgcagacgaagtatccgtttgatctcgactgcttggacgtgaatggcaccaagaagcctttctacaacaataacgaggttaccaagatttcggtgcaggagggcaaggcatggatgaagttgggcatatccagtcagtgttatgaccacgtgacaggccatatcctgtacgacagcaacgcaacggcagaattcggtgattcacctttctggctatcgaccgaaaacaagatcatcgtcatcggatgtcaaactatggcttatatggagagcaacgctgtaagtatatatatctcttaagcttatcatttagaggcattttaataagcacaccatgttaagtatacaaacagggaatcggccggggactaggggggaaaagaattcccgaaaactgtcgcaaggccaataccgtcgtttatctagaatttcacttggcaagtgtattctttttttttctcccagccacatgcaaaatgtacatactctatccgttttatattataagccgtttaattttttttcttagtcaaactactttaaatttaaccaaatttatagaaaaatattttaacatttttaatacaaaacaaaaatattatcaaaatatattcaatgttaaatttaatgaaactaatttggtgttatatgttataaatgttgctaatttttttaaaaaacttgatcaaatctaaataactttaactttagaaaaagtcaaacgacttataatataaaatggagggagtacttatgagatagaagaagtatatataggagggaagtttttggatgggcagcagtgatccgatatgattttgccaaaaaccggtttctcccaagattcttgtcactatctacacgttttgatcatctctttactttttaagactcgtctattccgtatttccgctcacactatgctatccacgccacccacgccacccaaagtaatagggaatctcatcccctttgatttgtgtttgtcatgttgtgttgcgtttttgttccaccaacctagcaatcaagtggactgtaatatgctgccacccaattttaactagtccttaattcgcgtaatggcctcccatatggatttgaacatctgacaatcctcgaaaatgtgttgtctcaaggcttctaaaacacaattggtagaaatagttattcagctagccaccctctgatttgtagtctatcagaggtctaaattctgttcagaaggagtaaccaagagaataacttgcatttggagggttcccagatttgccttgccccagctgattgtatttggctagcaaattgcgcttgatatgctaactgctaattctcaaaaaaaaaaaaaagctaactgcgcactgtgctattgatccagtgcccgtcagcttccaaattaatgatggtatattggattccttccgttaatgctgtgttgtttctccataagcaaaatcccatactttgtagaagtcactgaccaaggccctccaaatatttccatgaagaaaagaaaaactggcaaatcaacaagaacatcttttgcgctcaagagggagatggattcaaaaggagcataaagcttcatctattcatccttcttctcaccacaaaaactcagcatataaatcaaaagaaaaaccatatcacaaagacaatagaacacataatttacaaataaagaagcaaattaactcaacacgtacaactcacacctttccatgcacaacatttcaaagaaaagttaacaagatctcatacttagtacaagcttgaacacttctcaagaaatgtagtctgaaagtaaaccagcctatacaaatgctccttttttctcatccaaggtgcgacccagccagggtagggggtaagggcgtgtcacgccccgaactagtcccgaccggaactagcccgtgacgctccaaattaacctgttaatcgataccagtcccaggaaacagtgctggtatcacaggaagacagaatatcacagcaacagaggtctctttattatagagtaggagtatagtcatgttgggctgcggacagatcccgagctcacaactgcattacaaaagggaagcggaagccaagacttggaccaaacatcacaggcgcgacttggaaactaggccgaaaccctaaaactcatcgtagccggcttgctcctggaagaactcctcgtcagcgggatccgcttcatcttcttcagcaactaggggggattatttatatagagcaagggtgagtacgggagtactcagcaagccatgggaaataagtgtttaatgtaggcttcaaagaaaggctgttgtttttgcaattgattttatttgaactcttttctgaaacaactaagtgagtgcttctcaaacgacacggatgagacagtgcgtctcgtccggtcggagtatgtgcaatgtatcagtcttttgaattgatcaagattggcacccggccaacagctttcaaacggccacccgggcctggctgatcccatcagccgcagattttccaaacatcaaacccatcccacaacagcaaatttcataaggcagtagtcaaacaaaactacgctaggaatcacctcacatccgcccatgaccgtgggcacggctgttcgaacagttttaataacctctgcagagggggtacactttacccacacgacattactaacccggatcatccagcccgtgcagaacggccacgactagagaccttaaggctttcatgacaaggcatttcgaaagccgacacaggttcaccatatgccaacgagaagggtcccagaccaacaccagattaggtcccagaccatattgtgccaggaagcccaggggtcctccccgacaccaccccggcgaatccacatgtctcttagcatcatggctctcccgataagctagttactcagccaggggtgtcccattccacccatgtggtcgtacttgtcttatgttcggatgaaattccaaggaaacagtccttaggtgcaagagcgggaaaccgtacacccggtacgttccccggtccgcggttttggaaattcatttagttcgcaagcaccgacccaggtgtcggattttccaagtcttttgtaaaacgcaagttttacccaagatgtttctcagattttaagtttgaaggcgaccgtcgatacccgtgcagagtgcacgattaccgaggcgcaactaggtgggtacaagggaacatggtataacaattacaatggaatggtcaaatgcaacaaattaggtaggtccgccaatctgccttgcagacgggacaagcagattaagtgcgatcctatcaatgcataatatttttcaagcaacataattaagttcaaatataggctcaagatgttcaaaggtggcttgcctcgctcgagatcttgagcttgatcctcgaaatcctcgcactgcgggtcttcgggctccgaaactacacgcgaaacgggacagctcagcaaacggcaaaaataaagccctattattgacctctaagcgtgccattcgatagatctcgagatttgaggaattttggaagttgaacggagtcaaacggacttacggttgggaagatattgaatttctaagattattggatttttggtctaaaggaaaaggatttatttaaatcctttttgaaaaagaaaagaaggagggagggaaattagacttccctcgggcggctagggcgcggcccgagagaaaggggcggctcggccgagcttaatgggccggccggcccaagaaggcggcccaaggcgcgcgcgcgggcggggaggggagagagagagccggtgggccgggtccatcccgcgtggtcccgggtgggacccgcttgtcagcgactcggctcaccgtgagcgaggtgcacgcggggcgtgctagggtttggggagggaggcgcggcgcatgcgcgcgtttcgcggaggacgtggtgcgacgggcccacgcgcagcctcacggctcgcggtggaccgcgcgcgcgaggggcggagggaagcggcggaccggggtctgcttgacccggtcgcggccgaggtggcgccgacgtggcgcctacgtggctgccacgcgagccggcgggaggtagacgacgacgccggccggaacggacggcggacgacagcggcgagcggcggagcgaaccatggcgatacaggcgaaggcgagcacaccgggatgttgcacaggacgaggggagacgagccaatggctcggattcgccgggggatgctcgacggcggcggattgcggcggcggcaaccggcggcgggagaagggggaaacggcgatgaggtcacgaggggccgattcccggcggcgagagcatctacgcggctacgggaacccaccccttgcgccggattaggaggaatcgcatcgagggaggccggcgacgagtggcgcttctgagctcgggcggtgagcacacggcgagcgacggcagcagtcggggcggcgccggctagctacggggaggctacacatgctactaccgaaaactaaggggaagagatggattgaggagggagaacggggagattcactaccgtgcggacggggcgcagtgacgatgggccgacggcacgggagcgatctctccggcctcgggccgggggagaggaagaagacgagcgcccggagtccccttcctcgtcctaacgcgcaccggctcctccagcacacgcgacggcgcgggcggccggcgggagagacagcaatggcgcgggcgagaaacggggaagattgggaggggaaagaggaagggaggcgcttttgtttatagggcggcgatgtcggtttggaaaccgaccttgggcggtcaagggagggagctcgcgcttggcggtcgcggccaaagcggcgacgggggg

SEQ ID NO: 9837 - DNA, 24909 bp, Oryza sativa
ggaaggtaattccactgcaccaccaatcaatattaattagtatttgtgatttttttaaaagtaagtgctccataatgtttttacatgaaacatattactccatccatttcaaaatatagcaacctaccaaattaaacatatcctagtaccataaatcataaatctgaacaaactaatgttgtactaggatgtgtcatttgtacatattcgttgtatcaggatatgtataatccgatactaaattgatatattttagaaagaaaggggtatgtactaagaatattgtatggtaaaagccgacacatggacattcctttactcactacctatctcaaaatatagcaacctagtactagatgagacacatcctaatacaacaaatctagatagacctctgtccagtttatattattgtactaggttgttatattttaggatggatatagtacatgtcagtctaaaaaaaagcctctaaggtttatacttattgttttttttaaaacacagtagaaatgtagatgcttatatacacgtgcatgcactcgcccctatagatacacacgcgcacaccctcttcgatgattagaccggcatatctaaagattaacgaagtcaccacaggtgcttcgatgtctacatgtatgccgcctactactaaaaaaataattagtcataaatacgagtgctcatgctaagtgaatccggataggcaagttccaccatataatgaacctaactagctgagctatgcttacttcgtcaggtttctaatactataattgtttcatattataagacattttaacttttttttataatcaaacttcggtcgtgtttgtagaaaaacatagcaaaatcgacaacaccaattgtttcattaattgcaacatcgaatatattttgataccacgattgttttgatttgaaaatattgttatatttactataaacttggctaaagctaaagaagtttgactcagaaaaaaataaaatgtcttataatagaaaacatagtgagcatttttatatctattgcaaacgaagaagcaagcggtcagttcaactatattattcttctctagaggtgtttttcctcctcaaagggttatccctcgttttatatattatacttaaaaagtcataaaattttataagatagattaatatatgatatagtagtattactctacaacatttaagttaaaattcagcatatacaaaagtagaaaaaataacaaatataatgtacatgagcacaatatttactactactagtatatttgttttctttaatttatatagggcgattatgaccttgtaggatactcctatattacatatttattatcttgagttgatttttttttaaaaaaatatgaccttaatgtgatatatacacaagggacatcttaaaagacttttccattcttgtttactgtttcatttgttgtttcgttgcgtgctagggcgtgtttaggagaaggtttgaaacttctctctacctctataacgtgtataacggagtgactcattaactcgtaattaattatgtattagctaaaaaattaaaaaaaagattaatataactttttaaagtattaatatcgaaatgagcgcagtcagggtcatccacattgagagatactgactgctcaatcgctttctaacatggtgagctagctagctgccatgtactccctccgtactcgtaaaggaagtcgtttagaacaatatttaagtcaaaccttggaaatataaatcataaataactctcaagttgttaagtttgaaaatgtaaaaattatatgaatagatttgtcttgaaaaatacttttataaaagtatacatatatcacttttcaataaatatttttatagaaataagaagttaaagttgtgttttaaagaccgtgtcgctatactaaacgacaacaacttcaacgagtacggatggagtacgcatatacccatgtggccatgcctacctgacatggttacggcgcagcgactagcgagccaagtcgtctagactcgagaggagcaattattgggccaagttccttctcactgtgacccagtttactgattaggccgagttctctgcctcattggccatttggcctgtgtgccaatgaaaacattgagttggatatcaaccaagtagaactacacgggagtggcactgatgcacgcctcttatgtaggagtagctacttaactgcaaacgatctatataatgtctacatcagagatatatttttctctttcaaataaacaggccaccactgaattttctggtatactctattatcaccaaaattgtcctccatccattttcacaccaatcttatcattttccatatgcatgaatgtgatggatgagaaaaaatgtttgtccagaatgtctgatttgaccaatttgaggtaacaggtcatgcattttcttggcaaggcattttcattttcatagtactcctataaattttgacaagattttgggaagcttgatatggtggtggagtcatatgtgcatgactctatctgtcatggtagaaatggtgatatccactaatattacacacataagtacgttttaataggaatttagtgggatcatggatataccacctatttccatctctttgagagtggggacgaactcatgtggtgatgagcgtgcatgtgtgtcatctatgtaaatgaaaaaaaaagattttaattggattatgaagttaaaagttgggctcaaccccaagctggctcatcgttatcttggccccacgagtgaattttcacctatgtatttttggtcaagaaaagaaaaacgtgcaaaattgtgataaaatgggctgaagtggtatacacagagatatgataagtcgttttgattttttcctaaatcagaaatctataagttaaacctaatttatggagaaatgtagcactcttgtaacaccaaattagtctaattaatcctaatatgtttgttgatattaaaaatgtttgctctgtttttctataaacttaattacacttaaacagtttgactaaaaaaaatatcagaacgtcttaagatatgaaacaaagggagtagaatgttagtgctaccaaagttaccaagatattttcagtaatatatatatatatatacataatctatattgggtagactctcgagtagtacaaaaacatttttccttttcttttctcaaacaaaaaaactgacatcatctcacccttgcatatacaatgttcacatatatcacaccactaatatatcagatgcctatgggtaaaaaccactgccccaatcgatgttggatcaaaggcttcctgccgagccattctcggcgatgtgcaccgacggcgcgtcgctcctgaacctgagcctctgcaccatgggcttcatcttctcgatgagcttgacgatgacgaagaagagcaccctgtacagcaccaccatcccaccgaggatggcgaggtcgacccacttgctgtaccccagctgcacctgccagtagtctcgcaggatctcgtggccggtgatggtggcggcgccgccggcctggttgttggggaaggtgagccccaagaactcgttcttgtagaacccctggttggcgtacttgtggaacgcgatgtagtacatggggtacttccacaccggcttgggcaggtcgtcggggaggcggaagaagccgccgttgagcatcatgacgccctggatgccggcgccggtgatgatgcccatgaggaagtccggcacggcgctggccacgatcatcatcagcccctccaccaccatcatggtcgtgaagagcaccaccgcgaagtaggcgaagtggtcgatgctgctctggagcccggtgaggtagtagccgatcgcgcccggcgccaccgagatgagcgccaggtacggcgtcgccgacagcgtgttcgctatcacgaatgaccccacgccgtagtgcccgttcagcctctccctcccaaatatctgcataaagaaaacaatgaattaagtgaacattgatatccattttcagatataaaagtatgttactggggtagaagttaaattttgttataacttgtagaggttaaatttgatcttagtgtatctcatattaatttattttattgatttttttaaaaaaatagtaactatttaaatgacatacaaataataagaggtaacattgtatggtacattcaagaatataccttcatgtcctcgacgaaagatgggaagccaccgatggccatgaaggtgaggaaggcagcgacgaacatgagcatggagccacgagcctgcagagatgttttcggacgtacggtcacaaacacagtaacactaaagggtaatgaacagtagcagtgtaatgaacagtgatgggtgcggctaatagaaagcaacaaaaaaaagaaaagaagaaaagaaaatgggacactgtgagtgatggccatggctgacgaacctggatggatccgtagctgtggccgatgttgtagtaaatggtgccgacgcagaggcacagtgcgatgtaaatggcgaaacgcagccagtaatagcccaggtccctgtacatgttcacgaacgacctcttcgtgagcacccaggtctgcgtcagaaagctcggtctctcctccttcttcaccactgcccctccctgtaaaaaaaaaaagaaatcacagaaagaaattttggtgaattttacacgcagtaattaaaaagcagaagcaaggatggattggcaaagctagaagaattcagagatgatttgtgtgacgtacggtggcgcgtatgtcttggatgtgatgcgtcactttctccaagtggacggaggatttgtaggagttgacaagcgtgtcgattgcttgagcagtcgtcatcttcttcccgtccatgccttcctcgatatcctgattgatggatcgtttagaagatactaagttattcgggatcattttatttattcaataattcagcagctttcatatggtttaattgccatcgtcttgatctcgtcatttgctactcaccttgtcaaagtccttgtttatagtcctcaggaagtggtctgaagggttcatcaatgatggacaagggaacccgctcaaagcaaaaaactgcgaaaaatacaaagaaaaattaaatgaatttgtgcagttacctaataatcagtcaaaaaagttcagaaggattcttctgagttctgatttctgaactataaatgttttccgtagtgctagctagagagtcaaagaacagtggccaagtgcccaagtctgaaatttctgacgtttgtctatggacctacatacatggtacgcgaccgcagctgtagatcaccgaaaacgcgtgtttttcttgatgatttgttcgtacggtttcctaacttcgacccaagtgtggtcaaggtcaagtaatcagcatggtaggctattaaaatgtcaaatgggagacctttgccttcaaaaactagttaagtggtgtgtgacgatccaattgcttcttagtttcaccttcaatcacacctgatactttgttgtatcaggactcttttccaaagttgtttacctacttctagtactactaaaaaaaatgatccttgcagagtaatctgggactttcagctttcagaactgaaaattcgtcaaactgaacgaccgttgcagagtaatcgctgtatggatgcatgctgcagttggcatagctaaaatctgcaggctttaagtcaagctgaattattaagtgccaccgatgcagtgaaacttaatactcctactccataattaggtggatatgttctgctgctcgtgccacgctattggattcgatgagatatcagaaaaataagacacgcggctctcgccaaagaagaacaaggagacaagttcacacgtcaccgaactatcggagtcactgtgtcagactgtcagtgcattaaattcgttctgttcttctgtttgtgagtaagctagtgtcacaattagttggtatactaaaatgaatatgcatgtatatatgcagttcatatatagtagtggttagatctagtgtctcctttcagctatagttcagttcctggttcctcctacgtactacccaatgtttgagaacagttctcattttgtccttactaattttcaggcacaaggttccgatgtaataatctgtagatttgtttctttcaaaaatagtttttagatttgtagtaatggctgaaataatgtgtactttctgcatatgtgaattgttcatcagtatcttattagaactatattttctattcattgttcaatgacaactaaggatttcagttctacctttgatatagaaagatgcacagctcctgcttattgtcggaaaataaaaaatcttttgcaactatcagctttcatctgactttgcccaaatcttttatttccaactcatggttagctgatgtagcccgtcaagtgtgactaaacaaactcggcaaaaatgattctctttccgaaaacatctcgcaaaggattgactaatcgcagaagagtagtagtagtactggtctaagtgattcatcgacaatatgataatatcatagacagtatgaatacacagatcgaccaggctggctgccaattttttttcttaaaaaaaggtataattaagcaggtggccggtgaatgatagccgccagcaaaaatattattctttttttaaaaaaggcaaaaatgtacgtattaattaagcaagacatacgtatagatatacgagtacgtatttgtacagtatacggaagcgtagaagcgtgtagaatacctgggcggtgtcggcggcggggccgaagaagacggtcttgccgtaggcgaggaggcagaggccatggaagaggccgaacacctcggtgctgggctggtgcacggcggcgacgacggtcatgccctcgcggcgcgccatgcgggcgatgcggctgacgacgtggtacgacgcggcgctgtcgaggccgctggtgggctcgtcgaggaacagcagcgccggccgcgtgaggatctccatgcagatgctcacccgccgccgctgcccgccgctgatccccttgtgcgcccacccgccgatccgcgtgtccgccgcgccctccagccccatctcccgcagcgtctcctccgcccgctcccgcttcgccgccgcgctcatcccgctcggcagctgcagctgcgccgagtaccgcaccgcctcccgcaccgtcagcgtgttcatcagcacgtcgtcctgcgtcacgtacgcctgatccatgcgttccacgagatcatccattattcaattattcatcgtgcatgcagcaattaattctgtacattcgggaagaagacgagtccatctctcgctgacttaccgacgtgccgaacgccagcgcttgcctccggccattgatcaggatgtcccccttctggctcacactggaacctaaccttcctgtacgtacgtgcacccagaaaacatggagctcggtcagtcggtgtcagagttcgtctcagctagcatgcaactcgatcgatcactccttctctattcaatgaaattggcagcttgtcgattcgttcaaaaaaaaaaaaaactcgatcgatcgctatttgcagcgacagggatcgtgttcgtcgggatcgggagattaattgacgtgcgtgtacacgttacctgccaacgcatcaagaagtgtggacttgccgcagccggagggccccatgatggcgagcacctcgccggggcgcgcgtagccgttgaggccgcagaggatggggacacggccgctcttcccgccggcggcggacacccacaggtcctcccacgcgaggacgacgccctggtccggccggcgcaacgacggctcgcgggcgacgccgccgccgccgccgttctccgccgcgctgatctccagcgacggctgccgcgccggcaggaacggcggcggcgcgaacgaggagcggccgctgccgaaggggaacccgtcggtgctgcgcacggaggcgctcatgtcagagacggcgtcgaactgcggcggctggtccacgtcgtcggcctcgcggccctgcggccgcggcgggctcggcttccacctcggcacggtgggttggtgctgcccggacgccatgaacgcgagaacgcctagctcgagcttgaccggaagcgatcgagctagctagcgaggaggtaggtggtgtgcttgtgaagctagcgctgtgtgaagaagaatggcgagccatggctcttgcttaaatagagccaaagcttcgcattgcgccttacagataagatcgatcgcttcgtacaattgacttttgataaattttaactgacaattggattatacggtcaaaagtgcatttgaattgttattctatcgtagtttctcccatctaagctgataagatcgatgtccacgtaattttagacagtaagcaatcaattgaggcataagaatatgtacaagacgaaatgaatagcatcaagaaattttcaaaatcgttttttaagtactatagggtactgttattaaaatgttgagacattcaaaagtacgtacaagcctcttcggtcaaaaaaagaagaagaaggtacaagccttcaaatttgctagttttcatgataaaatagttcctaaatttggaataattcaaagataactcagtttggggagtcattaattgtatttcttatgatttaataactttaaaattctgaattaataaatataatgttgtattggtcttgggggctctcgctttagcattttattaatttaatactaaaattcgaaaattaataattagcaaattgaagttgatagacccttgcttaaatttaagccattatgattcgatcccacatcgatatatggctatatttattcatttcttagtgtggtcataatttcaattttccatgatgaaacaaagagtaaattttgctttgggcctcttattaaaaacaaggtgtacttgagtccaaagttgtagtttttatttttttatttagtaattcttacattgagaattgataataattataaagttgtaactgtctgggactcttgaaccgttatatagccagatttatttacttattctctaattttatacggttacaacatatactaattacaattactcctataaagaagcacatgcatgagaacgcttcttcaagaagttgagctaatagatttgaatttgataattgccgcatgctatttatagtcatttgctcaaactgtttatttgcttcatacaaatttccgcagcaatatgtggatgttaatatagctaagaacacctaattaatatagctcggaatgataattaatacagaaaactccatcttgaaacacattattaaatgatgacatcttgatcatgtgattgttttacatcaataaataaacatctatatcaaaaagtgactattttgtggtatttttcttccataacgatgatgaaagggagcgagtactggatttcgttactatcaatcacccatcaattagcatcccctcttaatttgtcttacgtgctgccatttgctgggtttcgctgtacacataaatatttatcaagttcttttgtcaaaagattataacagtgaaaattgcttaatataactgaatgatgtacatgtggaactgaaatagcacgattgatatcgtctctactaccaaaacaacccatcaattaatgtataagcctgtccaagacatgaagaaaaacaatagttcatctgccaacctctgaccatgctacaataactatatcatccacatcaatggcatgtaaatgtccaaaataataatcaaacatccagaacaatagcatctccaactgcacgtgaataaaatgcttgatgttgtagattttttgtttgtgctttatttggatgacatcatcaaatttttatagttgtcttctatctatgttgcttttttataatttaataaacaccgtaagattgttttatgcgctaaaaagattgcactatacttctataatgataacatatatctttgctttcaaattaatctatagaacaattatgacttatagtttcttttggattgctagattttttttccgtgatcaacaaaattctccgtagcaatgcacgggcaccctactagtatccaaaataataaaaacaatagtagcatatatagcatatccaacaatttccaacttttgaaagcatttccagcattacgaacgcggaggagaactcaactaggccggtcacccggcggcggcggcggcggcgggcggtcagctttccaacgataaaaatggatggcttctctgcaacttgcaatagcaaattggcagcgccagaggtggtcaattcggaggctctagatttttcacactttagccctttcagagaaaaaatttacaaatagatcctccagaaaagtttccttcaaatcctattgatttgtagtcaattaattttgaaatgaaaatgatagatcaatataccctaactcatttctgctactttatttttatttataaaatcttaatatgggatgagcatatataggtccctccctcctctacccaaaattacaaatcatataccataattcgattcccctacttccttttcaaaatttgataacaaatcaataaatctaggaatggggaggagctagtacgtacccacgtcctctatttagatggagttttttataaataaaaaaactagtaaaaataaattaggatacatttatttattagtttttcaaaatgtgacgctgagtcaataaaatttgaaggaaaacaaaagaaagagttattcgtagaattctaagtgggagagttcggcaaggactcctaacgcgcgtgtacgcgccaggaggagaagccggcgtgcgtttttctgacgctaagagcgcttagccctaactaatagcgcttagcgctaactaactttttttctttttttttttgataaaaattcatcacgtgtctttcttcctttttagttgactgaaacaaactttcaattccagatttgaacttagatttaaaaatttcaagttaagatttgaatactttcaacttagatttttaaatttgagttaaaagtttttaaacctgagttaagttttcaaatattgacttgaagttttttaaatttgaattgaaagttttaaatcttcatttgaaagttttcaagttcgaactgaaagttttcaaatccaagttgaacgttttcaagtttgaattgagagttttcaaatccgagttgaaagtttttaaatctaagttgaaagttttcaaatccgaattgaaagtttttaaatcttgaattgaaagttttcaaatttaagttgaaaatttcaaaaaatcttgagttgaaagtttcaactcatattcgaaaactttcaactctagattcgaaaactttcaagtccagatttgaaaactttcaacttgagatttaaaaattttcaactcaagattggaaaactttcaactcgagattcgaaacctttcaagtccagatttgaaaactttcaacttaagatttaaaaactttcaagtccaaaattgaaaatttttaagttaagatttaaaaattactagtaaactaatcactagtaaaaatagggaactaatcactagtaaactaattacgattttttctcctatccgtgcgatagcaaactgcgaaaaaaagaaaaaaaaagagaagaaaaagcggtagaaaaaaactgcgaaaaaaaaagaaaaagaatagaagaaacgtgtgcacgtaccgtggaccttgtgggccggaagtaagcgccggtaacgcgcacgcgaactagcaatctcggagttcggcgatgtctggtgccaaagcctaatgtcgacgccagcacatatatttggagcaagtgttcgatagggtgtctactcatgaaatacattttcaaaaaaggactaaaacgtcaaaaatccagatcagatcgtttgcttctctgctgtttcgttttctgctcggaaagagaggtagggaatggtcgcgatgatcaccatgcatgcacgtcgacagacgttgaccgcaccacattgatagtctccagcttccgtcgttgtgacttgtgtgagatgccacgagagcatacattacacatgcaatttgggattttggggacacatgcaatttggggttgtttccacgcagctagccaagtcatgggctctcccaattagtctgacccgaatttattcgctcgctgccctaagcaagaatgcatgaagacttgtcaaaggaatatattactgtacgtaattactgtaacgtaggattggtcgatatataggagtagccaattgtcaagtcctatgcaagctagtcaggtcacaaaattcttgaagagatactctgaataatatatgacgtgtcaagttgctatactagtattgttttatactgatctttctcacgttacgtagtagtagtatccaataataaagaaaagataagtacgtagctcgacattcaccggagcatgcatgcagcgacttactacctcccttttaaaataaaccaatttacgtattaatatgataaaatctagtacaataaatccggatagaagattgtccagactcactatactagattatattatatccttatcaaaattgatttactttacgacggagtgagtatctagctagatcagagcaagtaccataaagatttactcctaagagtagagatgtttgcccctagtgccacataaaattaggtggaggaaaaaagtgaggagatagagaataagccaactctcatgtaacgcgtaacctctatacaaaacttcaagaaaaatacaaagagagtgagatagtgctagagcgaaccaaccaaaaagttatcaaggtttatttattagagataaatatattatatatacatgatgcctcttattcctaattcatgagtagatgatataactaatattagaagcggtagccacgccactaatataaaactactctgagcagacatgggatatattctactctctctctctctccaaatatataacaacttctagacataaaggtctgtcccaaaatataacaactttttcaccaacattctcttcttaaccaatcgcaatcctccatcattcaattttctcacctatcttcacttctcaaccaattacaattttatcctatttaattttacctactttcttaatacccgcgtccaaccttaaaaatccttatattttaggacggggagagtagattaaaggttgggttctttattactttttttttctcaaacttctactctctcatttatcatgaacacacttcacgaacttttaaatggttttttcaaatattttctaagctagtacgtagttactttaaaaaaacatatatattaatctattttctaagttaacatttaattaattattggttaataagctacctcgattttcgtacaaggacctaaattaacgtggtaatataaagctagcttcagcaacgtagagtacttcctgtggcagggagatcgattgatcgaccgctgtgacgctgtgttttagctaaccaaccagggtttttacattccgaaatgtaaaagatcaatctcggggaacaaaaattcggaatagcaatggtatttcaaatttgaacagttttttctctgaatgtaaacaaattttcgctaaatataaagatactaaaagtttttggacatgtacgtaaattcaaattttctaaccgaaaattcaaaccctactatccgcaacttgtgagtagttaatgcagagtaatgatgatacatgacggctaagctagctagtgggagtagttagctcacagtaataatattaatggtggtatcaaataaatgattgctagctagctttccatgcccgtaattaacttatctcaagtttctaataaatacttcctcccatttttataattaaagttttagacaacgatactgccctccaaaacatattttcgatttgaatccaacaaaaaacaatgaatcaaatatccaaataaaaaactcccagaatcaacccatcacataatcaatcaacatatatataatacggccaatctttataacatcctcactttttaattggaagaacagaaatggaattacatggctctaggaccacccgccaccgctattcaccgcatggtgaagaagtccgcccacccgctgctctctacagacaaccattgatgtcgagatcagctgaagagagagggggtaggatgaggaggatgagagggaaaggcgcggatggaggaagatggtgaatggacgttaaccttggatgttggtgttggactcgagggtggcggatcagatcaatgacaaggacgaggcttcctgcctagtgctaatgcctccatcctccacttcattagtgttgctaattgtgatgaagagaatgaggcactctagattcagctcgtactaggccctaggcagaggcattgagggcaaggaagaagagatctgacatatcagtgccattgccctcgtcgccgcgcgttgctgccccatcccccttgctagccccaaataggctagatctaggttgccaatctgccagcgccataatccctatggagccaccgtcgcatcacctctgtaaagtcatgttgctgtcgatgtagggaggcagtgagagagtgagaaggagagcggggattagagggagtgggagggagagattattgacaggaaagctggatagtgtaagataattaatagtttgggagagaccaagggagcgagagagtagtagatattccctcggttagttcggctcatctatgtggtttattattaacaatatttttaaataaacaagcactaataacatcagtgctaggtttcttaatgaaccagcaccgatatggcttgagggtgcaggaaaccactattagtgttggtttttggctaactgttataaatgtggttttccaaatatggagttttgtagtaatgaccaccaccaccaccaccatccccgtcctaggcaccgctagatccaaaggcgaggatgcctagggtgcctgatccggcgacaagaaggctttctccatggctaccgccattctgtcttccatagtgtagtcaatggcaattgaggacgtaatgatgatgacctccgctagatctggccaatccatgctctgagtgtgggtgatggccagccctgtctcctctccacaacctatggcgaacagatcagtgcaagctaagtcctaaatcaacctaaacctctgctcttctttctcaatctgaccccatctctcctctcacgtgtctggcaatactcatttttactgtcgattctggagctagccgacagtgatatgagttagggcctgtttgggggagcttaaaattctaataagcggctagttggtagccagctttccaaaatctggaaaagctgggtttttcagcttctggctttagttcattttctgcattcctcaattacaacttctcaaaatctagacaaaaaattaaactgtttggtgagcttctgattctaggagaagctgcagcagttagaagcttccccaaacagaccgtaagtatcactatattgtaatgtgggtttttgaattggaattgattctgtattttgtatagtagtgttagtatattcctataaatagcgtacccgcaagcacaaattaatacatatatatatatgtgagcactaggatttttaatctcagagtgtgaagtcatgtactacgactccactaatagatcaataggcgtgctttatcctatacacacaagcactgttaattgatatcaaccttggacaaaaatagatggcttaattcaactgctacaataataacatattagtgtgcagtagaaccgcatactattgacacagtagtgtgtattagaaccgcaccggcctcgaactcattttcttttgctatatatagtattcatctgcagatccagatctccttttcagtcggtgattgatccatgatgctcatcagtgcaccgaaaacgattgtgaccaacacgtgagaaatgtgcagtgtaatccaaaggaatgaaaatgcaacacgatacgtatagtatatatatatgcacgtaggtactcgtacgagtactactgtatataattaatggctaaactcttgacgtgttaacggtcttgtacgtttttcttttcctatatatctcatcaaacatggattaattaggcttaacaaattcatctcacggtttttagacgaattataaaattagttttttcattcgtgtccgaaaactccttccgacatccggtcaaacattcgacgtgacacccaaaaattttcttttcacgaactaaagaaagccaaaatcacaaaacacctcaacacaattgattgtttttttttaagccgcacgtggaaacaaaatcctaggcgtagattgttttttttaagtagtgacttgtagactccatggactgactaggaagactataaatcgtacgtacgcgcagaatgtcacacgttaatgtagcgaattaacgcacacgatcgacatgcaatatattcaacgtgcataaattatgtcatctattcgtgcatcttttcctagctagctaacttgcaaaaacctgcagcgggttgtggaatacaaccccagttaaatttgtaacggtgcgattgatttcagacttcaggccgtccgccaaagaaatctacacgaaatttaggcacggtgaaagaaaaatacaggttcttggaagtatttggaataagtgtccctagaaagcaaatatatcatattcaaaataatatcgattaagtactgtgcgaggaaaagtaagagtagacgacgttcacggcgtcgtagttgagttggggcgaaatttcataatgacatacggcttgaactaacctttcaatcaacgtgaaagaataattataacggtctatgttgtccttgcgagcatatattaatgctgatagagacattgatctcaccataacttcagtataatagtaggaaagaatgtgaagcataagcatcatatcatcttcaattgatttcttcagccgccgttaacatggaaacatggagtacataggcgtcacgtcaaagttcggcaactagctaggagtacaattttatttgttttaggaattatttctcttgaaatttatgtgaaccggtgagtaccgttgagttgtgattcaaattcatttgcacataataaaggccagcttctgctggagcgaaacggaggcccgtaaatgctcgttatcttttagggtttcaccttcatacatacctttgtaagccaccgttcggcgttgtaacctcaccctgatatagtgaagatattttgctggctagtgctcgtggttttttctctcctgctttgggagggttttccacgttaaatctcgtgtcttctgtgattgatctattattctttgtcgtttatttgcctatcgttttctaacaagtactccctccatccaaaaggaatacaattgtagcattgaaaagataatatacttagtatgaaaggtaaataacttagatgtccctcactaaatgagaagtgagaggtggttagagtaaggttgggagaaatttaaatgagatgtaattgcagagaaaatagtactctataattgtattattttgaataaaatctgaatgttatgtacaattccattttttttatggaggggataatcaatagtaactaaagcgtactgtgtatcccctagtttcctaataaaccaatcataaacttttcaattaattatatatatgaaaatggaaaggataacataagggtttacatcatgtagacatatgtcagacttgattaatacccctttagacttttggtacattatattcatgtaatatttcttcgccgcatagtaagaggtcttgagacagagatcgagagagacagagatatgatagaggaaatgtcttgttgagaatacaaacacaccacacactgctagttgggaactctcatgatctgtacctgcagttgctcaaccggcacttctctttggacacgtatgatgtgatgccattattgtagcacttatgtgtctctaggagccaaagaaatgggaggtcagctcgaagagtcgatgcttcgagcggccatccgatccacatcccagtccataccctaatcaatccccattcaagaacaattcaagaactccacacatcccaatccataaccataatcaatgcccattgaaaaacaaatcaagaaccaatatatgattcaataaacatcacacacggtattacattgattcgattactatccaggaccaatcaaccccaacagtcaagaacaacagatgaaaaacactagaaagctcaccactgtcgtctcccagcaacaggcccatgtccaagattcgaagcaggagaacctctggtgtggccattccttctccacctcccccatgttccgtccagtaccgctcccccccccccccaaaaaaaaaaacggcactgccttaattctcctctcacgacagcctccctgtcaagccgtgctagagaggaatattgagagagaggaggtgcggtggcaatgaggttttgacactatttttttcactctccataaaaaaatattttatttcgttacgataagattttaataaacaattactctattaaaatatattttagacacaaaatgatgctgtcaaaatttagattcatattgaaagtagatatttatggttatgctattgtatcacgtaaagaatatattagtaagtagttgattgttagtcaaagtagttctaatgaaacaaaatatacatcatatttttcgacggatgtctggagtatttacacaatgtactcataagttatttatacaaaaccccccacttccattttcaaagtccagtttgtaggatcactagtcccatattcatcgacaatttcctaattggtcttgtcagaagacttcactatttcttcatgaaatggcattatcaattaggtgtaataatgtgctcatttgtcatcgatcaaaacctaactaatagatcattgtcaactccatatcatatatactcccttgccctgttcttccagtccaatcagatcactccagagtacaataccttccttagctggtgcctacactacacgcagtacgcatgcatctccatgcatgttatttttttcagaattcagaaatttgcatctccatgcatgcatgtgaacgagctggctaaagactttttgcaacattctatctaacctaatgtttcctaggcagagagggtagttagatgcgtgattaatttctaactacaaatgggagaatatatactttgttcaccgtcatacaactaattagcttcatcatttggcaaagtctatacgtttcccgtgaagactaacacaagcaagaaatcaacactaagaacaaaaaccagcaccgttcatggacgtcagtgcagcgatttttttgcagcacgcgcgggcgtctgatttttcgtggccttctctttccatgaacaaccggtctgcaggtcccagtgtttcaccgcttcacgcgacgatgacgacgatgtcgacgacgacgttgattagataacgtggatgcgacggtgaaaacgtggaagtgcgtactccctccgtcaaaaaagagaaacctggtttccgtgtccaacgtttcaccgtccgtcttatttaaaaaaattataaaaaaatttaaaaagataagtcaagcataaagtattaatcatgttttatcatctaacaacaatgaaaatactaattataaaaaaatttcatataagacggacagtcaaacgttggcacgggaacccacagtttgtcttttttggggacggagggagtagaatttcactgcactaaaggatactggtggtcatcgatcccaaaaattcagtgtgtaggtaaactcagtcactgtcaggatacaaattttctttgatggtcagattgcgttgctgttgttgttgggatcgactgtgtctgaggtcaggggaaaggaaggcagccttgacgagtatgcatgccgtaattactaacgttgtaaaaattgtgaccgcaattaccgagctgtgatcgtgatgacatgatcctgtcaacattgcttttgtttgaattaacctagcttctccagtcaaagtttcagccatcgtcgacgtaggggatatacgattttgtttttgtatgtgtcactggtttgtggaatgtatcatttttgtatccacaaatggcaaaagggagaagagatacaaggtagaccacagcgtggcacgtgtgaaaacagtaatactaatagcagcataagtaaaaaagaatcagatatgttcagtatttcaagtgaacacacgaaaataatgattttgtttggctatcatgcaccatataggcatatatatagtcgttttgtttttctatctgtcactagtgtgatgggtcattgttctcacaaacggtgaaagtgagaagtggtctaacgacagtgaaaacctagctggcacttgtggaaacagtagtactaatagcggcataaataaacaaaatgtcaaataagttcagtatttcaagtggacccatggaggttttggctgtcattgtgtgatgtgtcgtactgtcattgtttcacaaatggcaaaagtgagaacaggtctaacggcgaattagtggcaattgtggaaacagtcacaaattaaaagtgacatcagtaaacaataagtcatcaaatacacagtatttcaagtgggcacaccaaaatagtacgagaagattcgtatctcagaaggcacatctgcaataatttaattccatttatttcttatacaaatcaacccaaattacgtttcaaggtactccctccatactcataagtcacaaagaaagtcgtttagaacaatatttaagtcaaaccttaggaatataaatcatgaataactcttaagttgttgagtttgaaatgtaaaaattatatgtatagatttgtcttgaaaaaatactttcataaaagtatacatatatcacttttcaataaatatttttatagaaataagaagtcaaaattgtgttttggataccgtgtcgctgttctaaacaacttccttggatggagaactgtataaacattctctctttttttttactggactggaatataaacaatgtctttgactggagggggagcaataactgtgcgttcccacgagggtcaaaatattgagaaagttcccacgcttcagtgcgtcagttttttcttgcttgtggccttcaataaattagtcaactctcaaatggaacaaaacaactgacaggcaccggttttttgcgtcgccgagaggtgtaaacagcacgtacatgcatctttcttctgccttggccggcggcagtacgagacccgattcagtggtaaaaatgctgaatccaagcttcacagcctctgggttttctatccattctcattgcctcctcgttattcaagtttctgcatagaattttctaacatccattcatgtctccgtaacaggtttctaactttcaagcacgagttctgcatggacttgatggatacgtcacaatgataatgcattcatggtcagacagttcagtccgtggtagcgacaagacgtacagccacaagcatttagtcaagaggatgtgtctgaaatattgtcatatcaaaatttatcaggttcaagagttcaggttaagactccctgtaatacattctcttcgaagaaaaataagctgatactgataggttacaggtggatgagccagccggaagtatggagggggcaatacgtgcacgattaccagatgacatggacagatgggctttagagcaacgtggtgccctttcactaatgggcgagttcattcacccattcttcagaaacagaatatgataaatcaaacaggaaaacggcgtaaatgccagaatcaatgaaaaatggcggctcatcgctcaactaataccggtaggcaaatgatggggcgatgttgtatccagctataatatgtggccttggatagcatcagcattcagcaggattactccacctctttagcatctgcaatctccatgtcagatgctttgctttcgggcacagcttctggatcaactgcctcagtgctgagatcaggctgctcgtctgatccatcaatcttcatgctgggttttacatcatccgctttggggattttgagcccataacgtaaacaaatcctctcaagcagctccttcccatccaggggagaaaccatgacgcacaaattggtcttccctttccagcaaacaatggcgattgcagaaggatccatggcgatggaatctatgttctgatgccctgaaatatttcaaacatgtttagctgtcatcaagttgtggtgtttctctataaagcttataagtgggatgtgatgttaccttcccaaagtactacaacacagcaaccaggcaacaaagctgaagcttcttcaccgaattttgcatccacaaaatcaggaaatttaatagttctgtattgtaaaaggtgctggaagtcaattgcagaagcgtagagaatctgtttggtgatgtatggaagcagcagtggtaaaccctctgaagacaacctaaatgtgcatggtgagccatcctttgatgactgtctttcctgaaagatattgcaagaatcacagcttagtgtcgtgccatttgccccactgataaaagctaaaattgataaagaaaacataaattaaggagacacttacaaatatctttaggccaagtgaggtaatcttaagccgctcaccaacttttacattgagctccaaaacttcttgcactgattttgacacgtagtatattcttttaacatggccagcatcaggattcctagtcacaaggtgaccctcaagcggaaatgtatccttgataccatagaaagatactatacttcttattgtagcttcatctttgaaaaatatcactggatcaacccctctccaccttccttggttctgtggcttcctcctcctatctcttggtcctgcttgatcattttctgcctcattaacaattactttagcttcctctgagcttttaccatttgatgtttcattatccacatctccattttgctgttcatccataacattaccatcatcaactccttgctgctgcacggtattttctttatgtggcaccttatctgatccgagacctttctcaagtttctcagccctatcctttgaaatattgtgctcgccttttataagttctgcctcttggttccctgcaaagaaccaaagatattaaggtatgcacacttgaacattaataagcagtggctaataagtttatgcaatttgatacaagtcatgaaatacatggaataaattcctaaagattaccattaataggggagattttctgaaggactgcaataaaaaatgccccactgttttgatcatgcggaacaattctcatgcagcgatgcagagggaaatttgaatgttctgtgcggatagacgtagaatttgactttttatcagagtcgtttggaacttcattagactcaagtttgctcgtctcttcagtattgggatcaccaccattattgacatcatcagatgctgttttcgtttcttgttctccctctaccatgtttgttgaatctttcatatcagcatcaattacatctgtgttgatctcaacactgccaatagccacatggctatccatggtgcccttccctgaaggaaacatgcttggtgatatcacgttctttctgtagcgagggacatcttcgtgagtgccaaaccaagaccctctatcccgtacctgcaacagttaggaaggcaataactgcaaaagaatcaaatactccagagtgtgggatatcaaatttagaggggccccccaacggagaatacttctgtgacagaataacaaaaccaacagagcagaatgcaaacaactctgactaagaaataactccaaaaaaactaaaacaatggctgctacctccattgtccttgcacaagtttcataaactgaaaagcacagtagaatatttacaaaattggacacccatccactactcttcatatcacatctaagaaactactaaaacaaacaaagtagcaacattgatcaaaacagtaaataaaaagatgttcaagatatagttgtgtattgctacatgtaaatgcaaactcagtcaccactttatccagtgaaaaactcagacagatctaatctagaccatataaatggaagatgaaccatgtgtccatgatattgataattaaaacatgtagtaatcgcagttcagcacattacagcagattgggtgaacctagggtgacttttttttttcttttttggctctaaggccacagaagatcacagtcgcagctaattatgcaaaattgcaaagtgatacaaaatatacaaggaaatatgcatgattcagagaaatgtacactgaccttccaggtgctaagtccaggacgcctgactaattcaggtagctcattagaaacatcaagaagttcaacagaatccccacatctccgtagaatctatttagttatgaaaaatatggtcaatgtcacaacaaggtacacaggacatgaaaacaagtgctacacttgaaaaatgaacattcctagatggtctaatctcaacaaaagttactcccatggtagatttgacacactgaaaacattttagggtctcatcaagtataagtgtatgacaaagaaaaaggcaacaaaaataatttgatcaatcaaacattactacttaatattagagaggggcaaggaagtaaagttaa

SEQ ID NO: 9838 - DNA, 24132 bp, Oryza sativa
  unsure (1)..(24132): unsure at all n locations
tagcgtagcccgactttttttgttgttcttggcaagttggcaacaccagtcatgccgaacaactgttttggcttgatgacgtggtttacctagttagtttaatcctgtttaggacttaagatgctcaaagtgctttcaccaggttaaattatcacgggcaccacctaaccaccaggttttgttgggttaaatttgcttatcaggtttttgacgaatttatataaaaagatgtcctgttcttgcaggtctattacatgttagacctgaacaaaaatgctgaactactgaacttctcaggctgcggtaaaaccatggttcctgtactcgtatactaatttatttgggactttactctatatcaataactgtttttactgcaatctaatactaattctgcttttgcttaagaccttaaaggatgtaatatatctcagttttacctatggacatccaaataccaaattattaattatattttctgttaagcctttatttatacagctttacagctggttacttttaagaaaaatgctatgatttatttctgaaattactgcttgtgtatcttgctgatctaacatgtttaatgactagatacttacatatcacatgatttgttcaaaattttgaaagtgtaattgtttcacttttaagtcttaacggtatgttttggttcaacctagggaatacactgaactgcaaccatcctgttgtcaaggagctcattcttgacagcttgagacactggtatggacaacttgcagctaagatttttctcataaatccaattgtgtgtagattcatccatatttctttgtttcatcttgactatgtcggcattattcataatcaagtgtcaaaaaatatctatatcgatttgagctttcatgttggtatgatcagaccaagatgatgtatcgacagcctaaaattattcaaaatttcctctaggctatagcacatgcttgtagctatttggcttgtagcaagacagttgatatatgagagatagttcatggctatgtcttattgtgaaccttggaaaacaagatagccagaaactgcaacaaaaacagttatttttatacaaataactgaattatagcatgcatttttattttctctttgacaatggttttgtcatatttcaaatgtcatttctaatctccatgcttgttttaatgcatcaagggttgaggagtatcacatagatggatttcgatttgaccttgcaagtgttctttgtcgtggaccagatggttgtcctcttgatgcacctccactcatcaaggtataatgtagatgcagactttaggtttgaacactaaatatgtatggctgcttaccaagcctgtgcagaccgaattttgtttgtctaaataagtgaatttaatagatttcatgtaaaaacaacccgtacgttacattatatggatgattggatgcaaattatgatgtactgaagtactgaacttccagcaatcaattctaatcaactttgcactattgttgattgttttcttgtttgcatggttttgttcattgaatacatatctagtgcaagctcacaggaatgcaatcatgaaaatttgcaatgtgggcagctatataagatacagtatggactagatgtagggctcttgaggttcatttgaaagtttttttagtgacccccctcaaacgttagaaaattgtatttatgacaaattccaccttttcaagaccatctaaatcctaatccatcaatctctggtcatacaactcacgttgatgtatcgagactagtggcttttatgtttcttcatattaatttatttggttgtaggaaattgccaaagatgctgtattatctagatgtaagatcattgctgaaccttgggattgcggcggcctttatctcgtagggcgtttccctaactgggacaggtgatttgaacacttctatatttctataaaaagaatttggtggtatagatgttttatccttgcttcttttaggactaaagatttggtgatacagtaacacaaaacagtaactattttctgttatggataatatcatgctgagatgctcattcctaaagtacttaacaactgaattcttgaaatgagagaattattgctagtatcacttttctcattggacttggcaaacatgcttcattgtgcggttcagtgacctttccctaccatgcatacacagatcagttattctataatgagtttcatttatttttaaaggtatggtgatcatgtttaacattcctcttgcaggtgggctgaatggaacggcaaatacagagatgatcttcgaagatttattaaggtaatatgccgggagagaagattttttagaaaatacagataagaaaaattgtactcacctgcaatttatggtagagatttcatcatggcagtatatcaggaattactgctgaggaataggattgttatgcccttatgctaatctatcattcccttgcctcatccctttctgccagagtattttaattaaccatgccataggatagttattttactgagcatgttaatgaagtttagcttctcactgtacctatatttagttttaattgtccttgatggtgtatgaacattagcggcaaacttaggttattgtggaacagccaatggctaggaaacatggagattttgttaaatgtttaactagatataggatcagtacccttgcaaaatcagtattttatttaatttaatgggcaattctgaagcatacgatcacagttccgcatattatttgagaaaatggcaacatacttttatgcaatagctctgtaccagttgtgtaaagattaccaggttactgaaacataggggtagaattaggtggctgcagtttcccaaactctgatcttggctatccataactccattcttgagccaaatatttagatgatctccttcagaacttgagcataattttttttaaccatttcaaacatcagtgagttttttcaactgaagatctgaatttactgaacattctgcattttatcagtgcttgcctagcatagccatgagaattcttctgtttgtgttcttttattcttgtttctataataacgaccgaatgactgattggatgctgctaaacatttggagttgtttctcagggtgaccctggtatgaagggggtgtttgcgactcgtgtgtctggatctgctgatctctatcaggtccccctcttttagatgttattttccctttactgttattttttatccatttgcttaggatatcgcttgtttttgaactttgatccccccccacacacacaaaataaataaaataaaaatccatttccaaacaagagcggcttccaaagttattgctaataagtttaggtttaattacatgcttgttacttttgtatcactgttagagcataggtcattatcaacatttagcgtgccccaaattctatcatgtcaattgtgttagttcagtaggatttctccagtatccaattgtttaatggatataaatgtattcagggtctagtgacataccatttgatagtgcaaaacacagtatggtatgatgccacctattatttcattttgtgaggatgtgtaaggaacctctgtggacaaatttttaagaactactgttacactgaaggggttcagactcagttattttttgtcaagaaacaaaaatatgtaaaataaaattcacctgatgtggcaggtgaacgagcggaagccttaccatggtgtaaattttgtgattgcacatgatggatttactttatgtgaccttgtttcttacaacttaaaggtaactggagtaagctaagcagtttagttaagatcatttatttatactgtgaagtgtatgctaatctgccttctttttatcaaaatcatatagcacaatgatgctaatggagaaggtggctgtgatggatgcaatgacaactttagctggaactgtggtgttgaaggtacctgctttaccgaatatctattttcttttgtacattgaaatcatgattccatgaaactgcaaaaagatgcttattttcatatcccatcaaattgatacatctgactgatgtagggtactgtaaagatagaaaacttggtcgagtttattattaaaacaaccctttgtatgaattaaaggtatagtcataaagagaatgacatagtttgattttgttgaaatttagtgtcttgtattgattttgttgaaatttaatgtcttgtaattcaacagaactaaaagattgcccctagtagtgaagcttcaatgtcaagatggatccaaatagctctatgagctgtgcagaactttccaaatgcaaccatagatggctatccctctttgaatcagaaataattatttttagggttaattggatccatgccactgcaaatgtggcaaatcaaaaaaatgccacacatatttgcgttatcggctggatgccactgcaaatttttaaaataagaaccatgccactccatcacgatttccgtccaatccgtcacattttccgccgtctccgtcttcgtcctctcgtcgtcctcgtctcgacggcagcaccagcacggcagtacgaaggcgggcgcggatggcagcacggcgcacggcggcacggcagcacggtggtggatggcagcacggcaccggcgacggtcgtgcccgcgtccgctccccgcgcccctccgcgacctcctcgccgacttcctctctctccaccgttgcagccgtcgtcgttgaccatttccgcggtggacccgccgccgttgacctcatctgcgcgggagagctcgggagccgccgccgccgttgctgtcctcgtcgtggtcgtcgacgagccgcaccgcctccgcccagatctggcgaggagggccgctcgtcgttgctgccgatggaggaggcgtcgagcctcgaactccgccgctgttggccccaagctttgtcactagtgctgccgacgcccatctcctctctccacatgaccatcctcggcagcagctgcgccccctccgcgacctccccgcgaagcgtcctcgtcggcggcggcggcctcgctcgcgaccgtcctcgccggtagtggctatgcccgcgtcccctccacggccgtcctcggcagcagctatgccccctccccgacctccccgcgagcgtcctcgctggcggcggtacgcccgcgcccgcctccgtgaccttcctcggcggcggccatgcccctccgcgnnnnnnnnnnnnnnnnnnnnnnnagatcgatggttgtatgttgattggtttagttagctagctagctagcctcgcgcgctgcatctgtagcagctagctagctactccctgagcttgttgggtgtttctgcctgagctccattccgcgccgaaccccgtcaggcccggccgcgaccgcgccgggctgtcctccgcccgtgccagccgtcgcgccagctccccatcctcttctccgttttgccgcgtgaagccgatgcgttttgtcgcgtgcgcctcatcggcttcgactccggtggttgagctgctcacacgcgtccgggggcagcagaagtgagagagagagagaggaggacggaaatcgtgatggagtggcatggttcttattttaaaaatttgcagtggcatccagccgataacgcgaatatgtgtggcatttttttgatttgccacatttgcagtggcatggatccaattaacccttatttttaacctaatgctatgcgaaatgtttgatgttagaattgatgctcttgttctgtaacaggagaaacaaatgatctgaatgtgttaagtctgcgttcaagacaaatgaaaaacttccatgtagctttaatgatttctcaggtaaacattgtgaagtaacctacagtttattttatgtgtgcatcatgtataaacttatcacataatcaccattttcatatatcagggcaccccaatgatgttgatgggcgatgaatatggtcatacacgttatgggaacaacaatagctatggacatgatacttgcattaataatttccaatgggaacaggttgcattaccgtaactattttagttttcaaccaggaatatgtttatgaatttggcagatctatatataatttgttttctccgaatccatgtgaatatagttggaacaaagaagagatggccatttcaggtttttctcagagatgataaagtttcgtcacagcaacccaatattaagacgagacaggtttcttaataaagtaagtaatacctagaagtgctatcattgcaattaactggtttattgaagacaatcatttcatcatcttctcaaaaaatagctgctggtgtctgtcgaaattccaagtatattttctcagtcaagtctgattagaatagtataatacagcaaatatacactttgcagcttttgcagttgcatctcttagtttttttttcgtctcaaatgttcttcattgtattgtgatcttccttgttggtagaacgatgtcacctggcacgaggattgttgggagaaccaggaaagcaaatttttggcattcacgtaagtttgttgatcactttcgtttatgcaccttattatggtatttgtttatgatgctccaaaatccaaattcttggcttctgactttcattgccattttactgtagagtacatgatcacaactctggtggagatatctatttggcattcaatgcacatgactattttgtggacgctgtaattcccccaccaccacaccataaatgttggaaccgtgtggtatggatacttttcagcattgctaaatttcttacgtatagtaaagtaaattcctacataatcctagcatggtgtggttgtaatttctaaatatgtagaagtgctgccagtactcattctgaattttactacattagacgctcggacaaataccaactcttaaaagaagatatacaagtttccacaaaatttctcaggaatagacataggtagtactgatacagttctacaaccaaaagctgtatacggttgttacttgtgctagcaatcctgctaaaactggtttggagtttattgctcattagctacttttaatttttacaatgattggtctggctggatttgatcactcttttctcacacctttccgctcctattgtcattctaaatctgctctaataatctttttgtaggtggataccaacctggaatcaccaaatgatattgtaccagaaggggtgccatttacaggaccaaaatacagaattgctccatactcttccattctgctcaaggcaaagccttagaaaagttagtagttgagagcataaaaataatgccaccaatgctggcttggttggttaataacaggttgatcacattagcagtctgcacttcaaaaaggcaacaggtatagagaatgtctaataacaactgccgaatcatagttggctttggcagatgaggccacttttggcattcaggaatttcttccagttattactgtaggaatgaatgggctagggcttagggccctctgggggcagcaaagctcgaggtgtcgtctcggtttcatgtgagcgtgacctggctatggtcaccctatcatttatcaaggtcctgtttcgtaataatgtgtcatcaaacactcaactcccatgagaatgtatgccagcatctattttgctggaaattcatgaaaaaaaggaacaatgctattagtcccatgaagtatgaacatatgtcagtgtgtatttcttgcatgatgcagaggctgcgatattctgcgcctgcacctcccggtacgggctgcggcggcaggctcccgactgacggcgaccccggttggtacggagggaaagcttccacatgtgcaacggcggcaagctacagtgttcccaggcaggcaccaacctgttctccaatgcagccaagagaagagccagcttcgacttgacaagataacatggccatttgacagagctgggccagccggtgctgctcttaaccaaggcatgtgaaaggttaactcgcctctcctgccaatctcacctgaatatcaagcgcctacagtgcagcctgagccaggtaaaaatccctcctatctcaatcattgtcaaccaccttctatcagctaggttccaaacagaggggaaggaaatgaacggccggtgtacttagctcagctgtcctgttgctgaagggcccagaccctgggggtgggacatactactcctttgcaagctgtgggctgtccttatgatttgctagttatatatgtcgaagggcagccgctttattagtgctaaccaccttttagtttatggagtatggaatttggcaacctctttaggaaaatattcctaatcattcatcaatgaccaaggaaccaccctagtgcataattatgtcagtctggtttcccaactggctttcagggggaatatataagtccttcataatcataccaactgctaaaaactttacactgctagtaataaaattgataacaagctttacacagcttaatttgctggtagaggttgaaccctgtctggtggagcccggcctgaggttttaggctctagaaaatagcttaattaggtaccgagtcaaggtgaagatagtgtggttgatccaaatccagccttgctccctaagttcctcaaaattactaaccggcgccaagcagctgaactcaagctttttcaataagaatttagtgaggtatttgaggtctcaatataccttatgtcagatagctgccaagaaatacaagcaagaaaacataacatatgcccatgcatgtcacaccttcataactccaagtatctagattcggtactattccttttgaaatactcgaaccacccaacgaattggttattcctaaacaagtcatgaaaggaatgacgaacatacggataagatttactatcaacctctcttttcgcgttttgttaggggcacactcacagtcacaattcatcttccgtataatcgagaaagaaaaaacactatgcaaatcactaaatagagcgactcaacatgcttggggataaagatactctagtgacctgtatgctgacctctaccagactctaacatccgccgtccacgcgtcatcgccgaaatattccaactgtaccacaccatatacatacatactacagtcaggacttcatgggcgtacaggccatggacaacatgttggcacaacttatatgatcttgcagagactttgtggttgtcacgtagccggctcggcgccacgaagtcgtacgttcacctggtaggatagttggtacatcggtgtcacgtagcatgcactggacatccctgctggaatattacaccctgggcatagcccacgttgatagaactgatcgaacgaactcgtgcttttgaagatcgatctgctgttcttaatttggttgttaagttggacagattgcgatgtcgatcattccatggacgatattttcggatcattctgaagaatttgttttttagaaggatcataccgaaacatttgtagcaactcatcatgtgcgacaacaataaaattgtgattttgttgtcgaatccggaaggttggaagcgatgccaaattgcgcgtgatgttcgttgctctgaaatgcaaggtttcttgcaacgggcctgcttggaataaggacgaccttacgctgctcaggaatatgaatattgtgatggagtggaagtttaggtttagtatggttaggctggaaatcactgaaattatcttgtggatcaagttgaacattgtgaaagagtagagttttaggttctggaaggatttaggttggaagaaactgaataacactctataccttcccttttttgaaaagcttggatatactatatactttatgggttgagttgagttttgtgtgggagtggaactaaaggttttgggagggttcggttaggttggaaagtggaaacaactgaatttatctttgggatgaagtttttagtattgctaacacaagaaatgttatgaaaataaatacacagcagatacatgattcttttacatgggaaactcttacgaaaaaacaacacgtaccaattagcaatcatcattatttaggagttggttacaaatgcatgaaaataattgtataacaacactcctcccgtacaacatacaagaatatatataaagaaaaaatcaattataattggtaaagatttgaagttctattaaaaaactaatcttgtagtaccactgttgtaagaacacattcttcataaggggaaaaggaactttttaaaatcttggtgaacacaaatgagaatagaagaacttgtaaaccaatcaaggtgcatgtgtcaacttggttaggaaagtacattattgggaaataagtttggtactagcaagatactcaattccttcttttgaaatcttgtaggagtatatgtcggtgtgttttgtgcatcattttgttctctcgaagaaccaaattattttgagagaagggcaataacaatcaatcatctacagattcatcaaataaaaattagagaatgcatgcaacatggggcttcattgattagtttccaagccaatcatgtcctttcaaaggatttcgttaggcaactaatcttagctgggatggtgccatcataaactaagcaaaccttgactgttttatgttatctgcgagcagtagcagtcgtgccagcaatttgtcaagcctggttagtctcatgaatgtttttcccgatattatcagtataaagatttgttggtatgaaaataatcattcaggctttccactaaaacaagtgttggatcaagatcatgcatactactataaaacatgcgcactgtttgcccctcatgaaatttgaaaaggtccacctattcgtactagaatatttcataatcggccgtgaaatttgatgaagtccacatattagtactcgaatattacaacaccgctggtactataatctttcaacgtttatcatcatcaaaaaggaaaacggtcacatggctatacaattgacggtatgattttttttaaagtttcgacttgtaaattttctttaaatcattggatcgtgttgagattcatggagggaagggaagaaaaattcccatgtcacttgtgaggctaagagtgtcaaaccagcaacctcataggtaaaaatgtgcctcgctagccaaccggctacgcatggtttggtttttgtttaataatatgagagttttgtagaacttatattgtaattataatatatttacaatacaattacattatgattattatataaatagttacttttaaaagtttttcacttgaatattatataaatagtttctttatctaagcttcaaaaactaaaattaggtccgaccaaacgtttagtaattcacccatattcataataggcaaccccaataatcacgcaaaaatatataaaacaatttttgagatagaaaacatgtgagaaagattttctacaattttgaggagcttccagcctcatctttttcttatacttaaatttgactttttaatcttagatttggagttaattttagatgttttttcatcgtagtttattttttaaactttgttttttgtttttagatcgctaaaaacagtatataaaagttttatatacaaattattttttatttgtaaatatactgtttggcttatacccccaataatcccaacgatggggccgtaacacacttgggatgattcggatgaagcttcctgtctccaggaaaagaaaggtttaaaagcttgcaaaatccaaaccgacaatctgcaacaaaactgcatctcgaccgtcaaattccgatccaacggagagtgttggaaaattagcactaaaccccctgataatacctgtatttttcatgtagtaaaccacatctcctacagttctacttctttataagctcccctacctctactgtctcggacaccattacagtacaccacctcaagctagtagccaccttctccccaagcacacactctcctcccaaaccctagcaccagctagctctctcactctactccaatggcgcgcttccagatcgtggccttggccatggcgatgctcttcgccgccgcatcagctcaggccccggcggccaccccgacgcccgctcccaaggcgtcccctcctccggcgacgccgccgccgacgcctgcgccggtgtcagcgcccccggctcaggccccggccactcctcccccggctccggctcccgcccccaaggcctcagctccggctcccgcccccaaggcctcggctccggctcccgtgcccgcggccgcggctcccaccccggagatcagctcgccaccagccccgtcaccggcaggcttggccccgtctcccaccgccgaggtgacccctccccccagcgccgccgccggcgtctcccccgccgccgcgtgggtcgccgccgccgccgtggccgccgccgccgcgttctactgagatcgaggctgatgagatccgccgaccacctcattaatttattacccgtccatcagagggacccaccattcctcctcctcctctcctgatctcctccttttccttcttcatctgtggtggtggtgttgagctgtttattttatttctctctctatcttttttttcttccatttttttgggcattttttttccattcaggcattcgattcagtaggtgtgtgggcgtgtggcgtggacagattggttggttgggttggtgttgtgctgctcctccattgtactatacatctcccgttgttcaatattcctttcactttggactttttactctcttttattttccccaagcgcactcaccccatttttttaatctttctccattaccccttgcagcatcatcgtaccagcagatcagatctttgagcccccgttttcgttgggttatgtacacgtactgcagccgatcgatccgttgctgtaccgatggatctgagctgatgatgcactcactgtgctccagatctggtcgatctcctttaatactcccatctaaaaataagaggaattattggtacgtacgctggcccagtatttcacagcatttccggtgggattttcgctcagctgcgtcgatcccgtgaggtgaaaaggcctgtagctagccagctggggagcagcgaaaggcagcgatagattacgggcaccgggtcggtcggtgggggcgccgcacgatggcgagatgtcgagacgaggcgaggcccgcgcggcacgtgccggtggtggtgcccgatcctcgcggcagcgacagcccgcagacggcagaggcggaggcgcaacgcgagcggaggcggacgcgacgcgacgcgcgcgtgggtttcccggtgtttttgctgtgttttttctcccgtccttttcgtgcgggcggcggtttgcgcgcggtgccggcttgcggctttatttagctgtaggcaagcaaaggggggggcagcgtcacggacggctgcgtgcggcgcggcaagcagcagcacagcagatgcaacgcggggtcgtcagctgtttaggtagttcgttctctctccttttctaacttttactcactcacgtccaaaaaaaacaatcgatgtgaatgcgatttcagtttggttgtactagctaaagtcacatttttacctaaatagttttatttatttagggatggagggagtactcgttagtttttcacacgcacgattctccaaacaatctaaataatactccctccgttctaaaacttaggtggatgtgacatatcataaaaccatgaatatggagaaacaaaatcccttatattttaaaacgaggtgaatactttcttttaaaagttatttatagaaatgttggttgaaaaaaatcatattaattaagttttaagttttttaagttaacttctaactaaccatgctgtaattagccacccacgacaagtgtaatcgaacacagccgcggaacggcggaagcagagtggtagagcgcgcggtctgatgagatgtgtgatccgacgacgatggtacaaacgactcaacgagccaggttggtggtgaaagggatggtacgggacgataccttggtacgtgtgcacatgccatgccatgtgtgtgtcgtgatcgctgttttctactatcactactgatcacgcaaatgatttcggaggaagggaatgctgtgcagggcaaccaataccatacatcatttcactagctttggcttctgcccggttagaatccgggatccaactgtgccgtcaaattcatgcgttccaagctaagtaatgcccttgtttttgcaattcatgggctaatcgacgttgaggggaatgatgccaattgtctggctgcctgaatgcgatccacccacgccatcttttttttttgtgacctgacagctcctcgccttttagtgcgagcggtccttgtacgctcgctttacaagcgtaatgcatttgcttaagctagccacacagctcggacgcaacgcagggtgaccttagctagcatatcacgcgttgctgactttggagctgtaaagaaacataaagaagcagctgattggggaattggctttcctgccgccaacgacgatctctctcacattctcactcagtgatgagggggggggggggggggggagagagagatttcagcatgtgatgagcattatttcagcgaaaccaccgggctgtgcgtgtagatctccctttttctagcttcttcagcctgcacccacgaacacactgaaattctgaagctgagatgggatttatgggacgagaggtgcagctagtagcagatgttccgttctgccgtgagattgaggggcccacctgtcggccgccgttcagggtgggccctgtccggaacgtgtgacccatgtggcgatgcgatgaagggagaaagaggggccaggagcatccaaggtggtaaggctcacagtacatcgcctactaattaacaggccgtgtttacctttggtggttcgatgtggtaaacaaatggccggccgtccaggagagatctgaaagacactgggggaactgatgcgaaccatctttcagagtttcaggttctatcactaacgcttttccagaaaaggggtgacaagaaaaggcagagtaaatgttgccaaattggtgatcaggttggtctctgaatagacaaatcttggatgtcctttgtctaataaaaaaaaatctagtttgaagttagggtatgtacaatgctccagtctgatgtgtggttttagcttggtcacgtaagcggtgagctgccttagaggagagagagagtgtgtaaaactagtgctttaagccttgtttagattaaaaatttttggcataaaacgtcacatcaaatatttagacacatgtatggggcattaaatgtggggaaaaaaaccaattgcgcactttacatgtaaattgcgagatgaatcttttgcgcctaattacaccataatttgacaatgtaatgctacagtaaatatttgctaatgacggattaattaggcttcataaattcgtctcgcagtttacagacggaatctgtaatttgttttgttattagtctacgtttaatactttaaatatgtatccgtatacttaaaaactttacacccaaaagaactaaacacaccctttaaaaaacaaggttgtcctggcttgcaaagatacaacacgagcaaagacatggctcaagcaccatattcggtgaggctatactcttcacaaacccctcccttccgagtagcggtggctagaaaaacgtgacacatcaaacgggattgaacaagagaactagcacggtggaggggagaaaagaggggcctagttggtgtgtaccacgatcggctcgttggcgaggtaacacattcatcgactatgaatcctgaccgtcatggatcttgtcagcctaagtcgccatcagatccatgggagagagataagagagaatttatacataaacattataatttttctttcttgaaggtcataaactttgtaaatttataaactgcaagagctgtgagcacaacggctgtcccatgcgtaaaaatatcaattttgctatatctcactcgaaagatttttttcttatctctcactcgattttctcactcaaatttacaatgcattttcttgtaaattacagtgtaatttatgaaacttgcactgtaacttttgtaagttacattgtaatttttgaatcttcgcatgtaaattttaaattttgtattggatttggtttttttcttgaggatatggtaatttagtgtccattaaggtgtttcttaattgcttttttctttttattatatctatcggattttaatccaaagattaaaaatccgtgtgatacgatcataaaaatctttcgaaagatgtataggtacttcctaaaaatatttgtttcttttcatgtctcactggtgggcttacaaaggctagcgttcatacaactatacaaggcctttcttttgggctttaatactatattaggtccatttatttcttttattgcgctcgcagtaatcgtacaaggatctggcatatcagcgtatggatatggttgcatttgctacgagtttttcatacctgaacctacgactaatgatcaataacctgactagacactactttccttttccctttgcaaacctgaatgaagattcatgcttacagttcgtagttgatcagaattaatgcttctgaattgaagttctgttccgtcccctgtaacttgacgtcacgttctatcttagccctatcttttgagagagttggcgatgcaagcgtttgccagatgacgaaaagcacaagagttctctgaggcaatctagggcaaattgggaaaagcaggagccttttgcagacagcattagagacttctaatataaccacgcgtatgcatccaacagaccggttcccctttcatcgttcatgccctcgatttttctttttgtctgtgattctacttttgccccaaatgagccgcccaaattattctcacctgagaaaaaaaattatttcttctatctgcaaaacgcttatgtcactcgacatatataggcattctttttcttactcgacatagagaattttaagcttgtgtgtctatatagtaagtattcctttcattcacagaagttacacctattacttttgtcatcaagaccaagaagaaattaatcttagatgttataaaatcaagaagtaaatacaaacatacaaccaatgagtatttagatgactccttgggttctaatcaaacatttaatttatctcttcatttaagttttgaatatataaagactaccaataggaacaatttatttcaaaaactcaaatgtgaaacatgtctaacttttatggatggagggaataggttgtaaggcttgtaacctatcgattttcattttttcaaattaggatttgctatttgacaaattgatagtgttgtaggccagtacgacactaatctaccgttcaaatcctacatatatacccctgcttttggcacaagtgggtgtcttcgacatttgatttttttagttcaaaagtttatctttatattagccaccatgtgtgttgagcctatgagggactacatatgcatgcgcagaacatggaattttactgtgcatgtacatcttctatctaattgaatacagtttgctctttctgaatcactttgatgttatttagcataggaaagcatctacacactacactgcctgacaaaagttatatatttactgcaataaatcccagtaaaatggatactacgcccctcatgcagatccccccccccatatatatatatatatatatatatatatatatatatatatatatatagtttggtgctccatggtgcccgggcaccattgttgaaattgagtatatacctaattcaaatgagtatgaaactttttcaattacttagatattaacattagctactttactaactagttcaaagcaagtttgaactgaatttgaacttgtttttggtagattttgattttaggtatatagcatctatacatataattagttaggtatgtaatcatggattgtgaaataaagttaaatttgagttgttttgttgataggtataggtatgaatcgagttattataactaggtatatactcacaatttgaaaattttgaaaaatttgtgtgattttgtatatttgataccatggtgcccgggcaccatggtgccccatatgagtgtcctatattatatatatatatatatatatatatatatatatatatatatatatatatagagagagagagagagagagagagagagagagagcttacaaaacacttcgcatggcattgttcggttctaggttgctaccattcacatagcagcattatttgagcaaactcttttattgcatgccaacttccaacagcgaaaatatgttcctcgagcataaatacttttttttgccaaagaatgaaggttgggctttccttctgaattttagggaaactattttgattcctcgaggggatgcctaaaaaccatttaaacggttataaaaaattctggaaacatttgacaacactcatagaacatatatatacaacttcacaaaatcttaattaagtccaaattcaactcacacgtcgagatataaaaaagacaaattcagcgtatgaatagtagcgtactgtttatatctgaatttgtctctttttttttctcgatgtgtagatcgaatttgaacttgattttcggtggactagtagatatcactgtactctatattgtcaatttttttcagaatttttcataattatttgcattgaattttaaagaaaaagatacacgagtggacatccactcgagagattagaatccacttgtgttcaacccagtggcggatccactgttggggctggttagtgcgccagccccacctccaatccctgcatccaatcagctattagcaattataattaatcattaattagtgaaaaattggccggcggcaaggcaagctacttccctacttcttgcagccaaggccaaactggcaaagacagatatattttatttatagatcattcttagtagaccatgaagtacctatttattaataaataaatttctttagatattttatatagccacagcaagttgaaatatagagagaagtgtgttcttattcattcatgcatttgcatatttgggttatatttacaaaatatttttgttgatatagttcttgtttgtctcaatcatactgagtttttcatagccccagctcattttgcatcctggattcgccactggttcaacctcagttaagcatagaataagggcctaggggcacactcatgcgcagggttttgcaatgccttcttttaaggtgtgaaaaccggtcgttgtcagtttgcttaaaactaagcaaaatccgatgatttttggttaactctgtaagagaatcagccaaaaccgatcccaaacagtttcataaaaatggtgtggttttcacgatttctgatcgatattgcgatggaaccatttcatttgagatcatgtctttcatataatagaaaaataaatataatatcttcaaagaacacaaatagtttgcaacttggcacttaggtgtgttggacaagcttgggcatatataattatggacacaggaacctattttaaattcgcgaggggacatctatcacctcgttgtttgcatgtcattctgatggttatgaaaaaattgaaaaaaaatcaacaagatacttggttaataagtgttaaataactccacaaacatataagaccaaatttaacttgtgcaagttgcaacgaaaaaaacaaattttattgcgaatatacgttaactagccatagtttaatttgttttttcgttgaaacttgtagaagttaaattttaacttgcgtgtttgttgagtgaattatcatatactaatatgttttgttgatttttttttaaaaaaattcataaccatttggatgtcatgcaaataacgggaggataacccttcgagagtttagaacaccaacggtaaaaagacgtgtagtgtgatttgctggaggatagtaaagggaaatatttattcttaaggccttatacgtttattctcataagaaagggattatatagaattgcaggggatttagtgtggaattaactaatccccttgaaacccccttaatctagttgggtgactgaggattacacaaacaaggcctaacaaggaatttttttttagaaaatgaattaaaaatctggcttctacattcacttggatgtatacacccaacagggattcaactgctggaacaagtatagagagcaaaggctaaagttgaggggtcaagctgtgattacaaaggtcaagtaattaaacttcggtatagttatacaaccacgactataccattaccaccagcatgtttttaacatgcttggttttatttatacccaccataagaaatttcaccaacacaaaccatggcatgcataaccagagcccccagacacgacgatacaccagtggcacaagcaaatttagaatcaccacaacaaactaaggtgattactacatacgagttgcacggtgaccaaatcacacgagaaacgagaagaaacacggtcagcttcattgcacgagtcaccaacgtgcaacggccgatcgacaagaacctgcatggcttccacgcactgtctctaccctggctcgcatgcaccgcggccatcagaacagcgcgagcttgatcagggcccccgctgccgcggcggcgacagcgctcgccgccgccggcgaagaggcggcagagtacgacgggtcaccgttgacgttcacggcgagcttcatgccgctgctgcagtggccggggatggtgcagatgaagtagtgcatgcccgggtaggagagcctgatggtggtcgatcccccgttgtcgttgctcagcgggctgttgccgttgcagctgtcgaagttggtctggctcacctccgtcaccgtgtgcgccctcgcctggtagttgaacactgcaccaacacatgtgttttcccagcacgtaggtgtgtgtgagactgtgagtatatgtgcaagcgactactccctctgtcccataaaaaattaagctagtactgaatgtgacacttactagtactatgaatctagacatacatatatctagattcgtaatactaaaatatgtcatatttgattctagattcgttttttatgggatagatggagtatgtattagtgatgagagaaagctgagctttgctcaccgagttcgtctccttgtctgaaaaacttgccgttggcccagttgttgtagttgacgccggtcgtccagccctcgccgtcgccgacggtgtacctcgtggctgcggccaccgcggcgcaactcacgacgagtagcccaacgagaacggctgaagagacggccatttgtccaatgatcagaaaaaggctcgggaagagttgggttaggcacttggagggagagggagataaggatgtcagatgaccaatctcagctatactgttgctgctgcacatttgcccggaggttgtaggcagggtctatttatacgcacggccagagaataagtcaagtgacaaagtacagataaagagttggccaatgtcgaattgtcaatccccttttccgatcggattctttctaaaaaccactataaatttgctcagatgtgaaaaaaaaaagtaattggaatgcctttggtgcaactcaaagcttccaggaggtgcagagttgtttcagtagctggtagcattccctccctctgtgcagtacacgcagagtcacacccccgtcgcattattttttccatgataggaacatataccacatttttctagctgcaaataagcttttggacaagcaatccatgtatccacggatcggcaaatgaaaactgaaaaggagatgttacgcagctgaacgacgctttgctggctgttcagggaactgataccaaagcgccagagatacgatcaaacaaagccatggatgggttaggtgatgtctacggttagctttgccgcagctctctgaatgttccacacacggtgatgtgtctctctgcaggacggacgggcggacgggggcagctcgatcgatcggatatcgagcatactagcagtagtccagcactgtttcactttcgcggtttcacctaatgcgctgaccggcgggtgagtggtgcagaggacaaacacgccggaacgccaccgggtgcaggtacatgacatcacggccggctcacagcagcgacgctagataaggactcccgagctctacggacaccggtgcagctgcaaccactgcaacccctagtacagatatacttgttaccaagattcttgtgatctgtgtgtagtatgtacatcagcaatggctgctcgctgacgctcttatcggagacggcgaaactttcgccaagatgtacgggttcgaaaggacaatgtgtaacacagggttctgaatttctgatccccgtcaacctcgccgacgtaaggggggcggtggccatggcgaacggtgtacttccgctgacgatggatgtacttcgatgtcttcgtcagaggacgactctgcgtatctccggcctccgaccggtgccgcacgccttgtcaaattgaccggcaggagctctggctgccggtctcacgggatgcgatcgatgacaagggaagacatggaggtggtcattcatcgaaccggcgggtgttcgccgttcgcggtgtcggttaggggacacatggcggcggccatggtgagttggtgggggagggaggaagacacaattgggttcacaagcgccgtccgatcgagcttccatggccacgatggactctcctgggcattctttcagttagacaccttagaaacatgttaaattggtacccgtagttttggatcgaccataatagttgggccggttgcatgcggcccttgaacgtggattaagacttggaaaaggtacaccgaaggtccctcaacttgtcatcgggattaaaaaatatcctcgaaccgcaataaccagatatacggtgtcccttaactatgcaaaaccggtcaccagaggtctttcggtggttttaacccagtgttggtctacgtggcggctgagtcaacacgggacccacgtgggccccacatttcaggtgtccacgtcagcgtcctctccctctttcccctcttctctcccttcctcatctctctctctcgcttctctgcaagttgacaacgaacagatgggcggctgccggcgaggaggatggcgcgaccggcggggagaagggtggcacgagatggccaactgggacaaggggaagggagaaggagcggcgccggcagccgatggggacaaggcgaccggcggggagaaggatggcacgcggtggccaactgggacaaggggaagggagaaggagcggcgccggcagccgatggggacaaggcgaccggcggggagaaggggcggcgcgcgggaggaggcgggctgcccatgacagcgccgcggccgcgtggggcgttgcctgcctccaccgccgtccgccgcgcttccgcttccgctccactctgcttcgctcgcacgccgcctccgctggccgcatcctcccgtccgcactctccgccgcggagagatcgagtgccgccacatcctcccgtccccccctctaccgactccctcctcgccgcaacctcttcgacggagagcctgacgaggccaacgggcgtgaggcgggagaggagatccggccgacgacgcggtgacgggcgaggccgacgctggcgccagcgccgcctccgcctgagctcctccagcgtcgcccaacaacatcgccttcccggtggtcagcggctcggtggcctcgtaaaaggcgaagtagagcaataccaccgctgatgcggcggccgccgaggccgagaacgagacggccgcgaggtgggcgtccagggagatgaggagggagcgggagcggcggagtccaaggagcgtgagaagaagaagagggcatcgcccacctcgaacagcgcgacagggatgcggatgg

SEQ ID NO: 9839 - DNA, 124445 bp, Oryza sativa
cgggagggaaaagggaaaaagggggagagaacccttgcctccttgccactttgggaaaaaggaggagggagagggggcgacgcggcagagggggggagctctgcctccgtcccttggaggcacgcgcggggagaggcggggccgagtcgatgacgacggcgatgacggcggggcggtttggagtggagcggcgacacgggcggcagacgcggggcaggcgcggcaggcgctgacggcggcggcgactggccggtcggccaccaaggcgcgcgcgcgcgcgggcggcgcggcgatttgggcggcatcggcgggaacggcagcgagagcgggagggagggctcggcgcggctcacggcagagcgggcagagagagagagagagagagccggggagggagggggagatgggcctagagggattcggcccatcgaacccgagggaggcaaaatagacttttgcggaggaatttgatttgggaaggatttggattcgggattgaacttgacgatagatcggggatttgagatctgagatggcacggacactagacaacaagcaaagaaacggatttcgcaaataggatttttaagagatagttttcccgctaggcgccacgacggaacgggcgctacagggcgcaagcggagaggcagccttaagcctaaaaaaaataatttagggaccctgccccataatatacatcagtataaatattagttatggtccaataaaaattaggagctactgtacagtatacactacagtttttttaataaaagacttttaaatataatgtagtataatttgagattatattgtaattataatatgattatagtgtaacttatatgtagttgaataaaacgttcatgcaaccggttggctagcagcacgacatccacctcacatgttgcatgttcaacttgtacgtattgcacagattttttttcccctctccgcatgaatatcaaggtgatctgacaatcataaatctgaaggttttggttgaaaaattgtcgaacatttttaatttaattatcaattccggtaaaaatcatagtaaggtattcttgctcaaatcctagaaggtgtagccatctagtattttttttcttctgcgcatgttccccagctaattcaggggacgttgtgtttgtgtccgtggcggtgcataccacatgtgtctcgctgcccggggcaaatctaatgtggattaagcccccccccccccccgccccaatttcccaccctgttggatccctatggggaggagagaaggggaggaagaagatcaacccccctccaaaacctaactagacccaccataatgatttcattgccattttttaatattaaaaaaaagcatgctgcttttataataaataaaatatgcttctctagcttaatttagtcttgtccattgaccaaacgtcgcctcaagtcacctgcacgtcaagggaccaaacaaaccatttccgtgcatagatgaccgactctatagtagtgatatgagtcactatgtgcaactagtgaggttgccaatgcgcattcaaccatcaagattgtcaatattgctccctccaaaaaaagatcgtcaaagtagtatgttttcacaacaagaaaaaaaaacagatacacactaccatataagtgtttattctttttttaataaagaaaacagtggcagagttcactacttcttggtctaataatacatatgcaaattccacagtacgtaattggttgcttctcgacatgtaatggttcaacacctgtgaatggatcttgctccggcggtggctgttgccagatggatgttccaggacacatatatagttatgatggttattttgacgaagattacaatgatagcaaaatatggaggagcagcccttgcagctacatggcggtgatggaggataaggccttccaatttagcaccacttacctcaactccacggtattcaacgacacgtacaaagagggagttccagttgtgttggactgggtcataacattggatacatgtgagaaggctaaaagcaaaaccacttcctacgcttgtgttagtacaaacagcatctgcaatgatgatccgagtggaggttaccgttgtaattgttcacatggatatgaaggaaacccgtatattaaagatggttgtgaaggtaccatagttactttttcgttattcttcttccttgatatgacaatttcaatcaaacttgcaatggttgcttgatttcagatatcaatgagtgcctcgacaatgttacttatccttgtccggggatatgcaataatacaatggggagtttcacttgctcatgccaccaaggaaactatatggagaatggcacttgcataccaaatcggaagtccggttttcttgcacttcctatagtaggttggttcccctcttccgtaatcactagaactaatgataacgccaaccatttgtgcacaccaatatgagaattgttaatatataaattttgcatgccttactagtcattacacatggctagctcatggatcttccataattccatatcttaggccaatcccaacccaacacactagacatagtttccataaactccacatcataaaaaaaactagtacaagacactgctctttcaatgcaaacaccattgtttcatacttagatttaatgctacttatctcatatgatgtcttggatgttgtgtaaaaaccatgcatgtctcatgcaagacctggtttccttttctttcctcatttattcacttgccacatcatctttcatcctaggtggtagcttatttaatgctatagacaccattctagtcattgggttgggactggccttactagtcattcacacaagcttttatgattgtgtaggcacaagtgttggacttgtcatcctagtgatcaccataacttgtgcatgcttaattcatgatagaagaaagctacagcacatcaaaaatcaatactttcgacggcatggtggcctgctactatatgaagagatgaaatctaaacaaggtcttgcattcaaaatcttctcggaagaagaattgcaacaggcgacaaacaaatttgatgaacatcaagttctaggccaaggaggcaatggaattgtttacaagggacatcttaaggacaacttggaagtagcagtaaaaagatgcatgacaattgatgagcaaaagaaaaaagagtttggcaaagaaatgctaattttatcccaaatcaaccacaaaaacattgttaaactattaggttgttgccttgaagtggaggtccctatattggtctatgaattcatcccaaatgacacactttaccatctcatccatggaaactataatggttggcacatccctctggttactcgcctacggattgcccatgagtctgctgaggcacttgcctacctccactcttgtgcttccccaccaatcctccatggtgacgtcaagtcgtcgaacatcctccttgatagcaacctctcagcaaaagtttcagattttggtgcatctatcctagctccaacagatgagacgcaatttgtcacactagttcaaggaacttgtggataccttgacccagagtacatgcaaacgtgccaattaacagataagagtgatgtatatagctttggagttgttcttctagaacttcttacacgcaagaagccgttcaatcttgatgcgcttgaaaatgagaaatgcctgtctatgaggtttctctctgcaatgaaggagaataagctcagtgatctattggatgatcaaatcaagaataatgagaatatggggtttcttgaagagattgccgagttagcaagacaatgcttggagatgtccggtgtagataggccatcaatgaaggaagtaagagataagcttgataggctgaggaaagtcatcgagcatccatggacacacgataacccagaagaattggagagcttgcttggtgagtcatcatgtgtggtcatctcagaggttgagagtacaggaaattttagcattgaaaggaaagttgtcaagggtttggaatcagggcgttaagcagtactctctctggtatagcttatgtccaatcctattgtgatttatcatagattccttgtagagccaaggaactcttactcatctatgtcaattatttgtgtaaagttgagatcttgtgaaggcaaggtaattgtatctgttagaatatcctcctggtatcactactcttggtagattgggattcaaaacatgtattaactttaagacagatcattcatctctcttgtagatgaaaaggaaagttatacaatagagtgtcaaatttaagaaattcttgccaaaggtaatagaagggattgcatatttgtgttggaacaaatgagtaattctttacatgagtataagagtgaatagaatgtgtgcaaaattatttgttgtatgaaaaaaaattggtgaagtttctctaataaaagaacttttagtcttatcaataattaaccgctctctctagctacaaagatgaattatggcttttctatatttatttcttttagataatatgcttctcctattgatgaacaactaatttctcattgattctttgtgtattaacaaaacaattaaataatgcatcctatcatttttctaaagaactataggctatggttttttaaacgctttgataacaccttggggacatttatagatatcactatatctttaattggataggcaacatcgcaatttcagaaatcattggctcatgaggtagatagaaaactcaccacaaggaaggaaagaaacttaaataattctaagttatacctttgaacggaaaagaggatcaataataaaaggaaattaacaagataagaagcctaacaatgatttgtctatgtatgtatgcacatttttctctagtctattatagttattaatgcattgatcataaacgaatatcttgttcttggaagcaaaacagtttaacacgtggcgaacactggaggggtcaaaaaaaattgaaaaatccccaaaacgcaggaatctgaccgaagactactaggtaagtatttgcattggtagaatgaattgtagattgtatagtttatataattgtattggttgttttggtctagtatctgaagttctgaactgaaaacggccagaaaatgtgaagggtggaataacatagtctgtgcttagaatttcagagttaaattatttataaccatgcctacatatcttttacaagtttatccagtcggtaattgttgtgccaacttcttgctcttttttaactgcttacttgccacatactccgtccgtctcataaaaatcaacctaatactggatgtaatagattcgtagtactatgatatatcacatccagtcctagatctttttcgtgggacggagggataatagcattccaaagaaagagaaacggatgcttctatggttgtttttcctcctgagtgacaagacgggttgtttgggcagccatgcacgcgaatgaagcaaccttcaaattcctctttaatttctaccactacagaacaaaaaggatttcaagatcaaatctggtactctctccgtgtcacggactcgcgttgggctagacatccatggtggattgtggcctgttaggcccaatatgctacatcaagtaattactacaaaaaggaaccaggcacaatgggaaggggatcaaagaatataagaactgaagcctattgcctggctgttccctccctcttgcttcttcccaaatcctactctatttcctctgatttcctgatctcctttctaccaacccaatctcctgctattccttgtctaaactcttctttctctctgttttgtatatgaatatttcagtggtttgatgctggttttgcttgtgcttacttgaggtgcttacttgaggttggcttgatctgtcaaaattgatgttggaacgtaacacaccgtcccgatataaatacagttgtaagtttccgtatttaatatttgactgttattcttatttaaaaaaattgtgattagtatttttattgttattagatgataaaacatgaataatactttatgtgtgactatttttttataattttttttaaataagacgtatgtcaaatgttaaataagaaaactcacatccgcacttaactatatttagatgcagccatgcaggtagtacattttttttgccgtactgctcccctcaggcaagagcattgaaatgtacaatgtgtcaacaattcgttagtcccctcaggctgtgttcttctccctgttttttcaacccacatctctcgttttccgcatgtatatttttcaaactgctaaacggtgtgatttataaaaaattttctatatgaaagatgttttaaaaaatcatattaatctatttttttaaaaaaaatagttagttagcacttaattaatcatgcaataatacgaattttattttgcgtgctaggaaacccctactcctgaacacagcctaaaacagagtaggatatgctgagtattgaacgtgcccaggtgcgctacttctatacacgatgtcgtgaaggcaaatagctgaagcctaaatgcatgaatggccgccaccaccaccgccaaccatgatgacgcagctagtggcggagctagaaatttaaccctttaaaatcggttactactagtttgtatttaaatggagtcatttctataattttttgaatttgtacatgaaagttaaaatttgtaggcagcggcggcgccggcgcccggccatcacgcgcaattgcctgggcaccatgcgtacagcaacacactgctccaatgcatatgcagcgtattactcgttaaccatatacttaggccatgtttaattcagcttaggattattttaatctggattattaggagtaagctgaaacaaatagatagcttattatgatatacttcctccgtttcacagtgtaagtcattctagcatttcccacattcatattgatgttaatgaatctatatagatatatatgtctagattcattaatatcaatatgaatttggaaaatgatagaatgacttacattgtgaaacggagggagtattattataatctataagccagattactataatctggtgagccactctaaaggtgcttttcttagattattgggtggcaaacaactaacaaacagataataatttagagaaacaaacagctagcagcttattctatgtcggcttattataattcagcttatagtaatctagttctataatctagattataataatcttaagctgaaacaaacataatcactttgtctcgtaagttctaatgaagattaattagatgaataatcagattatcagaaaacgagatagcaaggaccaaaccatcaagctgtagttataaaggccaaagcaatacaacctactagcaccgatgttcaagatgacactagctttaaaatctaaattatcagcgataatattaatcttgtctaggcttcaaaaaaatttaaagatctgccaccgtttgtagggatgtttttcaaaaacgaccccacagattgtgcatggatccgacacgcagccaaacgtttagcgtgtgtcaagcagaataggggattcaaggagatacaattgcaggattaccgtgctttggtagggaaattggaagcaaaagcggctggagggcgctgggggattgtgcttccagaggacctcgcgcccctgcttgaagtggcggcgctgcgtgcgcccgcgctttactgcctcctcgcatggtcccttcctccctctcactctctcgcacgggctgctcctgccgccgcctcggtcactctctctcccggcggcggcgcggacgaggccggcattggcgtgaggggaggagttctcttgggtttaggaacggcgacgagtgatgtgggtggtggcccaggtgggagtggcgctagttgggctggaatcgagacgctaggtaaggaaaaagtatacttggactcccttaactatcgtccgagtatgattcacaacctccaaccacaaaactaggtatatcgactcttccaagtatcaaaaccggtgcaaacaatgtctcttggtggttttggagatggttttggctgacgtagcgcccacgtggcagtcttgactgagtctttatcctacgtggcgcttacgtggcatcaaaataaaaataaaaataaaaaaatatgtgggacccatatgtcattcacacacacacacaaaaagtgggacccacatgtcatcctccctctctctcccttatctctctctccctcccttatctctctctccctcaagagcgacggcggtggcgatggccgatgggaacgaggcggaggggagcggtggcggtgggaagcggcggcggcggcggtcgcggtggcggtggggatgaggctcgccgcctcgagaactccatccgcctgctctccccgacgctcgtccacgcgcgtcatctctggggccgccgccgctggccgcgtcgacctcgtcttctagttcttccgcttcgcctaccgccgcgccggcttcaaccccgagccgtccaccttcgccctcctcatcccgatcgtcgcctcccaccgcatgctcaaccacgcccgctgcctcctcctcgacaccatgccctccttctccattgcccccgaggaggccaccgtcgccacccttatcgccgcctacggcaaggccaacatcccgcaagaatccgttaagctcttccgatgcccccaccgccaccgccgcttccaaccgccgccaccgccgctccagccaagagaaaggccgggggagagagagagagataagggagagagaggggaggaagaaggaaaggagagggaggatgacatgtgggtcccacaatacttttcttttgtgtgaatgatatatggctcccacatatttttttgattttgtttttattctaataccacgtaagcaccacgtaggacaaaaactcggtcaagactgccatgtgggcgtcacgtcagcaaaaaccacctctaaaaccaccgtgggacattgtttgcaccggttttgataattggcggagtcaatatacccggttttgtggttggaggtcatgaatcatactcgagcgatagttaagggagtcaaagtatactttttccgtagactaattttctatgggaataagttcatatgaggtcccttaacttgtcaacgaatctgattttcattcttcaaccggaaaaccagatacaacgggtctctcaactgtcaaaaccagcacaaaataagacccaagacgatttggatggcagtttcagctgacgtggcccttgcgtggctaatttgactcggttttcatctgacgtggcatataaagcaaaatttaacaatttaaaaaataaaaaaatgttggacctcatgtcggtcaaataataagattaaataatagtgggaccacatgacagtgggtcccatttccccacctaatcccctcctttctctatctcctccccatcttctcatttgtgagacggctcgccgccagtgccgagtcactactgcccaagaacccccgaccttgacctcaatccgtcgcgggcggatctggcagcccctcgccggctgttgatttcgccgcccgatctagaggacgagcacaccaccgccaacttcatcacgcagcccaggtcttcaccaattccatcgccacctgcagccatgtccacctccggctcccttagcgtggcccgctggcacgcccgcgacagggctcccccttctctacattgctccgacggcttctgcgacctccgcctcccctaacgatctcagccccggcctcgcctccctcatcgacacccttgcgtcggattggaccgacgcttccgccgatgccaccgctgctactcactgacgtctccgcgcgcacctgctcgcgctggcaacgggaagcgcaagaagctgtcaggctgcgtcagtcgcatccgtgcccttaataccaccgtcgccgccgtcgaactccatctccgtctcgagcgtggcggcgatggagggcggcgcgttcttggcgcgcgcggcggcgatggcactggagttgtcgtcctcgtcggcggagcctgcggtcggggcgctccgactcctgcagctcctgggccagcagcgtgagaagccacggtcaccaccacggaggccgcggaggacgacgacccgttggagaggaaggcggcggcgagggtgtcaccgctgtcggttcactccacctgccgctagcctcgctcgccgaggttgttgcccgcctctccccaaaagagatgaaacgtgaggataaggaagaaagagagggaagagggaagaaaggagtgaggatgacatgtggggcccacgtgggccccactatctttaattattttgtgtgtggagctgacgtgtgggcccgtagttttttatttttctgatcgaattgccacgtgggacaaagatctagtcaaactaaccacgtaggtgccacgtcagccaaaagcgctttccaaaccaccgagggatctcgtttgcacctgttttgacaattcagggccagttgtatctggtttttgggtttaaggttgaaaatcggattaagtgtaaagttaagggaccaggttgaacttattcctttcctataggagcacaagttggccaaaagggccgaggcacgacggtccgacccatgggacggggttttggcttggcccaacctttggattgtgcttggccctttgcctcggctcgatgggttggcccggcatggcccaattcaacgatcagagagttaaatagatgaggaagtcaaaacagacttattctcgcgatgtaagtcacagcccaaaaagatgagggatgcaaaaaatagacttattaaggccatataagaggcagaccaaagagatgggggaggaggcaaaatagactttttttctaaggagaagcacgatgcgctttcgtgcctttgggccggcccggcacggcccgagtcttattgggtcgtacctttgccgatggtgcaacaagtgggtaggtccggggcagcccaacgtgtaggttaggccgtgtaagcccgactaatctcggcccaggcccaggcctagcggcccatttggcatatgtagagcacacgcttgccatctgtaataactgtattgtcgaggagcttgttattgcgcgcctgggcgcatgccccaggtaccgcgcgacgtaccccctctagtccctctagtgtgtagtctaatataccatacgtatgtatttacatataaattttgtagtatacacttccggcacctataaaactatgtctttgtgtagtagtgtttctagcaatatttttctttttatgcacaaatctcgaggcaatccgatagctataactctgaaagttttggaagtatttgctgaagttttctagcaatttcgttgacattttagtcctatggttcgatttttttttagcacaccggagatggcctgagctagctgatggctacgggacctcttggaagctagctagctctcatctcaacaaccggcattgacttggtattataagtctccctagtccctaggaacgaagagttaatccaagccaaatcgagggagatttgttgagcggtagagctgatcggctaattactgagaagcgtagtgcccgagaggcaactaggcaagctagctgaaactccgtcctttcgatgatgcgcgatgcacctgttcctatgctgcaagtcttgctacccgcttgatcgatcggttcgcgttttcacggacgtgcgtagcgacggaaattagcggaaacgaccctgctttatgtgcgtaaatacaccacgtcgtcgtcaacgtccacgaatgggctcggctgggaccgagtctgggcgtctggccacgaatagttctgataatgcggtgtcccatgtgatgtgattgtgagcgacctcgcggtctatcggcattggtcaggtactctcaatcgtcaacgtcgatatagctagcaaggggcagcgtatgtctctatttaacacgcagcccagagaattcagaacatgtacagtacaaaccacacagacaacgaaatggctaagcttcttctctccgctcttttgatctgcatttcagccatctgggtggtagccgcggccgacgtcccggcaggacgccgaggctgccagacgaggtgcggcaacctcgacatcccgttcccgtttggcatcggcgatcagtgcgcgatccacggtggtttcggcctcgactgcaagaacgacagcggcacttataggacattcattgggccgttcgaggtgactaagatctctgtgccggacgccaaagcctggatgaagatgggaatctcttggcagtgctatgacccggtcacaaaacagatgaatgattcgatggttgggcagaacttcaccaacacgccctatcgattctcatacgaggataacaagattttcgtcatcgggtgcaatacaatggcctacatgagaggtgtttcggtaagtatttcctttatttatgtttatgctttcaacctttttgacgtcaaaattggaaattttaacaaatacttgtatctattttgcttatgttaagtgactatgcttccagatcgttacataatttcaatctcaattcgtagatcacaagataagctgattttttacactaagctaattaattaacatctgtgacttaattatgcagtatgtcataggttgcttatccacatgctcggatgaaccaacaaatggttcttgctctggcgctggctgttgttcggtggatgtcccaccagacctaggctatgtcgaggcttatttcaataaagattataacacctctcaaatctggaactacagcaggtgcggctacctggtagtaatggaaaaggctgctttcaggtatagcaccacttacattccctcaataaacttctggaatgactacaacgggactgttccggctgtgatggactgggtaatcagaagggagacatgcgaggaagcgaaaagggacatgagttcatatgcatgtgttagcgacaatagcgactgccataattcaacgaatgggcatggttatctctgcaagtgctccaaggggttcgacggcaatccttacatcaaggatggatgcaaaggtctagctacttctatcctccacctcctaaatgatcgatttgtgtatatatacacttaaaacttttactcaataacatatacatttttgttttgtttcagatatcaacgaatgtcttgataatactacttatccatgcgctggactttgtcaaaatacgatggggggttacgactgttcatgccatcaaggacaacataaggtggaggatgtctgtgttccagatcagaagaatcagaagtcctcttgggagatgcctgttgtaggtatgtacgtctagcaagattaatatttttgctaagatttacatattgattatcttattagtgcattagttgtaatattgagattcacttacttttaaatgttaagtggtcatctgttcgtcctagtattgttgttggctaacaaattatattcggcaactaggtgcaagtgttgggtttgtcatacttgttatcatagcaacttgttcgtacctgatccacgagagaagaaagctgcaacacatcaagcagaaatactttaagttacacggtggtctactgctgtttcaagagatgaattcaaatgaaaggaaatcatttacaattttctcagaagcagagttgcagcatgctacaaacaagtttgacaaaaaccaaattcttggccatggaggtcatggcactgtttacaagggacttctcaaggacaacactgaaatagctgtcaagaaatgcatgacaatggatgagcaacacaagaaagaattcggtaaagaaatgctaatcctatcccaaataaaccacataaacattgttaaactactgggatgttgccttgaagtacaagttcctatgctagtgtacgagttcatcccaaatggaacactatgtaatctcatccatggcaaccatggccagaacatttctccagttactcgtctgcggatcgcccatgagtccgctgaggcactagcctacctccactcctacgcttcaccacccatcatccatggtgatgtcaagtcctccaacatcctcctcgatgttaacttcatggcaaaagtctccgactttggtgcttccatcttagctccaataaacaagtcacaacttgtcacgctagtccaagggacttggggttatcttgatccagagtatatgcaaacatgtgagttaacagataagagtgacgtttacagctttggatcttatagaactgctcacaaggaagaacgttttcaaccttgatgctcctgaaaatgagaaaagtttgtcaatgaggtttctctctgctatgaaggagaacaaacttgagaatatattagacgatcaaattagcaataacgagaatatggagtttcttgaagaagttgcggatttagcaaagcaatgcttggcaatgtgtggtgaggatagaccatccatgaaggaagttgcggagaagctcgataggttgattaaggtaatgcaacacccatggacgcaacaaaatcctgaagaattggagagcttgcttggagaatcttcttacattataagctcaggagccttgagtacaagaaatttcagcatcgagaagaaagttgtcaaggacctagcatcagggcgttaagctggaatctctttgccacccagcatacatcatatcaccatgtcgtaccgcgtcgtattgtatcatagttttcacttaccctagaaattcagactcagttatgttcattattaattattttttgtgtaaaaataaaaaaatattgtttgtgtacacctttagtctttatgggactgtgtttcatcatatatgagaataagaagcaatcatacgaagtcaagttaatgttctatcactgtactattttccccaccgatttatgtgattctgtctaccgtgtggtaattgcctatggtacacttggtttcagcattttcttgaccaaaccttacaagatatgctgacccatgcatcttgcaacccatcctaaccaacttctaaacccaaaaaatgttgtctcatcgtactcggttgcgcattgacaaaagctgcgtttggtccggacattttcagcaattcgatatgtaaaaattaagttgtcaatgctgtgttttaattataaaagctgtgtttgaagcggatgaaaataaaaattaagttgacacgcacaaaacgagaaagtcattaactaagttttaattattacaaacttgataaatatatttgatattttaaagtaacttctaaatagaaaggcacataatacagtaaaatctgaatcttaaccgaaaataatagagctacagctcgcaatggaaaatgtacctttgtagttttgcacgcaacggagcatcacgcggaattcaccgttcgaagttacaagaccctgtgggctgtgaaacagtcaagtcttccatgatactgagcggagcgaagagaaccagaactgtcattagagaagaccgaccctgtgaagccccccaattgtacccaagacccataaacatcgctcgccaggtcgccgagaaattgtgtgatatggacgaggccaggttttctcaggtgaacgcagcctgtttttactcaatttcttggattaaagcagggccaatgtgatgtgaacggtggccgattggtacagttagactatcagccacacaaatttaacggatcaagtttattcacttatcaatgctgctatcacgcatgactgccaagttacgtcagtcgttcgaagtcttccgttgctatgtgtagttaatagagctggagatcgattacgatggaggaaaaacattttgaaaaaaaaaaaggtatatgcactctttcttttcgacgtaaagacccgggagtcagtcgtcgtccataattcttgggatatacttcatttatgatcaaatatacactttctgagatcttattccctctgccctattttatgtcctattttaagtacaacgataagttttttttgcctaactttgatcgttcgtattatttgaaatttttttataattagtatttttgttgttatgagatgataaaacatgaagaatactttactcattactgacttatgtttttaaatttttttaaaagtttttttaaataagacgaacgattaaaattgggcatatctggttttgcggttcgaggacgttttttatcccgataataagttgagggaccttcggtgtactttttcctttcccatgggagcacactctctagctataataactggattgtcgacgtggcactcatttggattaaaaacccacacaaactgtcacaaaccaagaaagttactgcaccagttagttcgaatttcaagttgttgttctaaatcatatccatccgtcgcaatttacttatagaaaaatgagtaaagtacacggccggtccttaaagttggagcgatgtgtcacttaggtccataatctaggaaaatcgtcatttgggtccgtgatcttgtttaagtgaatcatttaggtccaaagcgcctttgaccaggttgactggcttacgtggccgtccacggtgatagcatatttgcattttagccccccgcatcttggctctcccatatacgatccaaccattctcccccaaatcctcctcggctcctcctgtgtgatttctagggttagcgattgcaacggcgattgggtggcggtgtagatgtggcggcggccgcgaggacgacaacgacgatgagggaggcgcgtacggcggcaacggtaagggagaacaagcgttcgtcgtcctcatggtgtcatcagcggccgcgtcggcctccacctccgcgacggtgtctagctcggtccccgtggggctggcggctaagaacctgaagtcgatgcacaagggcgcgtaggacctcaacctggcgttcccgcatcaccacggccgcgccctgcagtcgccggagttcacagcgttcccgagcttggagagtagcaacatgtgcaaccccggaggcaacatggcggtggcgaacggcgttggtggcaggggcagcgtgggtgcgtgttctcggcgatggagttgctgaggagcattggctgctacgttcctctgcctcagatggggccgctagggatgccggcggagtatgcagccgtggggttccatctcggcgagttccgcatgccgccaccgccacagcaggagcaacaacaagctcagaccgtgctcggtttctcccaggacacgcacaacgcgggtgcaggcgacggctccggggtgttcggcgggtgcagctagtggctcatgcatgcacgcgtggtggtcagcaactgacaacatgtggagatagagaaatgagatagagacaagggggagccaagatgggaggggggctaaaatgcaaacatgctgccaccgtggacggtcacgtaagccagtcaatccaatcaaaggcgctttggacctaaatgattcacttaaacaagaccgcggacccgaatgacgattttcctagatcatggacctaagtgacacctcgttccaactttaaggaccggccgtgtactttgctctagaaaaatagaaaaaaaagtttgggatccggagttaagggcttgtttaagggcttaagtttagaaaaatatatatatcaacgggatggctagacagaggattaagggcttgtttagttagaaaaaaaatttgccctacatgtcacatcagatatacggacagacatttaaagtattaaacgtaatctaataacaaaataaattatagattccaccaggaaactgcgagacgaatttgttaagcctaattattctgtcattagtaatatttaatatagtaccatattgtcaaattatagtgcaattaggcttgaaagattcgtctcgcaatctcctggcgaactgtgtaattattttttttttacatttaatactctataaatgtatccaaatattcgatataacagcgtgaaaatttttttttaaactaatcaggccctaatacgagcaagacaaaaaatagtctttttagctggtgcaacacttgtctactccaacctccaacttgttccgggggaatcacacgtctcactgtctcagtcacacaagacttggactcattcatcagtctccacaatcgtggaccgactgctactgtacctcttggaagctactccagctagctagttgctctgatatgctctgagctcaacaacagcggcattgacttggcaagtctccctgggaccctagagttaatccagccaattagagcgacatatactaagctgaccggctgactgagtaaagcgtgcatgggcgagggcgagtatttcgttgatggaccatcctgaatcctttagacgccacgtattataaaatatagcaatcgggataaaagacatattttagtagtatgaaattgaacaagaacctatctattatattattaaaggcatagaaaaatgagtctccacgttcgctctcatggtctagaaattctcacattaatcaaagaaaaagaaaaaacagtgtccatatataaatataatttagaaatagctgaaattcagaattaaaaaataatgaatattagaagaggatactagagtccatatagaaataaaatttagaaatagttgaaattcggaatttaaaaataaagaatattagaataggagactagagtccatatagaaatacaattaggaaataactgaaattcggaataaaaaataaggaatattagaagtagagtatagagttcatatagaaatacaattaggaaataatagaaattcggaattaaaaataaggaatattagaagtagagtatagaatccatatagaaatacaattaagaaaaaaaaagaaattcggaattaaaaaataaggaatattagaagtagagtatagagtccatataggaatttaaaactaactaaaatttgaaataaacataataaaattaaagtagagtttagagtccgtataaaaatataatttacaaataactaaaatttgaaattaagaaaaacatgggaagaagagtttaaagttaatataggaatacaatttagaagtaactgaaattcaaaattcaaaattaaagaatattaaaagatgagtatagagtccacatagaaatacaattagaaataataaaaaatcagaaataaaaataaataatattggaagaagagcctagagtctatatatagaaatacaatttacagaaaatttaaaattaaaaaaaagaaatattaatagacgagtctagagtcaatgtaggaatatatataatttacaaataattaaaatttgatattaaaaataattaagaactaacacatatataaaatactatatgaatattacacattaacattagtagtttcgtaaagttattgcaaaatttaaaattatgttattattttaatatatttgaataatataataagaaaatatatatgctattatatgagagaaaatataatgatactatcatgctagtttagatttatagaattaaattatatcaaatctaatactagtttaatatattttagaatgtttgcctttaggggttgtatttttctcctgctatatttaatgaaaaagcgtaatctcgtgtggtttctgttaaaaaaatatattttagaatggagagtacatgacaacagactttaattcctcgtgcgtgtgcctagctataaggaattatgtcatttaaattttttttaaagaagtagcaaaaggatatgccatagtataaaaggtgataggtggaaggataaaataagacaaaagttgataggtaaagaataaactattacacaagttgatagatgggaaaataaaatactatcttaagattacaaaatcccaaaaaaataaaagggtaaaattatttatatacatggacgaaagtatcatatcgggaatgatcaataatcaaccaccagcttttattaatcacatactgcagggcaagctgcccagggacagtaaagcggatatctctatttaacacacaccgcgtcacgccccagcaaagcacacactctcctgtctcctccagtctccacacacacacgcaatgactaagcctcttccctccaccattcttctgatctgcgtttcagccatcgggatggtagccgccgacgtccccgtggctggacacccaggctgccagacgaggtgcggggacgtcgacatcccgttccccttcggcatcggcgatcactgcgcaatccaccatggcttcaacatcatctgcaagcctgtcaacggcaccaagaggcctttcaaggggtcgtttgaggtgacgaaaatctctgtgcgcgatgccaaagcctggatgaagatgcggatctcttggtagtgctatgactcggcctcgagcaaaatgaaggaatgggtggatttccaaaacttcacctacatgcccttcaggttctcatacgaggataacaagattttcatcatcggttgcaatacaatggcctacatgagaggtgtttccgtaagtatctcctcatatttatgctttgacgacattttgcttatattaatatactaggcgctcagtactgatcgttacataatctcatttaatttaacgtcatagatacaaattaacatctgtgacttatgcagtatgtcataggttgcttgtccacatgctccgatcaaccaaaaaatggttcttgctctggcgctggctgttgttcggtggatgtcccgccagacctgggttatcttgaggcttacttcaataaagactataactcctcagaaatcagctacagcagttgtggctacgtggtagtgatggaaaaggctgtgtaagtgagtggctggacttctagttttgaactatagcaccacttacattccctcaacaaacttctgggatgactacaacgggactgttccggccgtgatggactggataattacatgggagacatgcgaggaagcgaaaacgaacatgagttcatatgcttgtgttagcaacaatagcgaatgcctcaattcaacgaatgggagaggttatcgctgcaagtgctccaaggggttcgatggcaatccttacgtcaaggacggtcttcttggatgcagaggtctctctgtctctctctctctctccctctctctattcagcaaagtatacaataagaacttatattcacgaaagtttgctttgtttcagatatcaatgaatgtcttgataacactacttatccatgcgctggaatttgtgaaaatacaatcgggagttacaaatgttcttgccctcaaggacaaaatgagctggctcggggtgtctgtgttccagatcagaagattcagaagtcccaagcttgggtgatgcctgttgtaggtacgtactacaactagcagtagatattctttgctaatatatatatatttacatattgattatcttattagtgcattggtacgtactacaacgcttgcttttctaagtcaagtcgtcgtttgtcctagtattgttattggctgacaaatttatattcggcaaccaggggcaagtgttggatttgtcatacttgtgatcatggcaacttgttcgtacttgatccgcgagagaagaaagctgcaacacatcaagcagaaatattttaagctacacggtggtctactgctgtttcaagagatgaattcaaatgaaaggaaatcatttacaattttctcagaagcagagttgcagcatgctacaaacaagtttgacaaaaaccaaattcttggccatggtggtcatggcactgtttacaagggacttctcaaggacaacactaaaatagctgtcaagaaatgcatgacaatggatgagcaacacaagaaagaatttggtaaagaaatgctaatcctatcctaaataaaccacataaacattgttaaactattaggatgttgccttgaagtacaagttcctatgctagtatatgaatttatcccaaatggaacgctatccaatctcatccatggcaaccatggccaacacatttctctagttactcgtctacggatcgcccatgaatcagctgaggcactagcctacctccactcctacgcttcaccacccatcatccatggtgatgtcaagtcctccaacatcctcctcgatgttaacttcatggcaaaagtctccgactttggtgcttccatcttagctccactagacaagtcacagcttgtcacgctagtccaagggacttggggttaccttgatccagagtatatgcaaacatgtgaattaacagataagagtgacgtttacagctttggagttgttcttctagaactgctcacaaggaagaacgttttcaaccttgatgctcctggaaatgagaaaagtttgtcaatgaggtttctctcagctatgaaggagaacaagcttgagaatatattggacgatcaaattagcaatgaagagaacatggagtttctcgaagaagttgtagatttagcaaagcaatgcttggcaatgtgtggtgaggatagaccatccatgaagaaagttgcggagaagctcgataggctggttaaggtaatgcaacacccatggacgcaacaaaatcctgaagagttggagagcttgcttggagaatcttcttacattataagctcaggagcctcgagtacaggaaatttcagcatcgagaagaaagttgtcaaggacctagcatcagggcgttaagctggaatctctttgctacccagcatacatcatatcaccatatcataccgcgtcatattgtatcatagttttcacttaccctagaaattcagactcagttatgttcattattaaaaaaattttgtgtaaaaataaaaaaatattgtttgtgtacacctttagtctttatgggactatgtttcatcatatatgagaataagaagcaaatcatacgaagtcaagttaattttctatcgctgtactattttccccactgatttatatgtgattctgtctaccgtgtggtaattgcctatggtacacttggtttcagcattttcttgaccaaaccttgcaagatatgctgacccatgcatcttgcaacctatcctaaccaacttctaaacccaaaaaatgttgtctcatcgtactcggttgcgcattgacaaaagctgcgtttggtccggacatttttcagcaattccatctctaaaaattaagttgtcaatgctgtgttttaattataaaagctgtgtttgaagcggatgaaaataaaaattaagttgacacgcacgaaacgagaaagtcattaactaagttttaattattacaaacttgataaatatatttgatattttaaagtaccttctaaacagaaaggcagagaatacaccgtttagtaactttagtatgcaatcgaagtaaaatctgaatcttaaccgaaaataatagagctaaagctcgcaatggaaaatgtacatttgtagtcttgcacgcaacagagcatcacgcggaattcaccgttcgaagtcacaggaccctgtgggctgtgaaacagtcgagtcttccatgatactgagcggagcgaagagaaccagaactgtcactagaaaagaccgaccttgtgacagttctggttgccgagaaattgtgtgatatggacgaggccaggttttctcaggtgaacgcggcctgtttttactcaaattttttcttggattaaagcagggccattgtgatgtgaacagtggccgattggtacagttagactatcggccacacaaattgaacggatcaagtttattcacttatcaggtcgctgtaaatttccttgtactgttgtacacactgctgagaccagtagctaggctagctcacagtagttcgcctgcggaggtttttccctatgtgccattaaaaaagatggagcatgtctatctaccaataaaaagttcgagcctccctctatgtcatcgtcgaactttattacgccctccacaccattccgtcgctattctgttttggtttaactgtttggcagctctgacatgtaggccgggcggaaaaaaatgtctctattgccctttcttcttttgagtgcgagagagagagagagagagaggggggggggggggcggttgagtgcggcggcgcggcggcagcctggaggaggacagggaggcatacatgcgtctctcagtggtgtcgtcgtcggagaggggtggtggtggtcgattcctccggtttcttcctctcactccttccccctttctcccacgcgcgagcgcacacaagcagcggcagccagcgcgcggtggcgcggcgacggccgggcacggcggcgcctggtgcttggcgcggcggcacggttgcagcagcgtgggtcaaggtgagggagggcgatgcgggtccgacggccgtggtggcccttcggcaaaatggaggaggagacggccggggagcaccgtcgacggagcgccaggcaggaggcggtctggcgccggatggggaggcagccggcggtgtcgctgcctcggctcggtggacggcggcgccggtggaagagaaggctgtcgtgcagggcgacgtggccgtggaggtggagctcgccgcggagtcggcctggccgtgcgcagcggcagcactcacgcgggccgatttggctgcgggcgcggtggaggacaggcgcggcgctggcgatcgagcgggcggtggcgatgttcgcgctcgccgcggagtcggcgcgggcggcagcggtggaggacaggcgtggcgcggacgggatccggcgcgcatcgctcagctcatcggccctggcgtcgagccgcttgagctggccctcaagctccagctctcctccagtagcgcggcgagctccccgtgggtggcgccgacctcgccgtcgatcttgcggtcgacggcctcgagcagcatccggaaggcgcgggcaagagacgcctcgacgtcggcgacgagggcgtcgtacccggccatcgcggcctggtcgatcggctgcgccacgcgccaggtgaggtcgccaagcaaccccatgggcaacaaactcatttggctgcgccgttacccactgttagaaaaaaaacagatggaatgatgtggagggcgcgataaagttcgacgatggcatagagggagacttgaactttttagtgacacagaggcaggcatcattttttttttaatagcacataggtaaagacctctcgctacagtggcaggatagaattaacatggatgacaacaggggagatgaagcggttgtcactcaatgctgctatcacgcatggcctacgcgcttaagtcacgtcagtcgttcgaagtcttccgttgttatgtgtagttagtagagctggaggatcgattacgatggaggaaaaacattttgaaaaataaaaatatatgcactctttcttttcgacgtgaagacccgggagtaagtcgtcgtccataattcttggaatatatttatgatcaaatatacatttttcgagatctttattactccttctgtctcattttaagttcatgtgtataataatgagtttttttttgcccaattttgatcatctgtcttatttaaaatttttttataattagtaattttgttattatgagatgataaaataggaataatactttactcgtaacttatgtttttaattttttttttcaaaagttttttttaaataagacgaacgattaaaattggacgcagaaaattatacttacacttaaaatgggacttagtctagaatctcacgagcgagacaagtttatccccctctgaattctttttccatcgccacaagcatatcctacccatcatatttaaggaggccgctgccgaaattcccaagcacaccaaccaaaacgcacaacaaaccggctacctaaggagtacggacaagcaagtgcagcatatggagcgtcatcagcttcttcttcttcccggatgccttcttctctaccttggcgccatcgctacgcttgccgcggccgacgtcgcaattccggccggtggccagcctccgggctgccggacaaggtgcggcgacgtcgacatcccctaccctttcggcatcatcgacccagacaggccagactgcgcctacagcaggggcttccagctgaactgcacgtccgtgaacggcgccgcgaggcctatgtttcacaatatcgaggtgaccaacatctccgtgcccaacggaaaagcatggatgaagacgaacatatcctcccagtgcttcgacccagaaacaaacagaaccttgtacgatgacatatggaacagtttcagatattcaccttactggctgtcaaacgaggacaacaaacttatcgttgttggttgcaactcactagcttacatgcgcagtacctcggtaagtaatttttgcatattttatacattatcagtttcttaaggaataggaaaggttgatattctttttaatcgcaaatcatgacctcacaaccccaattccgaaaacagagcatctttacctcattcaagctagcccactgtacttggtgtttctcagccactcaaaagttatagaatccataaaataaagtagagttaattacactttgggctaggaatttttaccaaagtttcactttggacgagggataaagttatcttatcactttggactagataaatttacaaaagttttaaattggaccacccttcttctccatcaatcttccctccttttctctattaagcagccgcgctatggaatctgagggatgatcaagcaaagtaccaggattccttctctctctgctctgttccgagcttgaggaaccagcaaaatcaagactggtggtagctggctgctgtagctgtcgcttgcaagctcaatacagtgacttgttctaagctcacatgataaattaagggaaaaatggtagaaatcaagcagctaaatcaatgagtaaagaaatcaaggtcaggtggaatattgattggtttattgtgttgcgggtaagctcgctaatgaaatcaaggagtggcaaacaaaaaagtggtccaatgtgcaatagaaggtaagaaaacctggaccaaagtgaaaacgttagatataacctagtccaaaataaaacacaggcaataataaccgggccaaagtgcaattcactcaactaggccaaagtgcaattcactcaataaactatttgtcagaagttgagaaagccaacttctatagattctagttcactagttgcatctcataatttctgacttctcatgtaaggtcttatactaattcttaatataatcattatgttatattgatgggtcatttctaattgtcgatgcatgttttttttttgactggaactaaattggatatttatgtgttttttgacgtttgattcaaaaaatgtgcaatcatttatccttgtttcaaagggtaagggtaatgtaggtaaaattaggattcaatttttttctgtaaaaaactttgcatatcttaatttttcaaatgagacatgtttgacatgtgaaaactagttcgacttgtcataacatacatataagtcgaaattccccctcccaaaaaaaataaaaagaacttgattgggtggattttgtgtgcggccaactatatcactacagggcatgttcggctgcaaggtgcagctgccgaacaggcccacaaccaaagagggcttagagcccatttccatatgaatcacaaatgaactctatgttgaagacactaatcctagttctactatgttaagaaagctatctgttttgcagcacttgttttaacaaatataattgcaaactctcatggggtcgtgctgttatttgcagtttataacccgccaatccatgcagtacgtaatcggttgctcatcaacatgcgacaacgtagaccttaagaatggctcatgctctggtgctggctgctgccaggcagatatcccgaaaggcatacggtattaccaaggttatttcaatgcaaactacaacaccactgcaatatggaggagcagcccttgcaactacatggtagtcatggaaacttcagcattcaactttagtaccacttatgtcgactccacagtattcagtgatacgtacaaggggatggttcccactgtcttggattggacagttgaatggaaaaaatgcgaggaagcaaaagagaacagaacttcctacgcttgtgttagtagcaacagttactgtgtcgatgccaccaatggtcgcggttatcgttgcaagtgctctgatggatacaagggcaacccatacatcacggatggatgcgaaggtccctttccggccattttgattcctctacccctgcaaattaagagatgtagaaaaagtattatatttttaagtctttttttggcagatatcgacgagtgccaagatgctcatccatgcacgggaatttgcataaatacgcaggggagctacacatgtacatgtcaacgaggaaaacatctgattgacggtgtttgcaagcagagttcctcttcttggattatacctgtcataggtccgttacactcttcagcgtctcaaaaaaaaaggagaaattgtacattgacaccaatcttgaacataatagcgcattacagtaaaaccaatctgaacatatagtaggaatcaatcatattattcatgttcattaaaatttaaggttgaaaaccccggaaatgctttcaaatcatcattttggagtaacatcactttggaaaccatgcaggtggaagtattggagttgtcacccttgtgactattgtgacgtgtgcatatctcatccaagaaagaaataagctacacagcataaaacagaagtactttcgacagcatggaggtcgactgctatttgaggagatgaagggtactgcatttaaaatctttacggaagaagaattgcagaaagccactaataatttcgatgaaaagaaaatcctaggtcatggaggacatggcaccgtttacaagggatttctaaacggcaacactgaagtagcaatcaaaagatgcaagacaatcgatgagcaacaaaagaaagaatttggtaaagaaatggtaatcttatcccaagtcaaccacaaaaatattgtcaaactattaggttgttgccttgaagtggaagtcccaatattggtgtatgagtttatcgcaaatggcacactgttccatctcattcatgatggccacggcaggcacatctctatatccacgcgtttacagattgctcaccagtctgctgaagcattggcctaccttcactcatgggcatcgcctccaatcctccacggggacgtcaagtcatccaacattctccttgatggtgacttcacagcgaaggtctctgactttggagcctccatcttatcgccaaccgatgatgcacagttcgtcacgtttgtgcagggaactcgtgggtaccttgacccagagtacatgcaaacatggaaattaacggataagagtgatgtatacagttttggggttgttgtcctagagctactcacgagaaagaaaccattaaattttgacgggctagaggatgagaaaagcctatctgtgaggttcctttctgctgtcaaggagaacaagcttgaggaaatcttggatgatcaaattaagagcgaggagaatatggagattcttgaagagattgctgagttggccagacgatgcttggaaatgtgtggtgagaataggccatcaatgaaggaagttgcagaaaagcttgatagcttgagaaaggttttgcaccatccttgggcactgcacaatcttgaagaggcggagagcttactaggagagtcatcaattgttagctcggaggttgtcagtacgggaaatttcagcattgagaagaaatctttaataggcctagaatcaggaagataatcgctaataaccttgttgtatatcatatcccaggaaattatataggtatactccaaaagtattacatgtataggtaatcgtcatcatatatggaatgattcatacatgttttatatgtgtagctcaaggttgcatcattgttaagatccaaaggtgaggttgttgtttcaattgctattgtagctttacctttcaaaaatctatgtacaatagtaattgatttgatatttgacacacattttctttttatagtttgatcaattctcatactgctaacaaatcacgacaacatgtacttttcaagaggttaggatccatatgctttgcaagtttatttattctcagaaatagcttatcagtaaccattcacctgcacatatattgaacaccaaggcctgccgacatactataattagatctcctcataagaaactaccgttcattataatcttgcatactccaataatcaagagagtggcataatatactttgcttgtaagccaaccgcttaaacattctattacccataggtcaatctccatcagaccaattgaaaaaaaaatagttttattacccataggtcaatctccatcagaccaattgaaccaaagaaaaaaaatagagcaactatgtgtatgtaaattgtttcatagcaaaacaacattacctcacaatggcatcagtcctacagtggctggtaatggcatccgtattgggagcatatactcctgaaatcaaactatttgtcccacccttccttgagaatcgttgtctgctcctgtaagaagtatacataaatataaatcagcatcttaaattatataaaaaaaaggattaatctgaaggcagtttctgaacaaaccgattgttatcctactccaattaacatagactttttagagaaatattaaaacgcttaatttaaaccagaactataaatctatactctaaccaacaactaaaaaaagggttggtactccaaccagtatgcagttatgcacacgagggttgggatgggagcattggacctcgggatgctgcatcaggcggtggcggcaggagattaccggaggacgggatctaggcgttcttccgcgcctgcttgatgcggtggtggcggcgccgcccttcctaccgccggtccgcccgtctctcggccgccgcatcgattgatgatgaggggaagaaacctgcggctgcttgggcttgcggtgcgaggctgcgaggtgaaaaagaggccagtgttgatgggctccaaaattcagattggtggcactggtagcccaataggacttttgtttcggtaattgggttttacatggttctgtagttcgaattgggcctcgtggtggataacggataactggcccgtacatcagcagagctgttgatgacgaggcaaaaagtccagtttgagtccctcagatataggtcgaatctaaagtgcatccctcaaccgtaagaccgggtacaaagactccttcaactattaaaactgggacaaaatgactcctaagatagtattgaaggtggttttcgctgacgtggcatccacgtggcagcttagtcactaaataaactaaaaaataaatgtggggcccacatgtcggtgtcctttctttttctcccctctcttttttttcgaccacgtcagcaatacaaccctccacaacaacggtgccctgcactcgctcgatccgccttctcccccttcttcagcatcggtagaggcggtggtgccgtgcactactacaagaaggatttctccgtgcagagcttttgtccatctgtagccaagtgtctgcacccaaccgcacccgtgcggttgggttaagtggaccgcacgggataattgattatcccatgcggtcaaattataccgcccgcacgcaaccaaaaaaaaaagccaaacaaaaaatagaaaaaaatcaaaaaaaaaacctaaccttaaccctagaaacacccgtcgctgcacccggccgccgcccgagctcgcggatccgggcggggggcggtctcccgccgccgagcctgccactcctgtcgcaccgaaggagaaggagaaggagaaggagaaggcgcgagagagaggagagaagggggccgggggagagagagagaggggatagtgaggagaagataattaaagggggacagagaggagagaggggcggaggggagagagagagagaaggaaatttgaaattttttgaataggttgagagggaatggatattttcctgtgcgggtggattaggaggcccacatgtgaaaattgtgtatttttccgtgcgggcatgttaagagggccgcctgccaaaatcgattttcgcgtgcggcctcttaaggatccgcaggtaaaaataggaggcccgcacgtgaaaataggagtgatttttacagacgcacatgaaaaagctccgcacgagaaaatgggaggtccctgtctagaaaaatcttatgtgtagtagtggtggtaggctgcggctagcagaccttcgcgatgctgccctctgcgacgttgccgtcacggaaggcagggtgattgttatccacctagccttgcccacatcctgatggccctggacttggatgtggtgtaaggcggtgcagatggccttgcacttgtagcggcactcgtggcagcatatgtgcgaggccgttgtagcgccggcagcgcagtacctaacagctattctccggcatctccagggccatttgaggtgatgggcatcgtcgacaccctacgtgcacttgtgcttgctttaggtaatacaagctttcaatcatatgatgccataaaattttgtttggtttggttggttggtcaaggtgtttatgactttagttgcttcagttcatccacaccacctgtactactgatgaagaaaagtacacacattactttccaatagtagagagctaccgcaaggcccacgagatgaaatgagatgaaagcccaccaccggcaccgccctctcccctaccgccgctgccgtcgatcaccgttggttgctcccgctctccatcggctccaccctctcctacaccctcctcctcaccaccttccctctccccttcccctcctttgccggccggttgtgtgcaaagtctgggaccacgacgtcaatccaacgccccaagggatgcgagtgtgggactgcagcgtcgcgaactgtggctagctgtagccagcgccatcaccgtccttgtcgatgccagagaagggggagaaggcggattgagtgagcgtagggcgccgtcgtcgcggagggccgtattgccgatatggctgggaaaagaagagagtgaagaaaaagaaaggacgccaagtcgccgacatgtggatcacatgaatattttttttactttattgactataggcggccacctaagtaaaaaccactttcaacgttgtctttggagtcattttgttctgattttaatagttgaaggagctgttatatctaattttacggttgagggatgcactcttgttttgacctatattcgagggagccaaagtgaactttttcctcatgacgagggagaatatccggtgaaaaccatcgtgccagtgaaaattcataaaaacaatgcctaaaagatttctaaatttataaaaacaatactatcaggtatagtcataaaatgtattcataccagatcttaactccaaactcaacttccttccttttagagagaaaaagaaaagacaaatttcaggtaagtagtactccctctattccataatataaggcgcgcacgtattttaagatttaacatttaaaatatttgaccaacatttagtataatatgaaatgaattttatttgttaaaagttatatcattagattgacatttaaatttactttcatatgattatacttttgttgctacaaatcttatagtatatgagaaattataatctaaagattaattttggagaccgtgtcaacttttaccatgccttatattatggatgaagggaatattacgttagtattcacctagaaatttatctttttattactccataataaggtgaattgaacttgatatttgataataatgtatttcatgcatgcactctagaaaatttttttatgaatttataaaacttttaagtttggtttttatggattttcacttatttgattatttttaccggataaatcccctcgtaacacttttaccatgattgctttgtgatacttaattaattatggtttgtttcctggagaaaggacctgcatgccttatcgtcctcaagatgtacgccgtgccattttcattgctgtgttgtgtgtaagctggctttggagggcaagcagatcgatgattgcgacaatatagaaattcaaattagcatcagcgacgacttgttcccaggctcatatttttttattttccacgtgcatacttttcaaacggctaaataatacgcttttttttaaaaaaaatctataaaaaattactttaaaaaccatgttaatccgtttttaaaagtatttttaagctaatgcttaattaattatgtgctatgcgtgttttgctttacacgccagagataaggagttctaatcagtagggatgcaaatagatcgatccatgaatccactcataaacaaaattagtgggtaactcacaaattgaccggtggattacccaataatttagtctacaagtgagttcacgtgataactcatttgtattcctaggtacggtaaccagacctatacttatttgatctataagtgatttgcagctcagtccacttacatcactaccaaccagccagcgctagtagcaatttgaagatttcatatgtgtgtgcctattgtggtaacatgcaatggtcgatgaatatgcgaccgacaccggctagctagttcatgtacatacccaagttgaagccaagatcttctagaccgtggtattaacaaaacaaaggacccattaccatcaggtagtaaggtcgttttcgtgagttaagtgcacatgcatattgacatagtcttcctttgagggctcactagtcattaaatatcggcttaattaccggaaaatctacaagtttcccccatttcgtacgcgacaactaataatttcatggaatgtgaaacattatattgcagtttctcgttactgagaaatattagttttttttattaattttctcctaccccaatctatgcactcccgtcaaatccaaatttaggtctgaagcgtgtggctttagaaaccattgcatcaacttgccaaactaaagcatcaagcatggatcgaccagaagcacaaataactaggtgcctatttggtaaagttataactcctaaatttaacttcaggagttgggtctgtagtgaagttgtgaagctacctaaacccagctccaactctctattacagttgcctaaacccagctccacctcttttattttgtgagaaagctccacgtagctccactcctattctaggtagccgaaattgtttggctaagctctagctccagaaaaggtaaaactggcgttggagctggaactttgccaaacagactcaaggattctcacactaacctttccaaagagtaaattggacatatgaatttcacacagcataattcactccgacggtttttcaagctagtgtgcacagggaccctatctaatcatagcactttgaactatggcagtgtttagttcccttcaaactttcaaaaattttgtcacatcaaatgtttggacatatgtatggagcattaaatgtggacgaaaaaaaccaattgcacaatttgcatgtaaaattgcgagacaaatattttgagcctaattacgccgtgatttgacaatgtgatgctgacggattaattaggcttaataaattcgtctcgtactcccttcgggctgataatacttgttattttagacaagggtgaagtcaaactttagaatctttaattatcaattatttttaaaatatttgtcttttaaatatggtgactacatgtatagattagtcttaaaaagtactttaataaaatcatatatttgttaacatttttatacatattataatagaaaataatggtcaaagttattttttggagaccgtgctcttgtccaaaacaataagtattatcaacccggagaaagtagtttacaagcagaatctgtaatttgttttgttattagcctatatttaatatttcaaatgtgcgtccgtatatttagaaaaaattaacacacgaactaaacacgacctgtaatggactaggtatccacttgcatcaaaatgacacgtatatttgatcagacattaatgcgtttctcttcaaaaatgtgaaaaaataaaggtacatcaattctgcacgtagccgatcagtagcaccaccggctagcagtatagcgcgcggaattttgtgcagcgtgtcgatgtcatacgcaatgtctttttttttcctaaagaaagtcagtacaaacgcaggtcctcatacatatactcacccttgtaaacataaatacacacatcctatccctataaacattttctaaagactagatcagtatatcttgagaataatgaagtcatcactacggacatctcgttgtcgataggtacatcgtctataactaaaataataattagtcgtaactacgagcacctgtatcaagtcatgcactgtctttgatagtgttaagcatacaaagctcttccaactaagtaactttacctttttaaaaatttaccgaaaagttacatattttttttaaaaaaaattagcattatagattaagatttaaaatttggaactgaaatttctaacatttcgggtccatcgagccccccccccctcccccaaaacacacccaaaaaaacgagatgattgcgggtgattttttcgcgtatttagaaaaaaaatgttcctatttaatcaaattttgttcaacattacaaataattttgaaccgaaatttcagctatatcagtacttatagaaatagagaaaacaaaccgttataccctgctccagatatttaagtacatcacttcgagataccaaaattcatacgtcgatactttttcaagtatcgtaaaatttgcccttccaattaccatagacctgtcactatacatcaaagtatcaaacgaccggttctgcgaagcctccctggtgtcatttcaataacaacatgcatgcatccaacataagcagagagagtcttatttaggccagtgcatgcacccaaccaagcaacccattttaatataaagctacggcatcatatgccttggactgacacacaagttcttaatttgtcattagaatatcacataagtcctttcacttgcttgctctttgtgtacatctttcgccggagcagccagagccatcgccatcgccatcaggccgctaatggccagccgcccgccgcttcttctgcagtactcgtcgctgctgctgctctgccttgccgtctcggcgccgccggccgcagccggcaacgtgccggcgccggtggcggccgtctcgaagccgggctgcccgaccaagtgcggcgccgtggacatcccgttcccgttcggcatcggcgagcactgcgggctcgaggcgccttacacaaactacccgttcaagttcgactgcaagcccgttgacggcaccagcaagcctttcttcaggggtatggaggtgaccaagatctccatggaagacggcaaggcctggatgaagatgaacatatccaagaactgctacaaccagtcgacgggcaccagggaggacaacaccaacacaacatctgtgagcttcagccgctcgcctttctggatatcggacagggataacaagatcatcgtcatcgggtgcgaaacgttttcgtatatgcagatcaataatgtaagtatatgcccataattcgtcaatctggttgcattagatcacaaatactcaaatgtgttcataatatatggcctttaaaatacatgatagtctaaattattattcctttatatatcaaggacgacttaggatttgtcatgtgagaatattattagtttctccctttcacatgcatgtggaatgcgtgtggaaaatttgaccgctgctatttcaagttgacttttgaaaacgatatgacaatattttcctttaaaagtactttcaaaatattataaatgtgctatattttgtgtacattttaatattagtaattaataatcaaagtgatgtattggtgattgtgtaggtatccaaaacaacacttacttgtgaattggaggtagtgtgtatatatgagaaattcagagcataagtatatataattttgtagtggttggaagttggcatgtggccaaatggctgggtggtgtgattgtaagcctatcaatgtttaaatcctacatttcatattagtgtccatcgacattaggagtaaggagtacatatgagcatattcgttcaatggaaatacatgtgcctacctacaattcagagccttttgatacttttgatggagtatatgaaattgtgaatacaaacatactcttggtgtgtttagttccttggccaatttttttttaagtatacagcacacatttaaagtattaaacataaactaatagcaaaacaaattatacattccgtctgtaaactgcgagacaaatttattaggactaattaatccgtcattagcaaatgtttattgtagcatcatattgtcaaataatggtgtaattaggctcaaatgattcatctcgcaatttacatgcaaactataaaattggttttttttcgtccacatttaatgctctaacatgtgtccaaacattcgatgcgacgtttttggcaaaaaaaaaatgaatctaaacacggcctttctcaaaattaaagggtgtgcttgaaaatcgtgtcaattcccaaataggatgtgtgtgtgggggggaattatttggatcattgtcaaatcttgtattaaggtgtatatataatacgtaacatgtgcaggttttaacaggttgtgtgccctcatgcagaaacgaccccaaggacggtatatgttccggtgaagcgggttgctgcaaacttgatttccccaatggcacatggtactatagtacttatttcagtaaaagaaataataacagcagtccttgcagcttcataacagtgatggaaaccacaaccttcaacttcaacaaaaattatttcaactccactacattctatgacacatacaatgggttagctaaggtttccctagattggatcataacaatggattcatgtgatcgagtcaaaagaaacactacttcatatgcatgcattagtggaaaaagtcgttgtgttgatgatccaaagggaggttaccgctgcaagtgctctgatggatatgaaggcaatccatacgtcaaggatggatgcaaaggtatagtcatacacaccttcttatgcctgctgcctatctttgttacaaatgtataagataatgcaacaattttaaccaaatgtgttgatggtttggcttcagatattaatgagtgcctcgacaatgctacttacccttgtccgggaatatgtaagaatacgttggggaatttcacctgctcatgctaccctggaaactatatgatgaatggaatttgcattccaaatcagaagtctggttttcctaaaaatcttgtaataggtgagttcgtctcttcctataagaattaaaatggcatgtgagatcgatatacatttatgtttttgcttatacatttgtgctatatttagttatttactatatagtagctctatcgttttcctcatgcagatatagaaaaatataatcctaatttacaatgcctctactatatatatagttatatgtttaaaaatggtattcgttctggctttcaagtttaaacaataaggtgtgtatgcataattaatgtatttttcattctgaagctagccctcatttatctacccttttactttagcatttagtatacattcattcttgcaactatatctcttttctagatattcctaatattaatttgtacaccatagcaagaccagcaaccactgatgaatcatgcatgcatggtgtgtatttttctatagtaagaagaatggacacattttttgatcatgaacatttcatgttccaactaatgatgaaatcctcacgaactcctcaagttgctaaagaaaaaaataatttagtgaatcttcctctgccaatgccgatgtggcatatgtgggacttccttggggctagcataaagggatcaactacacattccaataatcttttcatagcaattctaaagttttctattatatatgcaggagcaagtgttggggccgtattactagtgattatagtaacttatgcatgcttcatcagagagaagagaaagctacagtatgtcaaaaggcggtacttccgccaacatggtggtatgttgctattcgaagagataaaatctcaacaaggcatttcattcaaaatcttctcagaagaagaattgcaacaagcaacaaacaagtttgacaaacaacaagtccttggccaaggaggcaatgcaactgtttacaagggacttctcaagggaaacacggaaatagccgtcaaaagatgcatcacaattgatatgaaacaaaagaaagaattcggcaaggaaatgctaatcttgtcccaaaccaaccataggaacgttgtcaaattattgggttgctgcctcgaagtagaagttccgatgcttgtctatgagttcattccaaatggcacattgttctctctcatccacgggaaccacaatcaacacatctccttggatactcgcttacgtattgcacatgaatctgcagaggctcttgcctatttacactcatgggcatcaccaccgatcctccatggcgatgtcaagtcctcaaatatcctcttagacaaagattatgtagcaaaagtttctgacttcggtgcttccatcctagcaccaactgatgagtcgcagttcgtcactctcgttcaaggaacttgtggatacctcgatccagagtacatgcaaacatgccagttaacagataaaagtgatgtatatagctttggagttgttattctagaattgctcacaagaaagaaagcattcaaccttgaaagccctgaagatgagaggagcctagccatgaggtttctatcagccatgaaggaaaaaagactttctgatattttagatgatcaaatcatgacgggagataatttggagtttcttgaagagattgcagagttagcaaagcaatgcttggaaatgtctggtgagaatagaccgttgatgaaggaagttgcagacaagctcgataggttgaggaaggtaatgcaacatccatgggcacaacaaaatcctgaagagatggagagcttacttggggactcttcttacgagatcaacaactcaacggttgagaatacaggaaatttcagcatcaatagtgaacttcagtgtctagaatcaggccgttaaatagaagtttgttatattgtgtcataaatgttatagtgtatcataggttgaagcacgtatggtatcatatatgccttgctgtatcttgggaattgaaagaaattatatttaattatttaagtacaggatgtatggcttgtcagtctttcagggtcggggctgtgaatcaccataattatacatatgcagatgcaaattttgatgtaaaggcaaaggcaattggctgcatcgtcttgtttgctctcctagtttctctttgttgtgataattgcctatctttatattcgtattcttggctctggggtttttctttactagcaaaggacatgtgtgttgcaacagaaaaatcaataaatcaatggaaaatattagtgaacagaaacaaaggatgtcaagcgtggggaataattcaccgcttataaacttttctaccacatacacaccatatcatagacttttaatatttctcatgaattgggaaaaagaaagtcaaattttgtcacatgacactcaaagtttgtgtaattttctactagacatcgcaaaagcgtgtcacggttggaggacaccaaaaaactcataatttgctatagggcacttttaacccaatcaaagagaatttttaaaaacgagaatacccctatagccaaaaacttctaacctagaattggagtgttgatggaatatgatatatgctagcaatatacttcggctgatggaagatttagagttgcataatttttattttttaaaatccaacactaacttagaagcttgtggccccaaaagcattctagtctatttaaagaatttttccaatcgagccgaaagtgttcttcaggaaattatcaaaatttgagggtatcatgcagccatagcacacttttctatgtctgatagaaaattacacaaactttgggtgtcatgtaataaaattttccaaaaagaaaaaggaagggaaaatagtgatgcagtgacaacctacacggtaggagtccatgcaatgatgcaaacggagtcaagtgctccactgaagagcaaagagactaagtagagtagaaagtgtcgggctctctgaggtactaaggtatgtcgcaaacgtgtgcagtcagacgtgtggggtgtaactgatatcgtgcgaggaactatgaagtcatatgagacgacggaaatatgttagattttttactagtcgagataaaaagatttaccaaatcctagctttacattggatggatgaaagtgaatattgatggatcctttggatgaaagtgatcaatgttgatggatcctttgaggctagccacaaaaaagggggtgttcagggaaacctatttccgctgcttgcacttatctgaacaggtgttgcaacgcactggaagctgaattgttggcgatcagaaaagggattgttctagcgcttcaatggaccctagctatgcccgatcgctttggaaacagattgctttctagcgctgcaattgatccaaacaaaagagaagaatttgtcagaattggctttcttagttagagaggtgtgtgaccacatgaatggaagtagggagatcttgctcgggaaaatcactgaagtcaaaactttgttagccactctttagctaataaggctagatatgaagctttttcgaattcttggttagattctaattgtgatgagttagcacagattgtaaaagtcgattttatttttgagtaattgattcctttcccccacaaaaaaagaaaaaagaagatgggaaccacatgcgtgcctactaatcatgtgtggaattgaccgcgccaaacccgctatgccaatcccggtccgcttttcgcctcttccgaagcctagccggcccaaccgcccaaatacatgcacgtcagcacatggtccatcatctcaccgaccggcaaaacctgcaccccgaagcccatcaaccgtgtaacttaaagtataagcccaaagacgagcgccccatgccgtgcaaaagcaaaccgttggtcctcgcccgtgaaaaccacttccgccacagcgaagccgaattcgtcaaaaacccgcgcgccggcctttgccccaaagttggcatcaatcgcttttgctcatctccttgtcccgtgcaggggaaccacgcatgcgtcgaccgaaagcacaaacctgtacatgtacgcctgtgtactgtgtacgtatgcatccatgggggccgcgtacgctgagccgtgcgcgtacgcgttgcacacttgcacccacacgtctacgtactagtggccggtagcagcgtagagctagaccgtttccacgagattttatcccgtctccgtcaggccgtcgtcctcgcagccctggcccatcccggtgaggagcgtagggctcctcaccgggagaccgcgcaggcccacctttgccggttcggccgggggccctgggtgagattctaagctctcggtgtgtggaaggctcgcgagaatggaaaaagcacaagacacgggcgatgtatacaggttcgggccgctgagaagcgtaataccctactcctgtgttctggtggatctgtgtatgaagaagctacaaagagctggagagccagagagctcttactctagaaaccctcttctccccttttttcctctcgtgggatctactctccagatcctccctccctttctaagtgggcaaggtcctccttttatatctcaaggggataccacatgcaccatctctctcttttgtgtggggacttatcctatcttttcataaatggacggagatttgtatggttgccgtctgaatgaccttctaatgggacggcccatacctacctccacttccgccggaagcaggcgcgacgtgggaacatggctgtctgctgacgatatgaccagtgtcagaccggtcacaaatcggtcattcttgtccaccacgcgtcagtttatcaatctgcatgttcgcccttcttcatacaatatcttgcttgtaatggttaggatgaagcctggcatatatctgaccgggaccaacgtgccatctccaggaggtaacacgccggctccggctagggacgagtgcttggaggctctcatcttgacgggatggagcgaggcatgtgtcagaccgcctgtcgccacctaatccacgatctgatcggtctgtgactggtcacagaccggataaacgagcgcgctgcactgcgttacatgcggcgtgacgcgcttgaccaaaccgcaataaatgcggttaggtgagccccgctgcgctcgcctaacccagacacgcggcgcaaaacccccaaggggtcggggcgcctcaaccctcggggccgaaacgggagcggtccgacccctcagggagacaaagaggggggcggccacatcaccctcgggcccgacccccccgagggggtcaggcctcgtgggtgattgctcctgcccaagcctctagtcatgatactcccggtcccatgtcaccgacagtagcccccggtgttatgccagggcgatcgccctcctcgagggaagcggtcgggcgtgacgccacttcttaaggcctggtgacaggtgggaccggtctccacagttgggcagaaacccaacgatcgcaaatcacgcacatcggcaatggttactcggctgccaataatgagcggtctcttcaagactgccacattactcgagtagcacgcgaatcgggacgagccggttcgttttgcctggagatatggtgatggcgcttttctcggagccatcagaatagcgtatagcatcttctgggcctgagggtatcgggttttggcgtcccggagggcctcgctaacaaagtagacgggccgctgcacctttcggcggggccgatcctcttcgctaggggccgcatctccagggcgctcttcatccgagaggcagcgcggggcgccctcggcttctgtgccgataacctcggggtcagagggcgacaggcgcggccttcccgtagtggccccgaggctatcctgagggtcgggggcgcctaacaccgtcggacaagcaggcggagggccaactccggccgtcgggggccttgggccgccgttcggcttgggggcctctcggaccctgacttctccccgtgggcagcgctggaagagttcccttccggaaccgaggacggcgcacgcgcgcaggtccgggacgccgccgaccacatcgtccacagcttcgagggtacggcccctcggctcgcgttcgccctcgactccgacgaggagggcggtgacggtggtgcggacgacagcgacgacaaggctggtgacccgggcgcgtcggagtgagcccccaggcccccgccaatcttgaatagctttttctttcttcttccgaggccttcgggcccccttcttgtatagactaatttaatctgcaaccaaataaagaggaaatttctatgtcaattctatttgttgtgtgtatgagacgaggatggtctgtgccgcggtccttctgtgtcttggcttgaacaagggctcgtgcccaggtcctagtcctcaaatggctcgggtcggggctagtgcctggggagatccacatgtcgagactggccaggccgggagcgtggtgaccgagggttatgggtgacccgattgtgggtttttgccaattcccccccggagttcaccacgccccggggcacggctcggttctgggccccgtttggcgattttagccgacccgagcccccgaggacagggtcgagcacgagtgtgctaattcaagccaagattcttcaaaaggaaacaatggcacagacacagtccttaggaaatcgaaaatgcttttattgaaatacggaagagaaaaaagataagcccccggccaaccctgcacgcccgggggggtgcggggttggcccgagcccaagacctgacacccgacccccactaggggtagaagcgacgaaggtgttcgatgttccacgggttaggcagctctgtgccgtcgcccgtggccagccgaacggagcccggccgggggacgccaatcactcgatacggaccctcccacattggtgagagcttgctcaatccagcacgcgtttggacgcggcgtaggacgaggtcgtcgacgcagagtgatcgggcccggacgtggcgctgatggtagcgccgcaggctctgctggtagcgcgcggctcggagggccgcgcgccgccttcgctcttccaagtagtcgaggtcaaggagcgccggccttctttctgtcgctcgcaggcctcccctttcgggtggccagcgaaacgccctcgacggcgaggacatgaccctcgtcgtcggaatgggccgacctcttcttcctcctcctgtcccgccgccctgtctgagcagcggatccgggggcggccgaagctgccactccggaaccggaggggttccaggtccatgcctcctccttacgagccactcggtccgcaagctaaaaaagctccgcggtagtctggggctctttagaggcaatcttttcgagcatgcggttgtgccgcacaccccccctgaacacgtagatcaccgcgtgtgcagggatgcatggtatggtgttgcggacttgacagaaccgctgaatgtatgagcgaagtgactcatcatcccttcgctggactgcatgtaagtccgcttctttacctgggcgcggatatgtgccttgaaagttcatggtgaactgttggcacagatcctcccaagagtggacggacgcgggtggcaagttcattagccaaccccgtgcctgtcccttcagggccatgggaaagaaattcgccatgaccctgtcgtcacccccggcggcctcgatcccgatcgtgtagacctggagaaactcggcggggttgacgctcccgtcatatttttcggcgatggtgggccggaaccttgggggccaacggacgttccgaaggctcgccacaaaggctctacagccgacaccaccaaccgggggcacggagggctgatccccgcgtccgtgttgatgtgacactccggacgaggaggcgccctccgttgcgtgggcagcacgtcggccattacgccggcgctcgatactgatgcgggcatccggccccccacgcagatcttcctgggtcggaggcgctgacgaaggagtggcggccgaatggcgagcaaccgccgccgctcgccgcgccctccgccttgatgacacggagccggtggtagcagcgccagaggtcttggtggcggaggaccgcccaccagcacctaggcgctgccgtgccgtcatgaccaagttggccacgtcgtccagccaacgttgggctggagactccgggtcagggacaatgggcgggtgacgtaggagcgcgcccgcagtttggagcgcgccctgggcgtgctgccatcgccgtagacgaggaggcgacgctccccatctcgccgcccttccccatcacccgtggatgtcgaagtcgcggatccttcgaccctctcgagcgcctcctcccgcctaggactttggcgtggagggggcggtggagtacgagctcgacggcgtgggttcggctccccgtcgtcaccgctaacactcggagagaggctgtgcgcctttgcttgttcggccattgggctgaacaggaaaagcttggcgcacacgaaagagtgcgagagcttagaagaacacacgcagaaccccctacctggcacgccagatgacggagcgtggggctcctcaccgggagaccgcgcaggcccccctttgccggttcggccgggggccctgggtgagattctaagctctcggtgtgtggaaggctcacgagaatggaaaaagcacaagacacgggcgatgtatacaggttcgggccgctaagaagcgtaataccctactcctgtgttctggtggatctgtgtatgaagaagctacaaagagctggagagccagagagctcttactctagaaaccctcttctccccttttttcctctcgtgggatctactctccagatcctccctccctttctaagtgggcaaggtcctccttttatatctcaaggggataccacatgcaccatctctctcttttgtgtggggacttatcctatcttttcataaatggacggagatttgtatggttgccgtctgaatgaccttctgatgggacggcccatacctacctccacttccgccggaagcaggcgcgacgtgggaacatggctgtctgctgacgatatgaccagtgtcagaccggtcacaaatcggtcattcttgtccaccacgcgtcagtttatcaatctgcatgttcgcccttcttcatacaatatcttgcttgtaatggttaggatgaagcctggcatatatctgaccgggactaacgtgccatctccaggaggtaacacgccggctccggctagggacgagtgcttggaggctctcatcttgacgggatggagcgaggcgtgtgtcagaccgcctgtcgccacctaatccacgatctgatcggtctgtgactggtcacagaccggataaacgagcgcgctgcactgcgttacatgcggcgtgacgcgcttgaccaaaccgcaataaatgcggttaggtgagccccgctgcgctcgcctaacccagacacgcggcgcaaaacccccaaggggtcggggcgcctcaaccctcggggccgaaacgggagcggtccgacccctcggggagacaaagaggggggcggccacatcaccctcgggcccgacccccccgagggggtcaggtctcgtgggtgattgctgttgcccaagcctctagtcatgatacttccggtcccatgtcaccgacaatctcgatcgtcgatcgacgtcgtctcgctcgtctacttgcacgatccctgcaccggatgcaccgcaccgatgagatgtgtgctgtcgttggctaagctcgtttgcaccctcaaaagtaacatggatgtctgcatgcatatgggccgtgtgtcgtcagaaattcagaagctgtacgtacgtacctgtccagtgctgttcctggctcccgaatagaccgtacccgtgcttgctttggcattttgtttctttcctggagaaagttcctggatgctatttctaagctgtgtgacagtgcgagctggctcttccagtattgcgacactcctgcaggcaagttgtccaagttgatggttgcaaaagaaaaaagttctccaagttgatgtttcagagatattccttcaagttgagaatgggatcggctagtatggccggtttgcctgggccaatctttatatagctttgtagccttttatatttatataatcaagttactaataatcgaaataaatagttgaagtagtgatatggtttgatacagggcatatcacgaggaatcagatggactacttgtcgtgatctttcgaggccaagataagtttcatttatcaagatagtgcgaaacgcactattgctacgatcgaattgtttcctttgttcccggtcatgggttgggggaccagaaaagtgcagtcatattctcatatgggcggggacagtagtcacagcctcacaggagtcctacccaagattttattggtggttaacttgttgttcggcaaaaacattaggaaagcatgactaaaacgccgactccattgtgattaattattaatttatattgtgatatgaaatgatctagtactacatttgtgaacaacgaccataaaaaagtttgaaatgaaatttgtgtttgatatacacgtacgtgtagctaactttttattaatttaatactccccattttaaattataagtttttttgactttggtcaaagttaaattgtttgaaattcaaccaaatttgttgaaaaaactagtagcatttttaacccaagaaaaatatattataaaatatattcaattagcgatttaatgaaactaatttggtgttataaacattattatatttgtctataaatttgattatacttaaagtagtttgatttttaactaaagtcaaaacgacttataatctaaaatggagtaagtagccgacttgattgtttaggagttttcttacaaaagaaaaggatagttgatgaattcattagtcccattatcataccttgtaagtattctgatccgtttcaaaaccatactaaggctgtgttcggatgcgccttttcccaacccctctctctcgttttctacgcgcacgtttttcaaagtgttaaacggtgtgtttttttgcaaaaaagtttttatacgaaagttgcttaaaaatcaaattaatccatttttgaaaaaaatagcaaatacttaattaatcacgcgctaatggattgctccgttttccgtgatcactgttccggatgggaacttgttatagcgaacacagcctaattgtcttgttgaaaaatactaagacttgaatatatgttaattgagttttttcccatgctgttgttaaacctatataaattggaaacctttttataagaaaattcccatgttaaaatatatctagcagttgactattagttaggtggatatatgattctagatctattgaaaattattgttaaaaatatacagtcgaaaataacatgaactctttaacttttactttgtctctgaactgaataaaacatgatcaatatcgtggatccttccgttgatttttttttcaaaaaattagaatcaataaatcaagctgcacctagagttttccagcacaaaaagctttatatcgcatcatctttcagagcaaagatcgaagaggccagaacttgtgttgcaacaggcgcaaagcacctcttacttatgctgccatagtattttactacatccgtcccaaattagatgtcattttgatattatactttcgtcttatttaaaagattagtgcaaatataaaaaaaataagtcataccgaaagtacttttgataataaagtaagttacaataaaaaataaataataatttcatagtcttgtaaataagacgaatggtcaaacgttaaaaaagaaaacttaaagcagcaagtattgtatttacttcttgtacagttttttcttaattgtacaagtaactttttactcctactttttccaatgaaattggcacgtttgttgccggtttaaaaaaaagttgcacctaagttggactctcagttattgttttattaatttattttaaaatttaaaatggatatttagtaagtcgtaactaatagatcatagaatccttatttggctataactctggaacatagccaacatatttattgtatgattaaaattatagtatttatactatcaataataatagcatgtataaaatcaggttgacaagatttattcaatctattatacgaatttacgtatcatgactattggataagaagttgcttatccatgttcattactagtcatctctaccacttctcttcacatttaattagatacacatcatgagttatcttaactcatttgttcaagttagtataaaattaccaaccattggatcaatgagtttcttgttcttatttattaatcctctcttatgctaagacatttgattgtgttagtataacattatcaaccgttagattaagtggttatttatccgcattcattagtcatctctacccctcctattcccctttaactagatacacataatgagtaatcctaatccatttaattatgttagtataaaattgtcaaacgttcgatcaaatcctaacctatttgattatgctagtataaaattatctatcattggataaagagttacttatctgctttcattagtcatctatgtccctcctctccacctttaactagatacacataatgagtagtcctaatccatttgactatgctagtataaaattatgaacagttagataaggagttacttatcttattcattggtcatctctagcccttctctctccacctttaactagatacacataattagtagtcctaatccatttaattatgttaatatgaaattattgactgttggatccaagagttacttattcgcattcattagttctctcttatcctaatccatttggttatgttaatataaaattatcaaccattagaatgggttacttatcggtttatattagtcatctctatcccctcctctccacttttaactagatacacaatataagtaatcccaagtgtttgatcatgttagtataaaattaccaatagttagatcaaggagttacttatcaacatttgttgactctctcctccctaccttttaatacttatatatgtagtaacaactcgtgatgaggaatacgaactaaatgggagatcgatgcagtacaatcaaattgcagtatctaggttaaacaagcacgtaatattttgattttatattagtacatattcatttcctatatttttcttcaatgaaatgatgctttgaaaaaaaaaaccttgaagcaacattttcatccgataattttaaatttcaatctttacacaatgctaaatttaacaaatcccacagctaagacgtggggtattttctactgttgttgtacactatagtaggcctagtgctactacaccacttggagagatagaggtgacaacaaggttttttttattagtatgtttatctaccctcccatgcatggcagacaattctatgggttactaaagaaattgtgtaattggttttagcatttggatgattcatcaagagtgtaaaatatatctcttcatatcaccttaattgtttttagtcttttgatgatttagcaagagtgtaaattgcacatcttcctcctaaaggcacaccatacaacctaatcatttataacctttggataattgataaagttacaaaaatatataaacatgcacacaaaaaaatagtatagtaggtaagaaagaaaattttagaactcatatatactatattatcacacaattctcccacaacaacacgcggggtacccatctagtagtaatagaaaacacatggtaaccccatcaaactcaaacgaattattaaaataattagattttttttcataaattttgtgtgcttttcacggtttaccgtaataccaaggttactgcttgataaccgctcttactgctagggtgtggtaacccgagaacatattatgtgtacacaggcttttttacacatcgtgcgcactagctaacaaagtttaccaaaaatcattgaaaaaaatttacatgtactttcaatagtattacacttatgtgtaaagttttaacctcatatttgttatgttttagccgcaaaagaataaaaatttgacagttttaaaggttataaatctgacagaatttttttatgctacgtgtatattataaatgtgaatatgagacattacaaacaatactattagaagtatatgtacaattttttataaaaactttgataaaatttattagtcattatgcacgatatatacacgagaagacttgactcggcctcttacgataaggtaaatcttactctgttgtatagctgtgccaaagcctatgcaactatctttatctttgacctagtgtggaagagtctcaccattgattatgtatttattcttatttattatgtttatctacttttagctacttctatcttttattcttatatatcattaaatatttgtgcctttatttttcctaataaagaatggcactaaaatactacgccttctttttccaaccggaaaaagaccccaagtcaccatcgttttttacaccgctgctctccatttgctccccatgttcccatgattccatcccggttcctgggtcaacatgaacaaaaatcaaaatccacaccacacacaccatcgtcaatcacactcaactcgcggtcatcacacactacacaatcagtgtcccatagctaaaaggtccttttgattatgtttttagcttattaactacacgtaaaataaataaacatgattaacatataactaattaaatactcattccatctacttttgatagttatatttcatcttgacacacagaccaaggataaataagtctacttatcatccatttaaacatgttactagtcattcctcgtaacaagcgattcattaatatttacatttctcgatgcccatgtaggcagttttgtgtggaagaatggagattaacgcattaaattcgagaaaatcattaagatgataggttgttggattgaaatatgtctatcaaaaataatttttttagatttagaaatatgactgtgaaaaatagatggagggattattaattaataaaaccctaaaattagatttatttgatttttttaaatatcttctatatatactcattctattttaaaatgtctaacgccgttaacttttcgtgtagcgtttgatcatttgtccaatcaaaacatatatatcatatattttgttgtgacatgttttatcattaaataaaatataatttaactcacatttttacatatttatactaaaattttttaataagacgaatgatcaaacattgtacgaaaaattaacggcaccatactttttcaaaaaaagtaatataaagttttcataaaaaacgcaccatttaacggtttgaaaacgctctccctaaaaacaaagagatagccaaggctagtactccttccgttttataatgtaagtcattttatcattttccacattcatattaatgttaatgaatctagacataacatcaatataaatatgaaaaatgctagaatgatttacattgtgaaacgtgaagtagctgcttagaacgcgccccaagtcaatgcccccctccttccctactccctatcaccggatgcacccgtgctgatatttttgacgcacgcgctagtacgctacggtcagcaccattcaccaacgccgcacccgcatgccagcctgcgccgcgcccggccgtactctaccctgtacaacagccaaaccacctcgcgtcctcccgtccgtccgtgcagtgcaccactggccggctgggttcccctgcaccgcgcggcccgtgtgtctcccaccctcccgtctcgagtctcgactcctctccccgtcccgacccgacacgtacctccccttttctataactacccaccaccccgcccgggcgctagtagtacagagcagagcacagcagaggagatcgagcagagacagacagacccgcaggcggaagcggaggcagggcaggcaggcagcagcaacaatcccccacctgcgcgtgtgcgtgtctgtttcggtgcttcctcctcctcctcgccatggcgctcctcctcctccgacgcggcggcggcttcgctgcggccacggtcctcgcggtcgtcgtcgtcgcgctcgtcctctcctgcggtggtggcgcggaggcggccgtgagggacctcagggtcgggtactacgccgagacgtgccccgacgccgaggccgtcgtccgcgacaccatggcccgggcacgcgcgcacgaggcccgcagcgtcgcgtccgtcatgcgcctccagttccacgactgcttcgtcaacgtacgtcctcgtatcggtgatgcgattcgaattcttccgtttctcctcctccgccgtgccgcgaaccgatctgccctctcgcggtcactcttcgtgggtttctgtgtgtgtgtgtgtgtgtgttttgtttttgtttggtttttctctccatctgatcgggcgatctgccgtgatttggttcgtcgtgttcgagcaggggtgcgacgggtcggtgctgatggacgcaacgccgacgatggcgggggagaaggaggcgctctccaacatcaactcgctccgctccttcgacgtcgtcgacgagatcaaggaggcgctggaggagcgctgccctggcgtcgtctcctgcgccgacatcatcgtcatggccgcccgcgacgccgtcgccctggtacgtacacacaccccctcccgccccgccccgccgcgtccacgcccactctagtagtagtactagtagtactacgtttctcttccattttcctcgcgtttccgtgcaaaatccgctgctccgcctctgcctctccccaacccggcatttccctcctctcaggaggcacccagcctcccccaggcaaaagacaaggaagaaaagtgccaaatatctcgatcgttttttgtcatggctggctgcccgctgtgcgatgcaacgcctatgcgtaacgaacaaaaagttagttcatctcttcgctgcatggttggtcacccccaacccaggtggcacaacacagccctgacctcgttgacgaaccaacgagcgattgagaatcgcctcgcctgggagtaaaatccggcggttggcgctctcgtcatcgtgcgtacggtggccgtagtcacgtgtgtgtcacatgccgtttcatatgaacttgaaatttggattactccgcatgaattccattcggaatcatccaaaacaaaggcgtgtgtgcgtgtgtttgaaaatcatagggactgacgaaaatctccgaaagaatcagtgacccgaattgtcaaaaccatctttcgttttcctctcccttatcctttcatgtgcactatagtcctatgcccctgatagggacggtacagtgcatgtacccgtgctccctgtaaccaccacactgaacatcaagcgggggcaaggttgcatgaaccgtcccctcggcgtgcacaagacaagcgcgtttgacgtagccgccgtgcagcgagccgggaaaggccggacggtgggggagctaggggccatggctacgtacgtgaagccgaacggccggagctgcagttgtatagtcctttttagacttttccgtgcaggcgatcgtgtactgtgtcggggtgctgtcaaaacttgtccttgttgatggctcatcgccgaggggaggaggaggacctaggacggagacaaagcagcattgctttcgcagtgggtcacgctgccgatttgtcactatgctagattgctagctagccatgttctttttgagttttacacttttcacgcggttgacatggagccgagtatgatttatccttccgttgcattttcattttctgacatttgataacgtaaacagcggctcttaactgtactagtaactgaactgttctgtcatgagtgggccgtactaatttggatgtaagcaaaacacataatgctcttattgtcattacgatcttgggttgaatttgctgttttgcatgcaaatgtacaaatgtagatacaaataaatgatcatacgttgcaatcaatatccatgtctgcacaatgctgtaacattggaagatttgggttgttaatttccaggttcgtttggctggtcagtgaaattattgacttgatttgactctctctcctcctttcttgtgtctgtatcacagacaggtgggcccttctgggacgtgaggcttgggcgcgaggacagcctgacggcgagccaggaggactcggacaacatcatgccgagcccacgcgccaacgccaccaccctcatcaagctcttcgccggctacaacctcaccgtcaccgacctcgtcgcgctctccggctcgcactccatcggcgaggcccgctgcttctccatcgtcttccgcctctacaaccagtccggctccggcaggcccgaccccaacatggaccccgcctaccgcgcggggctcgactcgctctgcccccgcggcggcgacgagaacgtcaccggaggcatggacgccaccccgctcgtcttcgacaaccagtacttcaaggacctcgtccgcctccgcggcttcctcaactccgaccagacgctcttctccgacaacgccgggacccggctcgccgtgaggaaattcggcgaggaccagggcgccttcttcagggccttcgtcgaagggatgatcaagatgggggagctgcagaaccccaggaagggagagatacgacgcaactgccgtgtcgccaatgccccggcgccgccgcctgtggaggcggaggtggcggcgacgtccaaggcggtggtcctggtggacttctgacgaacgagctgctagtcccctgactccccagctgttggtgttcgagaggagctgctcagatatgagagtgttgtggctattcatatatgagtttttggtccgatggcaggtttgcacctacctgtaagcttgtgatttcagggttacccgcttattgccgattattgaatggtgataaataactgagaaatcgagctaatgatcattgcctgatgtggtttggtctctcctttctagtatgagtgataaggctaagccaaaggtggcatactggcaccaaagaccgggtctggttaattctcggtaatgcaaagttaactaggagtacgtagtagtagttcataaatggagaggtctattccaaacagtgggcagcttagaaaactagtggtagccattgacattgcgtagaggagcacaagagcaaaactgtcaaaaaagcattccaacaccaactggtaaataagcatggtagaaagacaaaccgacaacacacatgcataatcgtatatacaagatggcgaggtgcaatgtattgtccatgcaaatgctactttaagaaaagcagtgagagctatctgatctgatactctggaaaagcagagatcagctatctaattatacatgctgtccatgtctattgtgagctcggggcctacatatggggcccctgcaacacggaaaccgtcaggcaagtctgcctcttccagtactgcaaaacctgagagaaagccatcacactgtcagaaatctcaacagatcatcattccacggtcacctgtgctgctatgcaaattagggaccttctatcatcatttgacaaaaaatcctttaatattttagaccgcccgattactttatgttgtgtactactcccttcgtcaaaaaaaaaatctaaaactagatttgacatattctaatacaatgaatctagatatatgtactagcctattaggttttctatgggacagagggagtacaagacaaccaaaccttcaaacccctcccttactctctctttcttccgacttcccctcatcgccactaccaccaccatcgccgctgccacccaagcttgtcaactgactagaagtggtcaacaacatcggtaagatccctaagctagcctcttccccgcttcctctcctcaccttgtcctcaagccggctacccctgtgccgccatcttcccgtggctccccataactggatccgccaccacctcctaactttgttctacatttccccaccagcccaccggcccactatccacttccgaccctgtagttttggcaataccgcggtcgccttgctgcccacccgaactgttgcctcctaggttatcctctaaaactaacgaacttctctaacctaggactctaatccgtaagttctctatcaaagtttggaatgttgccagtgttggaaaagatgaggagatcatcggggcttaaaaaaaaagacaggagcatgaaacgtgaagcacacccaatgatccaaaatatgtaatatttgaaggtattttatatcgaatgaaggttagcgattcctatgcatgcatgttgtgtgcgtaccagggagagaggggatgggaatgtcggagaagtaggtggacggccggccgaggtcctcggcgtagggcggcgctagcacgtcgaggagcgcgcacggcgtgacggcggtgagggagtggatgttgccgccgctccgcgggaacaggaccgacgccttgcacggcgcctcccgcatctcgtcgacggcgaccactcgggctaaaccacctgcatgaaaaatactatattcctgtgagaatttcgttactgtctcttcttgagaggattggtggacttttggatatcttgccatattggaaagcagtgggatggcgtcacttacttttcttttttttttcttagtataaaaacggcaatttctgatactactagtagtgcagttgtttcattctatgtacactgttgtttttccaacagcacgtggcttgggcttccaaccgaagtaagctagtagtaattcaaaaattaatcgacagaggctgcaagtatccaaaaagttattccagtttcaggcgagagctatcttttgcaaattccaaaccattaaaaactgtatcaagagtagagcagtggacagggagagataggttctcctgtttatattgctgaaaaaaaatgctggtttggtgagacatcggtgggatttggctatctgaaaccgtcttttacaaggattttgtagggaggtattaatctcatcctgcttgtaaattatcagagacctttttctgtccttgatcatagccaggtaacctcaaactagtatatgtaggtgagacaaggaacaaatgttagatgcagttgacaacttgacatcagaaaacgatcgagtttttttgtcgattgatcatcagcgagcgaatcgacggcaaacaggcgcatgcattcgcatgcagctgagacaaatgcttactcttccttgggcccgagcacgggggcgcgttcgcccagtcgtacgacttgacccgcatcgagccgtagagaagcttgctcagcaccaccatttgcgggtggtcgtgcagcggcagcgtcgcgccggccgggaagcagaacacgccgatctgcacgtacgtacgcagccgcgcaacaccgccaccagatcgagcgtcaaattggtaccatctcacccttttgcgaaagtgcaaaaaaatactaagaagaagtgcatcgttgcgcgattgcgcgcgcgtgcatgcgtaccgagaaatcgtcgcactcgtggatgtgcacgtaggtgatccgggtgaacgcccgcgccgagagaaaccgccgccccggcgggctcctctcgtcgtcgtcctccgaggacgacgacctctcgccgccgctgccgccgccttcgatcccgacgtccgccgcctccatgccatctgcaaaatcagcaaaatgaaccaacacattaattaatttgcacacgtatgaaccaagatgcaatgaaagataggagtataacgtaccgagcaggtcttgcagccacctgatctgcttgagcgtcggcaaccctgctttactccccgacgagaagacggcgtcgcacgcgtcgtacagccgctgcaccttgctctggtggtcgtccatggccacgcgctagctgtgctgccacaggaagcgaagtgacccggctggttttaactttcacacatctacactacacaaaacaaccgagcaacctgcacttgtacacacgtatatatccagcgcgtagtacatacgtgcgaccgcagaaagctgacggtgagcgcgcgtggcgattgagagataactgtgcaaatgcaagtgtgtttcgtgtagtgactacgaagctttctacctagcttcgtgacgtgcgttcgtgcgttatgaggcaggaagaattcaagaatttcaaggggatcgaagggtcgcgagggcgtttaccggcggtacaaaccgtgggcgattcgactttacagggggctggctggctcgctctgcacgcacgcaccggtaggcgagctgtgcgatctcctctgctcgtgtacatattgtgtggcttgatcgatgcgagagtggatcctaaatcctcgagaagatattttctgtttatatgtatgtcatttaaatgactatgaaaaaaattaaaaaatataataagataattaatatataataaatcactctataaaaataagttaaaatttaatttctacatgttacaacgaaaaaaacaaattaaactatgaccagttaacgtatattcacagtcaaatttatttttttcgctataacttgtagaagttaaatttgaccttgcatatttgtgaaataatttatcacatattaatctatctttttaatttttttaattattttcatgacatgcaaataattagagattagctagagttaaaaatagttttccgttgatacggtcatcacgaaactactgttcgcgatactaaacaatcggcgaatgcagctgggtaaataggaacttttggtcgcatggaatccggacacggccacacgggccattttatttttcggtttttccatgtgggcgtcgctgttcggttctgcgaaaagagtttgaaaacggcgtaaaaataatgtacgctaaattcttgcaggggattgattgatctgaagaggggcagacgagcttggatgcttggttgcctggttggaacttgctactgcgggtcggttattttatatcgatcggcatgcaagattacaaaaccatgggaacgctgcactgtgcatgcttatccgttaagcatgcggcccaggctgggataatactactcacagaccgggtcgttcttgggcagcagtttaatactagtagtatattcaaaaaagattttgagtaaaaaattcagttttagcagcaagccattgggtgcagtcgtgcagagcggtttatacgctctggagctggagcaaggtcgctgccctgtttgcagttggcatggcggcgatcgatcggagcacaaagttcatccatcggacaacagattgacccatgatattacgccatgcaacgcaactccaagaggacaaagacagagaaccaagaaaccgaagcggaagacgagaacaccggcgccgtgtcgtgcgcaaccactctgcggctcggctccgtcgtcgccgaccgtttccgattcacgcggaagcggcaaaacgctctccctgccgcgccgtctcgcgttccagccaagcgagcctcttgcctcgtcccgcgcgggggttcggagtagcttttggctactttataaccatccgattacgggtgcacggtcgcagatcgtggcttaacttaacacaattgcgtgtatttttgcaaaacgtggcattggttggcgaggcaacggcgagttggtgacgctggcaacggtttccggctccggcggacggcggcgagctgctggagtaaagtggtgtgtttgcaatccccatgttcccaacccctctccctcgtttttcgcacgcgtgtttttcaaactgctaaaccgcagcttttcttgcaaaagtttctatacgaaagttgcttaaaaaaacaaattaatccattttttaaaaaaatcagcaattatttaattaatcacgcgctaatagactgctccgtttcccgtgatcactgttccgattgggaaccgcttctagcaaatcctgctcatgcttgaactaagaccttgtttagatcctccaaaatggcattttgccattttgtaacactttttgccattttggatctaaacactagtagcaaaagttggtaatttggcatttggcatttgctagtccatagtagtaaattgtgccaaaaagtgctttgggaccactccttctctctttctctctctctcactttagtgctagaatggcaaaactttaacatgcatctaaacaccaactaatacttttgcaatgccaaaacttttgccaccaaaatttttgctatttgccattccaaatggatctaaacatgccctaactaatctgaaattggacagacgtgtttggacaaaactctgaatttgatagcggcaattagtgcgacatgtatatcagaagttcagaactaagagcacccgcaatggtaaaataaggtgctctctataaaatatgtacatctcagcaatagactagattaatagtaaaccacctcaatagtatgtctacatgggtatctatagctctctaatccattccctcatttttctctatagactatctctaggttagtagatagttgtgctctctctctcttcatttaatctctttcaagtagaaaaatatgctgatatggatctcttgtagagagcctatagataaccattgtgggtgccctaagctaaaattcctctgaaatcgttgaaaactgtgtctcatccacaatctttcatcaaagcgtacgatataatagtttcttatcacggtaaactgaaacaagcgagagtcagatatttaccggatgaaccatcactccgtcagttcgtcatcagcggaagatagcaacaagcattgcagcaccaaagtctaaagatcagaccacgtcacgatctgccggcgacggtgggaattggggatgcaggaggttcaaaagttttgcaaacgaaccctcttttccaagtctatttgcccattacaactcctaagggggttcggaaaataaaactccgaaccccattggttattttccaaccattggatcacatgtagtcctcctctgacctctcttcttccccacagaggcgcagacacgctctgtctctcagtcttgagacaagtgcgaccgtaaaatcaatctatgattggtgaactacttatctgaatgaatttagagagtcgtatttaagacaaaattatatatgaaacatagcaacagcaaatagagcaacgagtactttttttttccgaacgcacaaagggattacgcgtcaatatattagaagaaaaatagttttaattacacaacgcaatcggccaaacaggcctatgccgggaggtgggggaggaaaaaccaagaggctactgctaaacataggctactcaaaacaaacgagagatagaaggctgagccacgctacacttccagtaaaccccaaaagctgtaattcttctggaatcgtagaaaattgtggatcatctctaaagcactcatcaaacatgcattcttatctcaaaacactgaaacaagcgacagttacatactcaaatgaaccatcactccatcagttcatcgactgaaacaagcatgaactgcaagcgaactcacgatctgcatcaccagcggccgtagccgacggcggcaatgacgacggtgggaccggtgaggctgggaggtgcggaaacttttcaaaacgaaccctctttttcaagttatttacgcgttacaacttttcccaaggggtacggataagaaaactccaaaccccttgggtgttttccaaccccgcagaggtgcagacacgatccagttctcatcaccggcctcttcgattccaaaggttccagaaacttctacaaccataggtccctcgtcgcaatggaggttaggagacttggggcatgcttagctccactccctgtcgctatgttcgttcgctctatcgtcagccttggccagtggtggatctattatgggggtgggggcttaagcctccactactaatatgtaagtttatctagtttgttcagattcccctacaatttatttctagattcgttcctcggccagttgtcctgccgccggaggacgccgcccctgacgtcaataaggaagaaggtggcgtacatctggtgatcaaccgatgggcacggttacatggtgggagcacggaaatatcatgagttttcaagcaccggtgggcacagggttttcaatttcaaaattggtttttataccgggggtcatcgaaatttcagaaattttgagccgaaattatttgaaaatttgacttaaatttgattaaaatttgaccaaatttaaaaaatataaaaaaaagagaaaattttgggcgagatttgagcatgctggtggggggtgaaatttctgaaccaaaatttcaaaccctgggtgggcggtggaattgaaaatctctcgaatcaacatcagaagcaacgtaaacgtgcgagagctgacggcatttgcaggatatcctacgtagattttgatagtttggatattgcagcgtcaaatcaacatcagaagcaacgtaaacatgcgagagctgacgacatttacatgatctgctgcgttggttttatctgatgtatcatgtatggataattggatattgcaatgtcaactagacaacggaaagctatggtaacatgcgagagctgatgggatggcgtttacaagtttatctgattggatattgcaatgtcaaactctataataccccttctggaagcaccagggttgcagaaaaaaaaatcaactctgacctcccgagggatccatctggtcttctctctgtgatgtgtgaacatgtatggaatacaacaccagtagagttgaaaacctctccgagaagagtttaaaatggcattcacattctgtgtacatgatatttcatccgttccaaaatactccatgagcatattctttggaaaaattttgataaatgaaaaaaaaaacttttagtcatttcaatgatcaaaatttgaaaaaaaaaattgagagcatggtacaaacacgaacactcacatacacatgctcaccctcatttctatgaatattttgaattttgagttacttaaattcctgagcatcaggggcggcgccaggaaaattacaaaagtagggctgaatcagtgtatttcaattagacacaatatatgttcaaaatttttatatagaattcaaaggggattttggcccgagcctagggctcataccttaactgccctaggcccggctccgccattgccgagcatctcattggctaaaaacatatagattttcatgcattgaaattagtgtcctagaaatatttatatcatggtataaattttaaatcacataatatttatatagttaaagtggatggactaaatgatgtcctagcattacaacggtggcttctaatggcagtggtctgagatttggtgattgtgataagctgcttgtaaaaaatgttaccgcccctaaccccacggcctagttagggtgaaacgagaagccaagggcccatgagcccatcttctcgcgtctcactaagaaaaaggcccagtacaacatacaccaagcccgtctcatcgctcgcgtgacaaaaaggagaaacgagctgccattccatttccagctgtgactgaccgtgaggcacagacatgcttcccactggtatttccagaggtacttcatagttccttcccagagctaacaccttggatccttattgcaagactatctcaaagcaaagttgtcagatgaaagtagatgatcccgaaacgtcagcgatggatttcagtactttacgaactataatcaccaccagtgtagagaaagaacatcagacaataatccagaacccttcattcaggacaaacaacaattacaaacgttgggtgcactagacaaatgtgcaacgcaatgcatccgatggtagtaaactaactctcaaaatattgggctaaccctaaaaaacaatttgccttccggggtactaaaaaatgcctcttccagcttacaaactgtcctctccaccacaaaccgaaagaaaaggaaagagaagccctacactgcctagatcaaaagtaaggaccacctaaccaaacttgtacagatgctcaatggagatgaagcagcgaaaaatgataaatcattcaccctctccaagctgcagctgctgcagcagcctgttcatactgaatcatgctccgtttgctgtataaatacgaacaaatcaacaaataacttgattatataccatggaggtatctacagaaggattgagttgttgctcctgatcatcatttcttattgttgtggacagaatgtcggaaatgaaaccggtcgctcacaacaaggttttctgcaaactcaaggatgggggccatgatggcttcagcatttggcgcgactgattctggaagactgggtaggcagattggtatatgttcaccattctcctcagggtgaaaatagaatataactgctcggcagaaaataaacctgcaaattaaaagaaggaatatgatttggcacaatgcaataaatatggaacaaaataatgtcttggaatgcaacatggagagttctgattatgtacaggtatggtgctgtaaaaccatccttccactgttcccttttacacctccatagacttgttcacaagcccaccggcggtttgcaggaaatatcgcaatggacaggagctcaagttgtgtactattaactagtcatgttaaataaccactttcatgttttggaagaggtcaagatactatcttcaagcgatgatgcaatgctaaccttccaaccaaatggcagatagtcaaaacattgaatgtggagatatatggaaaaaggtacctgacgatcaggcgcctgagaaaaggatctggtaaaatttgtccccagacgttgttcaatccaacagatgtgcagaggattccttcatattgttccaaagcggagaaaagtatgatttccgcgttagcatatgtatcctgaaaaccaagcagaagagctcaaaatatagaaatcaatattccacaaatactcgactcttcaaggaaagtgcatacgctgtctatgtcagaagttatcccagctaattggcagaaggcttgcattggagctgtgaggaagtacgtaaattggcttccattactcgtggattccacaccaggcattgctgatgctatcctaggtgaaagtagcaaggcagctggctctcccttctctgcattatgtatagcctgcaattatggctcatataagaaattcgttctcccatttttttaagaacagggaaaaaaattgttagaaacataatgaaaagagaaaacccttcgtagtattaagttaattatcttttttttctgaaagaatattttgtttaaagtttttaaaatgtacttggaaaaatacagaatcaaatgatggattcacaagctactatggatagccagtgcctagattttagcaatacagtgatctatgaaaatggaaagaaaaatcatatgctctgttgaaaaaaactactgcagcttgctttatattacagtaggttaaatagtaggaacttcaaaacaaatgagaatacaagacccttcatccacaatgaatgtaaataaagccatataggaactacagaacaaaaggcatgggcaatccagggtagtaagtttggctctgaaaaataacaaaatactcatgataatgattttcatctaccaagctaagattaagttctgacaaacctgccttgaatgcatgactattttcactatcgataacaaggaatagtggatatcttgtaaagggaatcagatcttctggataaagattgtttggacctggtaaagatacagtcatgtcagaatagaaaatgcatactgtatcaacctttcaacaagaaactagaccatcagtctagtcggacactaacctagtataccataaaaagtgggcttaattgaactatatcattacactgagatataattccagaaatcaaccctacaagaagacagatgctttacctccacttccacggggaccaagccatagatgattatctgaattgccattggaatttggcttatcgatgggatacacggaagttgcccttgcatatgatgagcttgaggcatacttttgagaagtaatgttctgctcggaaaaacctgaaattttgatcactaaagttagaagggtaagaacctaataactactcaaaacaagaatgttactagatgttttacagagtcagatcaagaagggaacctgatgctgatagatagacaagtaagatgctatcttgagaaagctcctcacagactgtggctagaacctgaaattacgaatttctgatgtaacactacaaaaaaggttcaaatagcaaaagaacaaatcatatggaccatcaaactcgtgaatgaataaaagtacattccaatggattgcaacaattaaccccattgtcaatcagcactgcaacttggcaaagctgaaatattctcacatttttccatttgtgtcatgagaaatggtacagtatactgccaaataagtgggtggttccaccaccaaataaattataatgtgcagcagcagccgatctaactatgacaacatccaggcatgatgaggacttgcacagacttgctaacccaacacaaacgtcaaccagacaattgtattgatataaagctaatgacattgttaaaggggaaaatacgcatccagttcactggatggtgagcataatatatcatttcaagagtaatctcctaaaagaagatccgtgattctatcaagatttgatttccatcttatgtaaaactgagcttcaaagagaacaacatgcataaacaacctaccgctagaagatgagatactgtaggatgatatatgattgccttttgaggatttgcaggaagatttccatcagatatttctgatgataggtggatatcaatcaggccagagggtccactctgatcacttatagtgccattttctgtaagctctttggcagcaatctgataagacccagtgggttcccactccagacactgtagcattctgaaagtgtccagagttagttctgtgaacttcacctgcattacatattacaaaatgtcaagcttgttttcacagtaagataagtgggtcaattattgatggataatatatgtgacctcgtttctgtgatagcttgtcaatacagcttctttcagtttcagtactctttttgaatggaatcgtgcaataggtgcaaggttcgacggaaaagagtcaaacaagttgtcatatctcagtgatctagatcccttgtatgctccatcagctttcaagaatctcccaagctcttgaagcacttgtttccattccttgaagttggttttctaagaagtatgaggtcacaaagttgttatggaagaattaaatggcaaggtgttttaattagaaaggatataaatatgtgattctctattgaaatatataacattgcaagaaaatgggaaatatgtaacaaggcactcatgtcataggctcctaaatgctaagctatcgttttagcataacattcattattcaaccctcaaacaacatatcatttctcaattaagcactgacaaaacaatgtgatatatatgctattgaaaggtaatagagcttgtgaaattgctctagttcatacactttagtacgtagtaactttaaaattatcaaaccaactaaagagaatgattctactttagcagctaaaactgtaaaccatacatgattcgaaatccgttatcctaatgaaatgtacgactcatgcaatgcaatatcccaaatccgaatggtaagacgagcattgaacagtcgtattacttcagttcaccacaaataaagtaagattttaaattttaagttacatactaccagaacgaatttgccattttaaattacatataatcgaattgggaaataaatagaaacccttgattaagcagcagtccaggtcaaaattcccaatcagaattctttatacagaaaaaaaaaagagcactgtacatatcacttctatcaaaatttcaaaaccaagcggcaaaacaaccttcaaatcaacaagttcccactcttcttcactactctaatctagaagttaaaaaggtctccttactccttaggtttcctaaaatacaaaacagcaagcgcacaaacttaactcggggttcccctattcaaagcacgagaggagctaagcttcttacggggtatgccgacttggtctcctcgacgagcgaacggaggcgggaagcgaggtggtccaccgcctcggcccgccgcatcagcatggccacgacgaggaagcgcgcgatgaaccgcagctccttgtaccggatcaggaggccctggtgcctgtagccgccgcccaccaccacctgcgccgcggcggcgaagtacccgcggctgtagatggcctcgtagaacacgtaggcgccgacgagcgagcgcggctcggcggtgcggaggtagcgcgcgtagtagagctgcccgatccgggaggccacctccccgatctcccaccgccgcagcccgcccgcgacgagctcccgccgccgctcctgctgcaggcgccacagccgcgtgtacgccttgaacgccttccggctgtggtggtccaccccgccgccgtagagcggcacgtcgcgcgcgcgcgcgaacttgcggtccgccgcctccgtcagcgccttgaactccctgtacgcgccggaggaggcctcgccgtcggccatcgccggcgacgagaggaggcgcggcgcgcgggggggctattcccctcgccgatttggtcgaatgggagaggggaggtggtggtggtggtggtggtggggaaacgggcgagaaagagaggagagagagtgtgtgtgtgataaaaagggggagtttgttcgagaagagattaaaaaaagtattacgacgagtacggggtgagcagcgcagtgagctcaagctgctgtttgttacagggacgctgtaatttaggtgcctaattgggctcttattagtcaatcatttgcactttgtttaatggcttgtctgcctctactcactgctttggttccacagtgagaaattacccggtatgattttgatttggacactaccaaatctatgtaactatgtttgatttgatttcttaacaaaattttatgttaggcatgtttaattcccaaacagaatttttcgtgttatcacatcgaatgattggacacatgtatggagtattaaatgtagaaaaaaaaataattacacagtttgccaggaaaatgcgagacaaatcttttaagattaattgcgccatgatttgacaatgtggtgctacagtaaacatatgctaatgatagattaattaggcttaataagttcgtctcgtaattttctagcggaatctataatttgttttattattagactatatttaatacttcaaatgtgtgtctatatatccgatgtgacatgcagggtaaaaatttttaacaactaaacgtgaccttataatatgatgaagggaggatagattatactatatttgtgtatgattttgtgataatatttgaggatagaaatgaatgaattaactattgtaaagtttaaaagttgtataaagttttttaataattataatgtttaaccgtttagactggccataataatctataaattataggagaaaaaagtgctaaattttgacgtggttggggcattcaaaggaggattagtaagctgaaacaaattaatcaattggagaacttatgtccgagtacgtaggctgcattctcccccacagcctcgaaagcgatctcaaacgaagaacaagtccacgttaattaaagtgaaaatgaaggtaaccagacatttgaccacccaaccgtgaacgctttcaatgagaacacgacaccgttcagtctcgtcagctcgattcgatagggatatccatttgcggaacacttgacagttgacactgataatcaaaacaaatggcaggagcagccgggctgatgagtgacgacctctactcactgctttgtaaatatgaatatttgtttttttatttagtaaagattaataaaaaaaattcagtcattcaggtgctcatatagatgaatggatagaatacgtgtgtactttaatataggtgaaagtgtgtatgttgtaagcgactgtgttggtattatatttccaaaaagagttaaccatatcgttgtcgtgattcaattttaaattctaagcatttaattggctaaaaatactttgatttcagtgtataaagaaacttatattagagcaagtttaatagtatagccaactactaactccaaatcatatatatctaatataatagcacattcatacaatagttaactatagaaatatattacatcattaatatccggttatacctctcatacacaaataatattttagagtccgtgttgcagctagctataaatatgtaacccgctttcttctctctcttcacttttcttcttgatatgtggttatagctggcttatagccttctattgtacctgctcgtagataccatcagaaaagaaaaacttatgttagataaaaaattaaaattttaaaatgcttatttgaatacaatgagagggattcaccaattgtcctatagtttagccgcaacttgctgcccatgcctagcctagcccccacctccgcttacgccggccggagacggacgcgccgatcgcgacacactggttgaagtggtcgggaaagcttcaggcgatcgcgccatcttcgtacactttgccttgacgttggttgttccatgtcattattccctagctcgcgggcaggtgggcagccgttttcacgcctcgtcattttccggtgaagcagcggtcaattagcactcgctccgctgatgagacgcccgttgcaacctccaactagcacaactggtagtctcctttcctctacctaactgaaatgcaactgccaagaaatcctactagtagtagtagctgtctactgttcatgttgttctccattttgtgtttcagtacaaaaggagcccgagttaattcttgcaagaatttcatactctgctcgggctgagaccgcagtaaccactggagtactcaccagttaacgaaagagggcatctttgctcgattaaagaatggcactttcacttggtatcattctttcacttgccatcattctgctggaggtagaggattcagtgttcagtgcagtggcctctgcctctctggtcggcgcaatcattcggcgcaagtctactcgccccaattctttacagctggagtacgtgcaacctgcatgcaagcattcgccccagcggctcgcttggaacaggttggctccgcgttgccggcctggactgagcaagtgtagcagaagtagtacgtgtaaagagcaattaacaattggtgatgcagtggttagcgattaagtaatctgatcatgggaatcttaatctgaacgggtttgtgctgctggtgttctgataaaaagctgctgttttgcggtgattagttagggcaggattagcttagcttagctgctataggcttttggagctggtcccaagggatgcgaccatttagtagaacacacatcaagacataaaccatgctttcggcatgatttctcccgtaccggagtactcactataggtcacatgaaaaaaagtgaaatggagcggtgattggtactgtgcgctagctagctgcatagatgcacactgtgacacatatgagatagcttttcacttcctaatttcttgacgagctagctatatattgtacgtgcatgtatgtgcaaacccatgaaggagactgtgccctagttaaaagaaagaaagaaagaaccctcagcttagttcatgctactaatagtactaatgctactaatagtattatatgcacgggtctcgactattagatctgtctaacaaacaccttctccacttgtatagtactcccttcgtttcagaaagattttatttttatgtttctgtgttcgacgtttgaccatttatcttatttaaaaaatttataaaaaaatattaacaaatagtcatgtataaagtatttttcatcttctatcatctaataacaataaaaatactaatcataaaaaaaatttaaataagacgaagagattaaaagccaaaaaatagagcctttatgagacgaagagagtagatatttatgcacctcaaataataaatctattcaatgtaccctggcccttggggagagctagtttttgctaaagaaggtgaactaaaccgatctgttagttggaagggacaaacataatactccctccatttttaatagacgacgctgttgattttttctcacatgtttgaccattcgtcttattcaaaaaatttacataattataatttattttgttatgagttgttttatcattcatagtactttaagtgtgatttatatcttatatatttgcataaaatttttaaataagacgaatggtcaaacatgtgagaaaaagtcaacggcgtcatatattaaaaaacagaggtagtagttgaatagggtaatatggtgttctcatgtatcaacactaacctataaacggatgcctgcctaaatcgatgctctttcgataaatgaaaagtacaaatagcacattacattgctagtaagaattgtgttgattcttcaattaatatactctacatccgatccgcgtcatccgctctaatgtataataatttttaaatgccgagatacctagctaaaagttgttatatttgtatagttttatttgaactcctaaaagttgatatattagtacgattttgtttaaactcttgtgttcttgatgaacttaaattgttctcatgcgtaaatatcactcgcctctaattatgctttgcattttggtggggaatagaatatcagttttcaaactagtgcaactatggccctatttggtagggctccaaactctaactcccagctctaaactcctacaccagttggagctagctcctattagcgttggagacccacccaaaagtgtttggtaacctttaactccaaatctgaaaaatatcaaaaaaaaaagaaaaaaaaaggaatccccgctatcgatcggctgtgcgtcgctcgagcatcgtctctgcgcacaccgcccgccgccggccgtgcgccgcccgagcgtcctctccgcgcgctgcctcccttgcaccacctgcccgcccgcgtcggcgtgttgcccgtcgcaggccatgcgccgatcgcccgttgtccccgctcgcgccgaccgcccccgtcggagcaccgtcgccgcctgtgcgtcgtccgccgcccccgtcgaagcgctgccatcgacgccgccgccgctgccgcctgtgcgtggcccgccaagcaccgctgcccgtgcgctgtcgctgctcgcatcgcccgccgccgccgttcgcccgcccgccgccgccgcaggagcgtcgccatcggcccgccgcctttgcccgcccgtgggagatgaagtttcgggggagagagcggggggaggtgaggaggagagtttgggggtagttcaatggtatatttttaaaaatatgttaaaaaattaaagggtaatatgtcttttgggttggagtggagttgtagagcagtaaaaacttatctccacccctgtagttcattttttaggagtagctccgttaactccaccccaaaaacagagaatctggaccgtttggcacagctctggctctaggtaagttgaagttaggagctagagttgtgccaaacaggccctatacaagcggacaagtggtgttaaacacatgtacgctaaggctgtgctcgttagtctggcttcccaacccacacagcatgcacggaaaacggagcattccattagcacgtgattaattaagtatttgctattttttttcttaaaaatagattaatatgattttttatgcaattttcgtatagaaactttttgtaaaaagcacaccgtttagtagtttgaaagcgtgtgcgtggaaaactagaatagggagttgggaaccaagagttgcgaacagagcctaaggccctgttcagtttgatgccattttcaattttagcattaccaaaattttagcatagttgccaaaattttggcaggatttcttatatagttaccaaaatttgacagcaaactaaatatagccaccttttgtaactttaccaaaatttagtaaggttgaaaatgatatcaaaataaacaggccctaaatgctgttaaccaaaccacctcccaaaagcagcaatttgccccaaaattttcggagttccacacgtgaataatcacttcttcgtttcaggcaggaccgcatggctgcatgagcatgaaaaaccctctgtcgtgatctcaaagaggctccacatggaagagaattgaagtactcctactagagactgtgtagtgtgtacacactgtacacggtacacctcaaattttggaccaaatcggcgagatgcaggacaccgtgctcctactgtagcgcatttaacaacacgattcccattgtctccggcgccttcctgtccgtctgtgtccttcttcccatggaccagccggtcctacagtctaaccatgcttcgggtctggctggctcaagctggctggcaatggcaatggcaaaccgtgcgctgcctggcgcgcgcacatatctacatggagactcgtgacctcgcactggaatttttcggggcctgggcgtacgccgactgacacggctggattttttcttatcgtttccatgctcttgactttgatgcatgtcccttgtacaccccctcttctccctggtgtttccatgttactctatgcctgcgcctgagtactttagggagtagtagtagtactggattagtggagagtgggagtacgagtagttcttcattggcccccgttcgaggaggaaacaatggcacgtgaaattgacagccgggggggagtcgtcaaggtgagccgttcgtacgtagtatagctgaccgctgacctgactactagtcgtacaagctgctcctactacgttctgtcactggtacgaggacgtatggacggacggagtagaggagactggagacggagacacggagtttggccgccgcgccagcgtgtacgggctatatgaacgagctattccgcccgtgctagtgctacggtgtgcgtgcaccgtggaccgtacgtgccatgcatggaacggcaggaggcagaggcgcgccacgcggcggaagagatggggttttggctgggcgccttggcgcggcctcgctagcctcgttccgtcacgccgcggcctcaagaatacagcagctagctaacacacatgtccgcttgcggcgcaacgccgcggggagggccgggggccgtttggagaggcggaccctgcgtcgtgcgcgcggcgatgtcgggggagcttatatattgtcatgtcaggtcgacacctatcgtgttgggcccgtttgcctccaattggagagggtccagctttgcgtcgtagtactccgtacgcatactagctacggtagccatagacaatgaaaccaaacaggaccaccacacagccagtcacctcatgtcctccgcggtggcctgcagccggctaataacgcgccgatggggaagctacaattaactcgcgtggacgtgtacgcgtacagcgtactactcttcttcgaaaattgtctacactcgtctaggtcgtccttacctgtcagtacttgattcaactccaaccatgcatctcccatctcttcccgtaagatgtactcctactctgtacagtgtactagcaatccactaaaaccctaaaaaccgtggcaacatgtaatgccttgacgacctggatggcaattgacaagtgccttagaaaaaaaaaatccttgtccagcggcagacgttcgtacgcccgtgctcccggtggcacggcaactcgtcgcgtcaaacgctctgccatcgctgagagattgtccgggcctttttgagcaccagaagcgccacggagttcgctgcttccgaaccaacatgtcacatgtgagtgacatgtcgtagtcgcatcaaaattgaggcccgtgccgctgtcggcgtagcggcccagccattgtacccgtacgccggtgaggagcgcatgcttttaggttcagaaaatggctagtgttttttgtgcaggcactcgtgtttgtgtttaactttggccctgtttgaatccaatggctattttttagccctctctcaaatagcctaaatagccctaaaagatccaaaagggtgctatttgagggctatttggaaatagcccacccaaaaaaactatctcacccaaagggtgctaattggagctattttgagtggggcccactgaaaagtgtcttttctctctcccataggctcacgggattagaaaacgcgacctcctctctctctctctctccgcacgaccacgcgcgcgcaggcgcggggcattttcgccgccgccgcctccactcctcgccggcccccagcagcgccgccgcccccacctcctccccaccagcgccgccggccccgctccttgccgaccgtcaaccacgtcgccgccctcccccacttgagccaccaccggcccccactgctcgatttgttttcttgtccatggagggtggtggcttcgatttcttctccgaaccccactgctcgatttgttttcttgtccatggagggtggtggcttcgatttcttctccgaaccccactgctcgatttgttttcttgtccatggagggtggtggcttcaatttcttctccgaagatccaaatccaagcgtctggccgtcggtgatcggccccggccatgctcctcctccccatgccggcgtggatgcgttggatggatcagtgcttatgcaatggaatgagcagtacacgcctccacagagcaatttgatctctcttttttaaagaaaaaactttattgttttctccctttatgctacaagcatacgagatagagcactgtcctagtgatagagcacaacagcatggcatatgcagccggccacaccaagacacatgcacaaaagatctagtggagaaagagagaaaatgggtagttatgattgggaaagtgtactaaaggtcaagtagctcttgcatccaaacagctcaagggctatttcattgaagggctatttcttgagctaaaaaaatagctcttaaaataactctcggctactcctccaaacagggcctttgtgtggttttcctttctttggtgctttgccaattcgtcaaagctagtgggggcgatcaaaggatgaggaagatggctactgcctttgtgtgctttatcaaaagcgatggatccagtatccactacgaatctagtctaggaagaaaaacaaggcagagcaagtcaattcaggaaagggttaaaaaaaacgaaaagaagagcaaagaacataccaaagccggtaggtccaaagtgcaaagtccaaactttatgtcaaaggtgggcgctgcttttcttcgctagtgcagttttttcagcgtgacaactctgtaattcttccacggagaagaattacgggtccacaggccgtgccgattgggataagcaacccaatgcgcttaacagaccagtccgcgtatcaattattgcatgattctgttcaattttgcgcacacttcaacattttttatcatcttatcaaaccataattcaaacacgaactgaaaagtctacttgtcttggcattcaaaacttacatatgtcatttgcatgtacagtggcgtcttacttcttaggtggtgttttgcaaatgggaaagggaaatgattttcaacccatctttaaattctaaccattcattctccctcttatatttaatcctaacccttcattcattttccaatcctaatcccaccccccatttcccattattcaaacacgtccttagtgtccaaaacatcttacgtataataagaaaaaaaaattatctcaccttgagacagagtttgtcaccaaattatagagggggaataaaacagacagcatatgtcaagttgtcgaccaccaacgagtgaattggcagtttgacacagcatgagaaattttaagctcagcccatgagatcaacctccctcccctgggcctgtatactttgccttgggccgtcgcttggcgtgagatcaatgaaggcccgctacaagtaatgaactcagtgttgcttgcttaaagttttttttttttgggacgcatggcattagcacccgttaaactatcaccatcgacgttccacgtcaaaccaacacaacttataggccctctgcaaggctggtacacactcactctctttttaaggcaaatggaataacattatggtgcacaaattgaatcattttcattaataatttgcatgaaacatttaagatttttcataaaatagtatgagattttttacaacgttgtaaaaatatatacattgactaacataaaaaatatcaaaaacgaaaatttcggaacaaagccttgatactttttttatgttccggtattaccgatatcactatcgtttccatttatgttatttcgattctatttaaatagtaataatagcgtaactggtttgaagattcctattaccatactcgacaatttccattgcctagaaaaatgatcctaaaatgtttaagattgagcattcgacacaagatggaatattgggtgcattagggactccatgcatttcatcaccatacaacctccaatcttatcttctcttccctgttacctcgtgctcctcttgccctaaagtttgcttgcgcagctccgtcactaggaacgatctcacaaacgacgctacaaagggagaaggagatgcggagggataaggaagattgagcgatggcggtggcttggccattggctcaagtgcgatgaggcgaagcacaacgatagttggctacgatcgaggagcttgtcgatgaggaccgccatgagttccaagaaggtagcatgaccactgcttcctgtgggtagacatgcgaacccccgtgccccttgctccacggctttgccggttgtcatgtcaacaagatgttggttgtgacctccttgataaggcccagatacgactctggtgggtagaagaagaaggtagtgtagcttttttttatatagtttgacgatgttgtaatccattatttccttttgttgcacctagctgcgttaagatgttccattttgttctgaatgaatattgaacatattgatatatttgtgttgtaatatatagttttcaagtgttacacctagtgaaaacttttttatcccagcgatgaaacattttctcgaagtgatgaacattgaatttttttttctccaagatacaaacatctgaaacattttgttaaagggcctgtttagatccatttgaaatggcaaatggcaaatggcaaaaattttggtggcaaaagttttggcattgcaaaagtactagttggtgtttagatgcatgttaaagttttgccattctagcactaaagtgagagagaaagagagagggagtggtcccaaagcactttttggcacaatttgctattatgggctagcaaatgccaaatgccaaattgccaacttttgctactagtgtttagatccaaaatgataaaaagtgctacaaaatggtaaaacttttgccattttgaaggatctaaatagggccaaagtaattttcactgagcggtaaaacacgcaccttacaccatacgatattttgaagatccgacataccgtatgtaccatccgtttcatcacgctgtaaaccaaaggttaaagtgttaaaccacacacggtagggctgccacgtagtcacgtagatatatgcttcttgtccatgtaatccccggcacgtctcggcccaccgagcacgaggcgacgggcctccatccgaggatcgtcacgttgcctttcagattccgtggcccacgcaccaccaatgagcccacatcaccgcacggagaaaaggacaggagacggaggcactgccccggtggtctctccctgcccgtgggacccaccacctcccgggcccacctggcactgtggtggatagccgcttgataggttccgggcctgacgtggactaccaaataccaattgccatggtccaatatggggtccgcgatctgggcctgcattgattcggccattaaaaaaggttatcgtctcgtcgacgtttttcatgggggcccaattcgctagtaggttgaggctgctgtcacgccagcatggcctcgtccctctggttgacggtctcaattttgtcactttcatgttactcaagaagaaacccaagttttcgtttttgcaaaaagttcacttactttcctatgtaaatgagtgtttattgaaatgtttagcaagactagtacaagaggttatagacacttacagtccaaaaaggagagaaaaatccgtccattagcgtccggatagtgaagtactaccacaaacctcgctgaaaatgatcctgattctaggagattgctgacagtactcgactatacaaagcataggataatctgtccgtctctgttacctccttttaactatgataacgttgcttttgtaaggttcagaaagtcctcatgtctgtatccttaaaatatatatcgtatggttttgctaattttatatcgatcggccacaaccacaagtatatcatggccacaatagttttatatactattatatcactgtttatttggttcaggttcttaatcggaagtcacttcaacgtcatgcgaccgtgcttcacgcgagctctataaaatactactgcaaagcacgattgtttatccatctaggtttcacatagctaatctatatttctgtgcaccgagatctaaaatattccaattataaaatgcatgggccacaagaaatctaatgctggtaccttgaaaccagtaaaaatgtttctttctttttaaaaaacatatgaccggcttgcagatgtagtataaccggatgtacatctcacaacttgacctggtccgttgcacgaacgtcgctgctgaattgctcaccacgtctagctttcaccaaactcgtactttccatccccgtttgtcttctctatcgcgatagcaaagcccgtactccgtgaagaacaagcaaaacgagatgagtatatcgcgatcgcctgatacaatcacagtgtactacgtgacactgtgacaggttcaaattcgtgcggagcaaactgaaaatgtcactgttccttccaccactagtagtagaagggtgtgtttacttcgcaaattttttttgtcatatcgaacgtttgaccggatgtcggaaagtgttttcggacacgaatgaaaaaactaatttcataactcgcctggaaaccacgagacgaatcttttgagcctaattaagccatcattaatacatgtgggttactgtagcacttatagctaattattgactaattaggtttaaaagattcgtttcgcgatttctatccaaactgtgcagttagtttttttatttatatttaatgctcatgtatacaaaaattcgctgtgatgttactagaaaaaaaatttaggaataaagcaggccgaaaccacagtacggtactagtaagtctgattattactccatgctgttacagaaccgggaggatctgcttcgagaaacgaacaaacgcagtgacgttcagatcagcgagtctattttactctctctgccgataattatgccgacaaccgcagtacattctacctgctacaattacaaagccaggcagtagcagcaacaatcgtcaccggaatattccactcggtgtggtcggtggtcaggagcaccaaggcaaaagtcgcgagagaatattccggcaaccatatcgatgattttttcagttttccactgcaccacctaccactagcagagtagcagtagcaagtagaacacatcgcaacacattcatcaaccttctccatgcacttcaatggcatgcaagcagcaaagcttatacaacaaccctgacgaatcatcgaaacagatggcactgaacgctgcacgagctgctgtaaacacaggcagtttatgtcgtactctctggtgttccggctcacaataactagctcaccgtaccggttgttcctgcgtagtactcctactacaaccagctgcagtagtattgaaatctactgggagttgtgcacagggtttgtaaaacccccgataacagcatggttaccgtgcttatcatgggttaagtacggtaaaaggtaaaagaaaaaccgtagtaaccttcttaaattcaaataaatttaaaaaataattaatgataaattttacacggtttcgtgctgttaccgtccttaccgccggggcgcggtaactctagtcccggcggtttgggaaactctggttgtgctctgatcccatcacatcgccatggtgaaatcacaagcttttgttccaagttccgaaagggaacgacgctttcgcggaggcggccggagcaggcggcgccgtggccgtggaaagcgcgaagccaaagcaggtcgacgtcgtcggatcgctgtccgcgaggcgagagtcccggtcagtgaggaagaagccaacggctgctcctcgtggccgccgggcccaccgaacagcgacactgttcaggccgtgggccgttcgttgagtcgtccccttccttgctcagccagacttcctcaaaaagtcctaattaccatcctactgctagtgacatatttatggtccattttggatggcatatgcttacattagagctcagatgagtttaagtagggaagtgagagctagaaattggagaggtaatggagtagtaggattttactacactgcagtgctacagctaatgtgcgcgagaattggcaaaagagactagagaagtacgtagaggtccattttttttacaaaattgcagataagaccctgctttcctgcagaattctttattcccccaggcatagtgttttccaactctctctctcggctgcggttacgccggatttgcttcagttccagtgctccgtgggctcggcccaccacgacgacagcggcgggggctgatcgtcggcgaagaacccgccgcacggctcgtcgtcgtcgaggaaccccgtctcgtcctcctccaccttgaggaaattgccgtggaagaacacctcctcgtggctcgccgccgccgctgcgcccgcgcccgcgcccgcggcgggcggcgcgccgagaaacgtgcacgcctccggagccagcgcgtccgtcgccgcgggcgcggcgccggccgcgtccacgtcgttcagcaccgcgcttgagtcgctgtcggacgacccaaatcccgccgccggtggcccgtcggaggccgccggctcctccttcaccgacgtgaagctcgccgccgcctcctcgtccccgagcttcgccttcagctccttgatctgccacaattcgcgcgaccaagaagccatcagacattatgcgcgcaaacgaacgactgctcgacgcagtcacgcagagcaacagctcaggcggcacggcagggcagcgactcagtcggcacgtacctcggcgaggagggcgtccttgtcgcggcggagcgcgtcgtgatcgaggcgcagggagtcgtaggaatggcggagcgcggcgtagtcgcgctcgagctgcttggtcttccaccgcgcgcggcggttctggaaccagacggcgacctggcgcggctgcaggccgaggtcgcgcgccagccgcgccttccgctcaggctcaagcttgttctccacctcgaagctccgctccagcgcgcgaacctgctccacgctcagccgccgcttcttctccccgccgccgccgcacgccatcatctcctcctccacgtccccctccgcctccatcccaacccctccatatccatcatctaatcaaaacacgcatgtacaattacaaaacactcaatttcccgcacatatcacactacaccatcacctccaaagaatgaattgccacaaaaggaaaaccaaagaacaaagattaccactagaattagccatcgtgacgagcgatgggctgcctccgccgccgccggcaccgccgggtcgcttcatgccgagttctagtaaaattcagtgaacgcctggtcgatctctctctctctctcactgcgagaagacgacgggcacagaagcgtaggaatgacgcgggtgcctccgtcgctgagtcctcgccggtcttaattccacgctgcgatccatggccaaacaccacgtagccaagtccccggtccaaatgctgcctagaattgcaattttgttgcgcggtttctcatgatccaagaaagggaccaggggatgagagtgtggagtgtggagtgactcttcttccctccctacctctctctctctctctctctttctcggtttcctttctgttttcgcaagacggcgcgctgtaccctgtgtgtattaataaaggcgagagagaccaagagagaggagaggagaggagaggggggcgctcgggttaggtagagagggggtggtggtgcggttaggaggtgaccagggttaacgtgacgtgcgtttgcatgctcatgtgcaagacagtacgaagaggcgcggccgttctttgcgttgagtccagtaacaaccgaacgaactagcgcgagtacgacgactgactgtactcccggcactgaaaaacgactgaatcgacgtctgatctagcgtccaaagtcgaatggatttttcacctttcgtaggcattagcttcactcaccaatggtgggggtgcttcctgcgttggtcatggcctaaagtttatcaactttgctatacgtccaactcatgtgtccgacgcatgtacgactgaaacggcagaaaaaacgagcaatgacagcgtcagatatgactacgcgtcgctgagcctcgttgttgtttgcttgcgtactgtgctttctatacactgaggccagaggctagtccggctgagacatgtatcgatatagcttaggttgctattaaaaggattcactccagatgttagattagtttaggccttcaggatatgaaaccaatatattttcacagccataacatgcaagtcctcttaaaaaaaccataacatgcaagaaaaaatgattgaccagacttgatagaaaaacaaggcaccatggcttcaatttccatatttatgaccaaaatcagttgaaaaatcaaatatggccatgtatatgtttgcaagcatggaaaaacaagagatgttgaaaaacgaattgagataaaagattaatagaattgttcatggggcctagaaaatcagagcctaaaataccttctgttagcttcaacctgaatactctgttgcggttgccgcaaaaaaaaattctgattaatcttaactgattggtatggataggagacgaaggggattagaatgagggtttagggtgagaaaggaaatgtagaagatgaaaagtcatggatgtgtatagagtaatatcgagaagaggaatcgacgtcggaatatggagcttcggctggagttgggcttttaaaaggcccaacaatcacagctcacgctcacagataacgccgtcgactagtcgtatgatggtcgtacaaatccgtcgtgtgtatagcattttcgaaagtttatatagccctacgaggactggaacgaggcggtggtcaaggttcggtcacgcccatgcttgcacgcacacaccgtctcacaccgaatcggtaggagactaggaggcggcaaccaagacgaactactcctccaaccgaatgctaatccgcgcgtaggcaagcgacggcgaggcggtggcggtgagagatgcgcggattcggcgacggatcggcggtggaacggttcggcccgcggcccggcgagaggcgtggagaagagcgcgcggatggtagcggcagcggcagcagctgctctgcttctgctgcctgcttcggttggtcggggcatcaaaagggggaagtgccggtaaaagccaagcgatacggagcgcagctttcctggggaatggtggagcgcgcgactgcggagctgcaggtgcacagtaaaaatcctcgcggaattgcggtttggtccctagattctgcggtaatacccctactggtgtaggagtagtagctcccagacccacaacgagggacgacgcctcacatgtcgggtgctgagaaagtggctttcgtgtggatttgagggaacaatagctgtgtttgcacgacacatggtagagagattttaacgtggcttagtcccagtttagtagagctctaactttaaaatttagctctagaagttgggttagagtggagctgtggagtagctaaaattcagctccacatctgtagttcatattgtgatagcactctacctaactccgctcctattttaggtggagctgaaactatttgtctgagctctagctctaggagagattgaactggaactggagctgtgccaaacagacccttaaaaaaaggtgaaaccacatactttctccgtccaataaaaaccaatctagtaccaaatatgacacattccagtattagaaatctggacatacatatgtccagatttatagtactagaatatatcatatccggacctagatttcttttttttggcggagagagtaggagtatgtgaaccagtgttgttgcctcctccttcctataataagtttgtttatagattctcacatatatctctaaaagtttttacttttaactatcatatacctgagtttatgaaagtagagaataattgcatttagagttgaacaagggtaaagtaattgtgttatgatttgataaattagagatatattggtcttttttattggtatgtgtggaatgagtgaaagatgaacttatttcaggacactggagtacatgtatatgttgttataccaatcgtggtagggaaatgtgtatgttctacactactaaagaaaagatttttgtgtacgagggcctctatagaatgcaggcagaccgtaactactcatgcctacaaaaatcgacctacttttttatttttgcatacgacttcttaaaatgcccacatgcaaaaatcaattttcgcagacgagcctcttgacatacccgcatacaaaaataagtaggtatgttaagaagtgggtctgccacattaaaagtccctttgatttgtaggaaatacataggaattttggacgattttaatcctatacaaaaaaaactcttatgaaggcctttgaaaggattgaatcatatcttatcatttgaaatttcaatggaatggacaattcgatagagattatgagcaaaaattagcaagagctctaacctattgaaaaatttcttttgagtctatctctttcatccggttcgtatgtttttcatgcggccgaatcaaatagtcattcctatgttttttctgtgttctgtaatcctctattttgcatttgcattcctatcaatattctgtgtttcttttttcctattccttcgtttttcccattcctgcgattcaaaggggccctaaaatatctaatttcctcctccactcctcactctctccccacccctctattatcatctccttgtcccactcctctcctctcctcacatgagctcatcttctaacccctctcctctcttcccattgcggtgggagcggcatcacccctcgcctgcccggaggcccgtggaggaggcccatcaaagacggagtggcggccattccccacgtagatccaccggctgaggaggtgcgttgacggcgacgacgacgacgagctgcggggaatcggtgacagcgacggcaaagacgacaagcgacgacatactacgacgagttggcgatgatgttactggcagaccgcacctagctaaggtttcgagtatttatttttggggatttttttctagattttttttgtgtgcagacaacataagcatccacacgcaacaattgagttttcgcgtgcgggtgcaccgcccgcatggaaaaatagcgatttttgcagatacttttgggcaaacgggcagctcaaccgcatataaaaatagatttcgagtttagattatcggattcacgccaagatttgtatttggactcctcttctccgatgatggtgacaccactactccaatagaggacatgcgaattagggtttggggttaattagggtaggaggaggagttagggaaggagggagtttacttggggcttagcacgcgagatggccatagacggtggaggatcgggggtgggtggtggatacgggcacatggcgaggtgccaaagctgtggggttgatggtaggcattgggccagtgttagcggaggaggtaaataaatcaagtggttggtaacagatttggcggtggagagccactggagatagagaagacgacaaagagggcctcgccaccatcgtctttaaggaggaggagttaagggtggggtgagcgggggtgttaggggagacttgacatcgtcgttcgggccttttggccaaccggcgaggctagggaagactgggaagggaaggtaaaaagataatgttactgtacacacatatgatttaggatggaaatttttattacaagttgtgtagacagtcctgaaatctatctatctattatattattaaaggaatataaaaaggagcctccacgttcgctctcatggcctagaaattctcacattaatcggagaaaaagaaaaggcggagtccatatagaaatataatttagaaatagttgaaattaggaattaaaaaataaggaatattagaagaggagactagagtccatatacaaatacaattaggaaataactgaaattcggaattaaaaaatgtggaatattagaagtagagtatagagtccatatagaaatacaattaggaaataattaaaattctgaattaaaaataaaaaatattagaagtagagtatagagtccatatagaaatacaattaggaaatatctgaaattcggaattaaaaataaggaatattagaagtagagtatagagtccatatagaaatacaattaggaaataatataaatttggaattaaaaataaggaatattagaagtagagtatagagtccatgtagaaatacaattaagaaaaaaaatagaaattcggaattaaaaataaggaatattagaagtagagtatagagtccatataggaatttaaaactaactaaaatttggaataaacataataaaattaaaactagagtttagagtctgtataaaaatacaatttacaaataactaaaattcgaaattaagaaaaacatgggaagaagagtttaagatcaatataggaatacaatttagaagtaactgaaattcaaaattaaaaattaaagaatattgaaagatgagtttataattagaaataataaaaattcagaaaaataaaagaaataatattgaaagaagagcatagagtctatatagaaatacaatttacagaaaatttaaaattaaaaaaagaaatattaaaagacgagtctagagtctatataggaatatatataatttataaataactaaaatttgatattaaaaataattaataactaacatgtataaaaatataatatgaaaattcagaaataaaaataaataatattagaagaagagcatatagtctatatagaaatacaatttacagaaaattcaaaattttaaaaaaagaaatataggaatatatataatttacaaataactaaaatttgatattaaaaataattaataactaacatgtatataaaatataatatgaatattacacattagtagttttgtaaagttattgcaaaatttaaaattatgttatcattttaatatatttgaataatataatgagaaaacatatatgctattatatgtgagaaaatataatgatgctagccacgcaatctgcgcgggccaccatgctagttatattattaaagaaatagaaaaaggagcctccacattcgctctcatagcctagaaattctcacattaatcggagaaaaagaaaaggcagagttcatatagaaatacaatttagaaatagctgaaattcagaattaaaaaaaaggaatattagaagagaacactagagttcatatagaaatacaatttagaaatagttgaaattcggaattaaaaaataaggaatattagaaaatgagactagagtccatatagaaatacaattaggaaataactgaaattcagaattaaaaataaggaatattagaaatagagtatagagtccatatagaaatacaattaggaaataatagaaattcagaattaaaaataagaaatattagtagtagattatagagtccatatatagaaatacaattaagaaaaagaaatagaaattcggaattaaaaaataaggaatattagaagtagagtatatagtccatataggaatttaaaactaactaaaattcggaataaacataataaaattaaaagtagagttttgagtccgtataaaaatacaatttacaaataactaaaattcgaaattatgaaaaacatgggaagaagagtttaaagtcaatataggaatacaatttagaagtaactaaaattcgaaattaaaaattaaagaatattgaaagatgagtttagagtcaacatataaatacaattagaaataataaaatttcagaaataaaaataaataatattgaaagaagagcctagagtctatatagaaatacaatttacagaaaattcgaaattaaaaaaaataaatattaaaagacgactctagagtccatataggaatatatataatttacaaataactaatatttgatgttaaaaataattaataactaacacgtatataaaatacaatatgaatattacacatttgtagtttcgtaaagttattgcaaaatttaaaattatgatgtcattttaatatatttgaataatataatgagaaaacatatatgctattatatgagagaaaatataatgatgctagccgcgcaatctacacgggccaccatgctagttaaattataaagtatcgcgatgatttgttaaaaggagtgagttaagtgggagaaattgttatattttatgatagaattttaaacattagaagtcagtatattttgtgtgggagggaatctcaacttgagtacactatacgtcccaagagaattaaattctggcgggtaacgagggtgcagttgcttaagatattaaaatgtgtgttccctcaaaaagaatattaaaatgtgtgtgtatgcatcggaattcagtggaacgcaagggggtggaggattattcttgttcttgtagcaagttctgtaacttaatgtaatcaccgaagattctctgtcccatttctgcagacggcgacccgaaatcgttttctatgagcttgtcgttgtggaaaaagcagtagcggctttcgtaacacctcatttttttatctgtttaattgcattttttatcctcccaaatctccatcgaatccctggacgcaaaagactagggacttttttaatcgatctgcgcgactatagaattcgtcccgaaaacgatgaatcgtaaaagctggattccttggatgttccattggttcgtgccctttgtgaattgtgatgtacgatcacggtcacaattgtaaagctagcaaaaggttcttgcagaatttcagccatggagttattttgtgatcatgcgtcttttgtttatgtttgttcattgatttctttgaagttatatatgtggccttatgtgcctataaaaccaaccacatcacatcaatcatattagaacaactgaagagtccaggccttgacacatgccactcaacatgaaggtacatggagtaaaatgttgaactagttcagacatatttacaagaagaatagatgaccactttgtcaaaatttggaatagttaaaggcattaatttcttctttgcaaaaaaaaaaagcataaggtccaataagatggggggcatgtttggggagcttctaacagctgcagtttctactagaatcttcagttaccataaactctcttaaatagtccagattttcatccagattctgagaatgtatttgtagaatctaaaaaataagctagaagttgagtttcccacatttttcaaattctcactagatatttctcagaattttaagcttccctaacattaccctaatcacctttgtcaaaactaggaacagctgaaggcaaaaatggtataagttccaataagattaaacaaataaattgtagcttacatcagctagattataaaaaaaggcaaaatttgctacaggatacccaaaaaatgtgtaattagttgtgggacaacgtaaagacgtgaatttgctcgaggacacttcaaaaaatatgataatttgctacaggacactggacacattaaaatataatatctagtcaattgatgagagagaaaccacgtaaaatgacagttttgctcttatcttcttctcccttctctcgttcttcttctgaatatcctcttgcgtgcgtaccctgctgcgagtgcggtcacaggccacgcccgccgccacggactcctcgccgttgttgtggtcacgaccgccgcgccagacatctttttcttccacttctttttttcggccactagcacggaacgaccgctatccgtcggtgcgctagcatgagagggtagtggggacaggaagaatgactcgcacgcatggccggctcagcggcttaccgcagagctggaggttgtcggcgaaggactccggcgagaagcgtgcgagcaaggtgttggagcacccgtgagcttggcgacgtcaggcgggacagagccaggaagggaaaagaggtcacctgggacatcaccgaagaggtggttgcatcgaagggagagcacccggaggtagaatccgatgaggctgacgccaggtaggcggagaccaaggacagtggcgttggcagcgtcgcaggcgaagcggacccagtcgtaggccggcgtggaggagttccaagcgatcggccgctggtgcctgtgcccatgcgcgctccacacgacaaagctgtggaggccctactctaagttgggcaagatcgagaggaagaagaagacaagggcaaaattgtcattttacgtgctttctctctcatccattgactgaatattatattttaatgcgtctaatgttctgaagcaaattaccatatttttggagtgtcctcggacaaattcacgtctttgcggtgtcccacagctaattacatatttttttgggtgttatgtaacaaattttgcctaaaaagaattcttgaaaagaagaagattgcagatagtagtatcttgggatgacaatagtcaaggaaaatgctcaaaccgtttttctcggaaaccaaattgggacgtacaccaataacgatatcagtaatgctgtagtatactatttttgaaacgaaattatcgaaataaagcctcaaaaacaacatactgtcataaggatagtcacagtatgtttacattttaaattagcgtcatatacaactactagtaaaaattcaaagtattaattaagtactacttaatacttttgtggttaagtttttttttaaaaaaaatgataggttgacgatactcatgttaatttcttccgaaattccagatgaaaacggtatagcacttataaaaaggtcagaaaaaatcaggatcccggttgggtccatcactttgcatatttttattaacggccttatttggataaaataaatcacgtataagtagggccactgatataggtgtggagtgtggtcaatttgttggctgaagctggatggctagacaaacttatatttatatatatctaggtaggtaggtccatcgtatggcctacacggttactccctcttgctagtattcaggataggatcctcatcctctcccagcctcatgcggctacggataagaatggtgcggaaacaaccaggttttacggtggccgttgtggttgatcggagcctcggataagaatggtgcggaaacaaccaggtttcacggtggccgttgtggttgatcggagcctatttcgttcgaggttacagtgtggcgtccgtcgccgtaggtcgtgagcatctacgtcacgctgcgtagctactaacgctagctgaggacgacgatgatgcgcggggcttggctgccgtcgctgaatcaaagggaggtgccgcgttaaggagcaacgcgagcttggcgtcagagctgatggacatgggttgtcgcgacagtcggggatggtgctgtcgtcggagtggatagacgcggagcaaggacacggccactggcgacaagctctgacgtggcgtggaaggtggaggatgcggccatcaacgactagctccagcgtggggcgtggatggcggaggacgcggccgctggcgacaagctccgacgtggcgtggacggtggaggatgtgaccgttgtcgatgagctccggcgtggggtgtggatgacggaggactcggccaccgccgccgagctccgatgtggcgtggacggtggaggatgcagccaccggtgatgagctccggcgtgagacgtggacggtgggaccaccggcaacaataccttggtgtccggctcctgataccttgcaagtatcacctatacgtggtaggaatcgcctgatatctgacaggtatcacctagcgcgtgatacctctcaagtatcacctatatgtggtaggaatcgcttgataactgatagatatcacctgatacgtgataggaattgtctgatatcggttaggtatcaggacctaatatctaaccggtatcatcccatctcattagcagctctcaagttttgtatgcccaatgccctgcagcacttgtgcaccattgcaagtttgcaactgctggagacctggagtagactgtaatttagcagctagatgtgctgaatgattcataaatttgcatgactcgagaataaaaatttggtatacttacttgatccagtactaatgtactatacacgaatgcacgaaacagtgacggccagggtctgctacttagttgtacacaagcgcagtcgcagcctcgcgcagtcccactcgcataacaacacggtgcaggttgccgtgaaatgatcccttcaggtcgtctcgatctctcacgggcagcgtacaagtagtagcagtacacgcacctgttggcgttgggcaccgtccgctatacctcctcctgacctcctgcctgccgccggagaagacaaaagtggagcgtctgggatgtctggaaccgtacgccgtgagattccggaagaaaacaaacgcaatgatgtgacatgcttacagcgacaaacggaaacaggcggatgctcaccgggattggggaaaataccctgtgtgctgcgtcgcaacgcaacttgcccacttcactcgtcctgatgatttttttctctttatccccctcctgtcttcctcgtttctttgcggctgcgtgccgtcgtcatcgtcgcacctttgcattggatcaagttggtgacccccgcgctttccgttccacgattgggcgtgcaggtttgggcgtttctgtgtgcgatgcgaagtgcggtacgtgctcctaccacgcgacgcgaggggatgggcgtgaagttttttgcgtggaaccggaagggtatcgatatttcgatatcatctcgccatcattccggcgtactacgtggattgggttgggctaggcgcggcctggccgcgtggtggggggcgggtacgtacgtggtggtgtacgcgcggacggcgcctgcgcctgcgtgtgtgcctgcctgcctgcgctgatgacatccgggcgcggggcagagcctggtccccttccgcggtggtcagcagctgaaagccgcagggcccccggccgctagcctttttcttcttccccggcctcctctcctcgcgccgttgccggcgcgccgcgcgcgcccgtcgaccgcgtctactcgcggagcatagccatatttcaccgtgcaaactttcacttgtcagctagttttgcgtgacatacactactctacagtctacacatgcatgtagtagtggctaacgtattgacttttaaacaagtggatttgaggctgcgttcgttttaggtgatagagtgagaatacacatccgcgcgcacactttccaaagtattaaatggtgtgttttttaaaaaattttctatatgaaagttgctttaaaaaaatcatattaatccatttttgaaatttaaaatagttaatactcaattaatcatgagttaatggctcacctcattttacgtatcttctcaatctccttaatccccttctcctcaaacacaccctgagtcgattctgtacatgcgttttactgtgctggtgagatagcagcggtaaggttaactcgatgcgaaagggcgcccggccggcagaagggaccgggtttttactgtagtgcagcagcagtgttttgggcacagtaacaaccttacagaacaaaaggaccggggaccaaaaggtgattggtgatctcactgggaaatggagaaaacccaacagcaacgaggaaaggttgtgggggcctccaccacacacatgttcttctccggtaacacaagggtggtaaacgtgttgtgtagcacctcaactttctttcaacaccttctccatttacatttactgcatgacacggttcatgctcatgttgaagaaacggactggtgaaaggaagtggcagcagagttaggaattttaacttgtaatgtaaaatatcgttgctttatgttttagtgggtcatgtttgtaaatttcaatcgattcaccactggtagagaaatgctctttactcccggttggaaacccccctatagtcccggtttttcaatcgggagtaacaatctgggactaaagatagcaatctttagtcccggttcaaatacctgggactaaatatcgatctttagtctaacaccaaccgggagtaaagaggagaatctttagtcccggtaaagggttagtcctagtttttttttcattgttcctttgaatattgatttcacaccaatctctccaaaatcataaaatcaatcacaaattccaaatcgaaatcgagatggtcccaatatccccagatcaaatagcaacatcacaaatcataatattcacatcacaaattatcagaaaaaaacatcacaaattctaaaaaaataaatacatcacaatcacaatcacagatacatcacagatcacaaatacatcacagattaaataacacagatctagatccaatgaatcacaagttattaaaaaagaaaaacaagaaaaatccagccgcctcctgccacgggcgacggccaccacctcctcctgcatgggcggccgccacctcctgccgcgggcggccgccaccgccgcctcctcctgcgcggacggccgccaccacctcccggtacgggccgccaaccgcgcccgggtccccgccgccgcgcttcgggggcgagctcctcgtcggctaagtgttgagagagaagaatagaaagagactgagaagaggataaggataagtgtgtgagagaggaggaggaatacgagatagaaatttttgaggatagcagcaagggattatatatatatggtatatttgatttttagtcccggttggaaacaacaaccgggactaaagttaggattttagtcccggttggtaatatcaactgggactaaagaactctagggactggcatcctctgacatgactaaagatgatctttagtcccggttagtgttactactcgggactaaaaatcatctttagtcccggttgatgacacgaaccgggattaaagatgatatagtccccttacagttataaactggcactaaaaatactttttagtcctgatttttaatggaaccgggactattgtgaatttgggtgaaccgaccaaagatggtttctccaccagtgcacatataaaaatttagtctcacgagagggtttacgaaaaagttatgccttctacagtaaagtgtggttaacatatagtgtagcgccttgtctttctttttacggcttattcatttgcattttcataataacacggttgagctggttagaccaatagattgatgagaaagacaaaaccgattaatgatcgagataaaactctctatgatagtcgatcgactcgactgactaggttaaactctaggtattgtcatggagctctcggggaaacacttgtggaagggatagaagacaactcaagaatgtagttgctctaatatcatacttcctccgttttatattataagactttctagtatatatgtgtctagattcattaacatctatatgaatgtggataatactagaaagtcttataacctgaaacggaggaagtatttaacaataaaagatgagatcatactagttgaatagtgaatgtagtgtactgagattcgcgtgacaatatatatccaaattatgtgggtaaaataaaaaggcacataatcaatacaagtgaattacattttgctctaattaactatcatatatatactcttaacaagctgtagtaacggttgtacacccacagctagctaaaccgagcacgccctacaattcgatcgtgtctgccttcattatagctactagcaaattaccttttgaatgcaagccagttaaagatcgttatgtaaactaaaatctccacgtaatgacacaaacagtccaacagggcagtcaactaagagaggcagtcatgcctgcctaccgtaaagattaatgaacctattcatgacaggtacatatgcatccaatgaatttttttagacatattcaaggaccagggccccaatttttcagcacacgttagctaccccgtccgtccggaagaactaccggcacaccgccgatgggcctcccccccctgtcgcgtctcgttagtccactgccgtgttctctttccaacctgtcagggaatcgtctagtaaacctagagaagagagagagatagaaagagtgtgtgtgtgtgtgtgagagagagagagagagagagagaggagaggagagggaagggaaatgaaggggacgtgccgggccacgccacggaaacgactcggcaaggagccaaagcgcggcacctgctgcccccaaaaggcgtcgtgccgcggtgcatctagctaggccggacgggctaggaaagcgatgcatggtgtggcccaatatattgaacacctttttctagctccacgtccatccatccgggtacgtacgtactactgtgctagatagctcggcgctcggcgatgcctgcacggaccgaacaaccggtccaaaccccacacacgcactgactgcacgcacccaccaccgaatagcgaacggattccttcgctttcttgcgtgtgtgcgtgcctgcatgcatgcacacgcacagcccggctggccggcgatccgcgcaaaagctcacggctttaagtagcctctctctcctctcttcttcctgcccgatcgtcgatcgatgcgatgagttggccttcatttggtcacccggtcacccactatggaactcagggttggcgttacggcgcgataaccgtagttatcacacttacaatgaaggacggtaaaagaaaaatcacggtaacctatttaaatttaagtaaatttaaaaaataatttaaaattttgatcaattttacacggtttcgtatagtttgtcatagttaccacggttaccttgcttaccgccgaggtgcggtaacctggtcctgacggtttgggaaaccctgtagtatggattcatctgttagagttagttcttttttcgtgagtttctttcactgtagatgactgaaactttacacggttcagtgttggggcctgaataaaactctgtcaggtgagtaggaaaagttagcgagaggatgctaaaagctcttttgtcaagggcgaccatactgtcaagttggaggaaaagttccttccctttcacgctttcggacgatagactgtgcagcatcgtgcatgagagtggcgttcggtttccattagcagttaacgcggttggagagagctagtgtagggtagtggagagacatatttggcgtagctaagcttagctaggacacctctcggtctcagttgtcacggtcgttcgtatctctctctctccctctcggttctttttcatggtcatatatgtacaagcgaggattgatcgatcggagcaaaagttatttcactttgggtactgttcggtagcgtcaattcaacaccgcgaaaaggagcgcggaagcattccatatatatgctcgcgttttccttcgtccggcatccatccgtcaggttactcgtgcgtatgtactgcggcacatactactcctacatatacagggtcaacacgagagagcagcgcgtaggtgccccctaccgccctacccagcgaccagcgtgacgccagttgcgttcgaattgagatgcatgcatatcgcggtggtcctgtgtattgaccctatctcaacttcatggagccacaccagaagagagaaaattacggtacatgtaccattcaagccgtggagaaaccacgccccggtcggggcagccagccatcgccatgcacgtcggtctcgacgacatcacgctccgcgtagttttccgcgcgggtgggcgcggtggatgcgcgagacccggacgggcgagatatttttcgccggcgtcgcgctcgcagccacgcaccaacgaacacagtaccagcgcgcgcgcgcggctgggttgggtagctaggttggaccggggagcgggtgcgtgcgtggcggcagcaagcgaacgagcgagcgacgtcgcgttccgtggagaaagcgaaggacgggcgggtcgccgacgcggacggacgcaggggcgggaccgcgcggtttggctgctgctgcgcgcgtctgcttttgagttggttatgatcaggtggtccaagagcagaggggggaggggctgggaccatgcggctcggctccgctttcgtctcgaacagtgcgagcgtatcgtacatgtgatgtgcgtggtggtgtgcatgcatcagcagcattcagcgccgacggagagacgtacgtgccggggtcactgatatggctttttccgattaactgtgctgaggtggaataggtttttgtttcgaccccaaagcaagcaatggcgttattttcatttattttgggagctgcggcgcgacatattttctcggcccaacaacggtagtttgcatgagggcctattttgagttgggttggttctaggcccaaaaacattacaaatggagtagggcacgagtaggaactggagttggattggattatggcaaccgtgctcctataatccggcttctcgcctacgaccatcaccggctcaaaccattcggtgtgtcgtgtctgcagtgtccaaatcctgctggatccctcgtagcagctatcgtacagtgtccaaaaccttcgatcgtctcctccatttgtcattgccatccgaccatccctatcacttactttgacatgaatccatggcataccggaaatcgcatacacaagctgcggccgtctcctcagataggcgtgtccccatgttgttctcaggagcaccctttcctcgatgaaacacccgctccttgcactaagaccattcacaccattcgcggtgcaagaccctcctacaaggggtcctatatgccacgtacgtagattgagaccacacctcttcaaatttcttctcccacaatgcatttgagcctagttggaccgccgggggaatcactttggacatgatctgaagtgtacgtactgtagactaactgactaagcaagttcaatcgttgcaaaggaaagacacagaacggttataacagaattctttaaaagaaggcatagctaagaatttcgcattgaggtaatcagattgacctgattttccattactctcttagttccctaatttacatttactatacagctgagctaaccgagcggccgagctgatcattttgaaggaacaaagttattctgttattgaactctcatcgacaggccacaaaagaaacatcccttccgaattcagtgagctccaatggaaaactttggtcaatttacaggcagccgctatcaatagagccccaaaagtttccaccagaaggttccaacaacaccccagatcagaatattgatcaaggctgttacgaaacccatcctgaatacatctggaagctcaagataccccgctgcagatagaaagcaacaaattacagagtagtgagaatatgaatttggaaagactaattatggaaccaaatataaaaggaacaacagcatagaaggaaataacaggttttctcattctatatctatatgccttatctgttatagcatgttgtttttgcttcctctgctctttttttttagggtaacccgtttgtaaatgaaaataatgaaatgaaatccagaaaagtagaacatgaatttacctccaaagtacactgcagcctgtccgctactataatgagttagtgcaccaaacagatttgtgttgaatgccaaagcaagagctgacagcactcgaggaacaccagctgctacatgcatggccagaaatgccgagtataaagctccaacatgtccggtttggcttgcaaatagatagtgaatcaggaagtaggaagcctcaagaacacaaaaggctgcaggccagctcagcgagaaggattcaagcagcttggcaacacagcttgacatccatgacacaattcccaggttagtgagctgtcctgccattccaactagaactgcaaaccatgccaatgtatcccatgcagatttctcatttaagcaatcatcccagtctagcacacctagcaagagaagaatagagagtccaagcatcgcggcaacaacactagatacaccgatagcatccctacacagaagtcattttacatgatatttagggaatagttgaataaatatgcaaaaaaacaagagcatgatagtaagggcatattatctatgtacggtattctgaaacaactgcctgattcataatgctattgtcttcactatattaccctttagcatactaaaagtacaggaacacaggtgatctggatgcaaactaggattggtactaggaattggtcggagttagcttttcttctttttattttattttattttttaaaaaaaactacaagctgcaagacagttgcagctacagattaaagcaaatggtatcatcaaaagaaaaaacactcattttctatttgttatcaagatcatatgttagttatatgaaaaatcctactaataattaaggaacatttaaaaatctgacagactcttgtaaaaaatggtgaaccatatcagaatcaaaagttgaaatgaaatgtgattaatacaggaatacttgacctggtgtctacagggaaaggaaagctaactggaacaagctgctccctactcaaatatgaatgaaaaatcacacaagtattttaacgatgcaactattaagtatcttgctagcaggaggcaattagctgcattccatggaaagttttagtcaaccaaaaagcaacaaagaaaattatgtcacaaactgcaacattgtattgatatcaaagtcaacattatacgtgggagcacttgtactaaaggaggagcttgcccaaaaactcttcatgggactgcaaggatcactaaggcagcctaaggatgctactattaagtactctactatggtatatcaatataatcaaataaagggaaacatttaaatgctgcaagattggattaatgtgacaacgtaatattaagattgaggatgatgtgtagtggagaagcttacccaaatacccataatgaaactgcaaggagcattgtaccaatcataacccattcattcttagtcactggacccatgcgctcaagcttctctgcagctaatgctggggcatcaggagtatcctttgtttcagggggaaatattttgtatagcaagtatggtgttgctagtagagaagcaatggctggcaaactagcagctttgaaccatgctacccatggatttgcaacgataataccaagctcctctgctagcttcaagcacaacaaattttgtgctgcagcagttaggaagagcgcacttgagttaccagctgcctgttaaaaaataggagaagaaaactagatactctgtaaaaacatttctgaagatgatgcgtatacaatgaataacagaagtataggatgcacagaaacatcatgcatgacacaccacatgacattaaacacggcaatggtactaaacccaagagaattataaccggcattctgcattcttactgtttaatggaaacggtaagaaagcaaaatgcacaaagtcattctgcattcttactgttcgattagagagggactataaaatatcgttgtcttatgaccagatgaatcctctcttttccaaaaccttcacccttctgctagattgatgatgaactcagtcacataatattacgaccattcatgcatcaatggtggcattatgattaaaaaatacatcaaattgtaatttaccctgtaagcaggctaacaaaacactaggttgatctgacaatggcctagctggttgcctgatttcaacccaaaattactaggtaaggatgttctgcttgattgtaccaatgtgccacccagttctcactcccactccacttgtgcagagcccaacggcaggacacagtaatagtcaatgcaagtagcaatcgtcccttgctaaaaccaaaatttggttgctatgatcagaaaatcctggttgcaatcgatctatatgaacagatcccatgcgagtatgagaaattttatcacttaattacctggaattgcgacatcacaagataggatccaagcttccgcgacgacgggtggttcggcttgctccctgccgagagcgagagcgacttgatgatgggcaggaacacgcctccggccctcgcggtggtgctgggcatggccggcgagatgaacgcctcgctgatggtgagcccataggacagccccagcgtgctgcccccgagccacttgacgaagtaggtggcgatacggtcgccgagaccggtcttgacgaaccccctcgcgaagaagaaggagatgacgatgagccagatgacctcgttggtgaaggcggagaaggcggcggcgaaggggagcgtgtgggtggcgacggcggcggtgagccccaggaaagcccaggcgccgacggggagcgggcccagcactagccccgcgatggtggagaggaagatggagaggagctgccacgcctgggggctcacctcgggtgggcgcggcgcgaggaaacgcacggcgaggccgaccgcgagggacacgaggagcggggcgagcttcgtgccggcgggggccgggctgtccgcctccgggttgggtgtttgcgaggcgaggagaggtgggatgcggcggcggagaggcgttggggcgaggcgatgatgatgatgatgatgcgaggagagggagagcgaggtgtgtgggagggagagggaaacggcggcgatgtggcggcgccggagctggtgcggggatgggaggagcagaggcgggcggtgggaggcggcgatccggaggctctccatcggcgtcgacggcgacggcgaggggagtgtggggcggcggagtggtcgaggtcctcgtggaggcggtctcaggagaacgacttgtagtgcggcatttttgaaggaaaaaaaaaatcatagatactaacggctggttttatatttctatcgatacgaacgtggtgcgaacccgacccactgacatgggaggccacgtctcacgtgtcctacaggggcccacctgtcagtgtgttggggtgtgcaatgcccaggttgtgattgctcagttccaatgggatactcgggatcggagtgggccccagcggcagccggaggaatcgcggcacctatggctacctgaggctgaaccgagcgccggcgatggacccagcgagggcgtcgcggttgcgccgaacgcgtcggcggcagccaatggcagggcgacgcgtgtagcccctagatatacatgctcgcgagtcccctgccgtacgatgaagctctgacgatctggatggttctcacacgtcccgttcgcgatttggactcgctgcattctgccgatcgccacaattctcacgtggccccttgctccagcgctcgtgggatagtcacaggaggcctgctccatctcaaaatataagaaatttagataaatatgacacataaaggagtcctaaaaatattttaatataacacataaaggagtcccaaaaatatcttaaaatataagaaattttaggtggatatgacacacacagaagtcccaaaatataaggacacatacagcagtcccaaaaatatcccaaaatataaggaattttgacggagatgacacatagagtcccaaaatataagaaattttaggtggatatgacacaaagatttttgggtggatctgatacatcctagtatagagattttgtgtggatagaacacatcctagtacaacaagtctatatgtctcatccacccaaaatcccttatgagatggagggagtaatgtggtaaaccagcaggagtggacccgtttgtcagtgacaagactaatactccgtcaccatattcctcaaaaaaatagacatcatattcaggcctactaacaagaaaaactagtggatgccccgcgcgttgcagcgggatttgagaattcttaccgagaaacattgttgatcaatcttcacgtgtttcctttttttactcattggttgcgtgtttttttttccgacaaaataatgtggagtactccctccatcctaaaaaaaactctaccttaggaggggatgtgaccagggaggatgtgacccctactagtacaacgaatctaaatgaatctagacagttcttagttctttgtccagattcgttgtacttaggttaagtattttttggggacgaaggaagtacttgtacttaggttaagtattttttggggacgaaggaagtacgtgtttatcaagtgggccgctttcgtccactggctgctaagaaagaacgaaaatattttcttctgttacttgctaggccaacagcccactgggcggagaggttcgttccggttttttttttttttttttttttttttttttttgccaacagcaaactgaatacatgcaatgtttgaaggccattcgatcaagatctgactgttaatatgcgttaatgacgtggcgagctgtgggtactaactatataggaagaagagatgccatcttgtatggaatagaatgttcttcgttaacaaaatgagtagataatgcttctacattaaaaccagtagaaatcattttgcaacagcttacactacagacgacatgatgcatattctgatattcatgcattaatccgcataataaccctatggttccaaaagataggagtccaaaaacctttgtgattattaaaagttcaaaatccaatcagctatattcagcatatactgtggggaaaattatatgctgatgaagcagtgaggcctacacctatgatgagttgatgaccaataagattcttgtgaaaacttgactttgttaaagaagtgggatcaccttcatgcgacagcactccaatcgcgcgtgtcgtggtaaacagttataaggttagtcccttaattcttggttctctgcctcaggagcacttggtaggaggcaagagctcaggtatgtcagtacccggagcatccattgcatcacgaggatacttcgcgggggtgcagcactccgatatgtcaatgccagcaacaaccattgcgttgcgaacccacttcggaacatcgccctttgggaactgtcaccaattggtttgagaaacgaccagccagtaagataatcatcaaggaaatagcaaaacagattgtaattttggttttgtagatggaatgggtagcacatattatcaaggaggcagcttagacatctcagagtcaggaatgacagaatttacttgtggtgctgatagtttatatataatattagggaacaagatatacctgcatcctcaagaatcctcgcacgaatctacaatatggcatggaaactttcttattcaccaacacagtgagaaaactgacaaatgacacaaaatttagctggatgataacatactctgggaatcgtccttccagaattgacatgtggaggtctctacttaactgaaataaaagtggatgatcaagcggtgacacttaaaaagaaaagttatgtggaaatattcattaatatacccgcatcataaatgatagattgtgatacgacagcagttgggaacccatagcatcttttgtgacaagacaatgcaagtaagcacgtgtatagtttttgcagacctgaaaagatagtcaagttatagaacacgaaatagaaacagaaaaagaaaaagaaaatttcgaagcagtttaacactttgttcccagtagaacgaagccttaccatacatggacaggtcggatctatcggtcgttcatcagttgccattgcgttttgtttcaacttcagaacaccctaggagatatcacaataaggttgcaaatgctaagattagaatcaaactcagaggaaaagagaaacaaaattattgtgagcttgcttccatatgttaatactctcatagattatgctaactggaataaattgttcaatatcactaagaccatcaaatcattccatgtaaaatattagtggcactagttatcagtgcgaaaagaagatcaaacataaatattttctctagcttgaattgtatagttgactttgatggatagataagttccatacctcaggaacaagtgcagtcccaaagcgagcagtacgagttggataaacacagtcatacatgtctgcacccaaagcactacatactacaatatcaagtggatagccaacaccctgcaaattagcataacagcaaggtcagccaaacaacccaaggaagctacatggttcaaattgttgtgaatcatagaagacaatatcacttttggctttatgagtactttgagaaatttgaaactataccataacatatcgtggtttatcttcaggcagtccagcagtgcactgggcaacaacacgccagaacgagtctttatcttcaccacctgcaagaccaccaatggcatatctggcaacaaaatatcacggtaagtggtatcagccattgaattgtagatcagatatgagataatatagcgtgcatccaccgacaaataaataaagagtgcatataaagcaggcacaacatctgaagatcatgcatcaatcacagaaaagacaaacaatttgtttttggctgcatgtaaaaaacttgcctacatatttgctacccatggaaagaaatcctgagagaaatattagactatgacataccctggaaggttccgctcaaccaagcccttcacgcagatatctctggaattacaaaaaaaaaaacactattgattatttcaattatgccttaaaggattgatatattacatgattagatggatgaactcacctaagaactggatctaatcctccttgtacaatcccaaataagttctggacatcaggtttcttatgagctatatgtattgacaaaagaaaacaccagaccttagctaaacatgcttagcattattgtaaatgttcttttcttaacgccagtaaaatacatagcagaattagagtcataatcaaaatgatgctaagctctaacttaacgacaaaaatagtgaaattaaacgccagaaaagtatgaaatacgggcagtggcaagtcatattgataaccataccagcaatgcacctatcaatccaacgaagggtacgatacatagcttcctctatccttgggccagtaattgtggtcttcacaacatcatcaagagccattattatatcagctccaatgttgttctgcattcatgttcaatggataagcatacacatgataagatgtaaaactaccaaatctattggcgcaaaactctaacttttacaagtacaaatcttgtctagaaaaggatgcacctgaatatggatagattcctcaggtgtcaagagcatgggcttcccatcaacaggtgactgaagattggtcaagagaaaaaaaatatataaaagatacagagagggaggcattttcagcagttgtaaaattccaaggaagaaagtacaggatgcctcacacacataattaagcaaaagaaccaccaagaaaaaaaattggcttctattactaacatcatagatatgatatgataccatgccacaacacttgactatgcaacatctgctagatcaaacggcaatatatatctgttcattcaagaaatatttatatgtttgtcgaaaaccatcagctaaccgtgtggttctcattagtctcacaagttcacttaagaatttttggttcatcattgtaataaatagcagtttacagggaaataacaagactacaggggatgcccagtacaatcagaaatattatccttgctcagtatattttccattagttttgaacagtctcaattcagctttaagaagattaaaaaaatcttataaacctccacagtaatacaagcatgcctcctgattattatatgataacacatggacagctggacattgttatcaataaataattataaactgtggcacatttgaataatttgatttggaagtatgataaacatcagtgcacaagaagttgacatctgtaaaagaaagaagcatcacaaagtagcctgcacaaatctacctgaaatgtaactccttcctcagtaatgtcagccaaatgtagcaaagaaacctaaaaagcatgtttccgatcagtaaaatttcagcagggaatatatattaacattggaaaggagtaagcactttggaaacaagtatgtgctcatgttgatagagatcttgaacaattactgtcttctttcaaataaaacagaaatttgattaaatctgctgttaagaaaaaataccagtgatatttaagatattgtcatctcattttttttcctttaaagccagcatcaataggtttctcgtcttttaaaaatcagcattgtattttacatcaagtgatcaaattaagtgcaattcagatttcatgtgtggagcaactggttgttgggatcactataacaaaatggtactcatgggaaaacattatcaaagcaacaagacttgacaattaccagtgatgtatttaaactaatacagcagaaggtatttacatacaatggcaaaacattaaagttgatgacttagttatttatgttataacgatccacatagatattcaatgtcttaaaaaaatgaagatttggagcaaccatttggaaaccaccagagtcagtcagcaacgcccttttccaattcataaatttgtgaaggccacccaagtcgtcaataagttgagaacctggacgaagttcaaggtggtaggtgtttccaagtataatctggcaacctatttcctctaactggtcagtagtcaggccttttattgtacctgagtagagagaacagaaattaaaatgctatgagatacaataattcagagaacaagaaacattttgagaaatttatcatgaacttctgtgaactaaacaacatgaaaactctgcttctttttttttttacacaagaaaaactctgcttcagactgaacaagtgttaaagcaacagacacaataccttgagttccaacaggcataaacagtggtgtctgacaagtaaagtggggtagtgttaatcgagctgcacgagcacgattgaatcttcctaatacctgcaagcaagaataatttttacttcaggtttcgtcattatgctcaatgcctcatataagatctaccgctatgtcagccagccaccttccatcagttggacaataccgacgatgaggctggacagaaagaccatgatgagctgacagagtgacagtgctagaggtactaggccactctaacaggacgtgccacgtggcaattacatatgcccacattcatgcttttctattattttcctattacatggaccactaataggactataggtatattagcttaaccttagtgaagggtaataaacaaagaaaactcaagagatttaatcaaacaaagtacaggattaacaggaatacagtatgtagcaccaactgtagagtgtagagctaggcaatgacaaattacaacactgagaaggcacgtgcctatggcagcattggtcaactaccttctttaactaaatagttactaatccagagtactaaacgcaatcttaaaataaaacagtatcagcttaattgggaatctgtactcccagaagatcgtatgagacaaaaatgattagagtgaaaatcacatgtaatggcttgtcgactaaaactacagacagaagtacaaatcttatccacttaatcaccacaaacttcagccggacgcctagtttgcgtatgcgcaaaccagagaaaccgttgagtttgcttcgcatctcagcaatcaaacgcacaagcaaactagggaaaaatcatctagaatcgaagaaagaacatgcacccatttggaacttcaacaaacctcgaaccgaagcgccatggagaacaaataaaaattaaactccagccaccgagctggaacctgcgcgtccgtattaacaaaatcagctcagagattagctcgaagcaacggaaagaacagccgagacgcgcttcccgtttggcgccaaatacgatattgaacgcgatacggaaggggaatctggcgcgaccaaccaacctgcggtgcggcgctaaggctcgtagaaggggatgaacaaggccgcggggagatgagacgaagaggaggcggctccgaggggagtcaaagcccactctcgccggcggcgggggaggaagccctaacgcggttcttcttcggcgtgactttggtggcggcggccggcggaagcccagcaccgatttaaaaaggggaatgggaattttgcatggaacaccctcatctatgacatatttcattcgatgccttccattttgcatcctcctgcttctgggcaggctaatgaaccatgaggaaataaacatagcaagaaaaaaacatctatgggtaatatatttatattattattgttttaaaaccacaactgaaaaacagaccgatgaaaaaaatccaaagtcaaaatcacatgttggctattgctaataagttaacaagcaccaaattttctcatatggtatgtgtcttgtgtttggttaaatgtcatattctctttattataagcattttaaggttttcaaatcctattcaatcgtgtgaggtgtgaatgggattttttcttataggtgtgggaataatattggaaatttagattgtagaaagcctcctgtcatgtgctaactaagaaatacggagaattggaataattggatcatgactcccgtgtcgcctctctggtgacccgggaggcgaaaggccgacgcccagctccaaccccgccacgccccgtctgcctcaccgccgccggcaacgccaccgtctgcggtggtggccggcgacggcagggccgccctcctccctctcccctctttctccctgtctctttcttcctttctccttcctccctcccttcttctctaggtttgaggcttcccggaggcgtcggccccgggcttggttcctcctcctccacgtctcacgccggcgaccaccaacatctcctgggcaggtggtgagggggacggccagatctgacctcccaaggtccaaatctgacgcgactctggtgtgatccggactttgaggggcctagcgacgactgtgagggctacacgtgggcgagctccgcagtttcccgcgtgtcctagcgtgagagactggctggtggcagcgctgcaagatggggaacggctagatctggccctctaggtccagatctgacgtgtccaagctggggttgggcgaggaccggacctcaatggcggtggtgacgacgggtgggcctgtgtggcgccgatggtccggtggtgccgacgagctctgcagtttagtggtgctccatcagtccggcgaggtggctgagcaggtcatcaatgacgtttgtccggccattgtgcaggtggttgtgtgcatagtacaggtaccccgtgtgcaggtggcatttggtggcttccgacgcagacgctatatttggatgggactctgaggtgaaagccttgctcggcttgccgatgctaccaacgacgactcccttgggtgacgtttacctttttgaaggcgttgctattggagccctcgttcaaactccacatcaagggatttctccgggtgaaaaccttagattcgttaggatcgaacgatgtcgtcgttctgtcggcgtgtccttcttgaaggcttcgttttaggagttttatcccttgctggactgttgttcttagttttaggttcagtatatcaatgctggggttttcgccggttttccataaattaaccatgccgttgtaaggtttttgggtccggttttccttataaactggatcaactctcttcttctatagtaaattgtactaactccctgcttgtccccttagaaaaaaagaattggaatatgatatagaggagaaaataaggctttgtttgacacaactctagatctcaaatggatttgaagtttttatgttaaattgtaattgtttaaaatttaaaattatattaaaaatgatataaaataacttatcaaaatattatcaacgtaatcgtagatataaatttatgaatttatatagagctacggacatccggctctaaaaattcttacatcaggagctatgaaaatagaggaccaaaaaagagtacaagaagtagacttttgaagcccatggtactactatggttgtgtacgtataaaccattgctccccaccggaaaaaaaaagcccgtggttggcgcggccgcggagcaacaccacgtcagtggggtggaaattttgccaaaaatacgattcatagggcttgtttagttcacgaaatgaaaatttttggatgtcacattagacgtttaactggatgtcgggaggggtttacggacacgcatgaaaaaactaattttataacttacctggaaaccgcgagacgaatcttttaagcataattaatccgtcattagtacatgtgggttactgtaacacttatagctaatcatggactaattaggctcaaaagattcatctcacgatttttcccctaactgtgcaattagtttttcttttaatctacatttaatgctctatacaggtgtccaaaattttgatgggatgttttttggaactaaacggggccatagtctcaaaaacaaggttgacgttggctaagaaatgaaagttcatgagtaaaagaaaaaacactcacaaaacaaggtgcccattccggtccaagaccaggtacaatagcatactataaaccagttataaacacgtatcgagaagataaaagataaaagagaagagcaatggactatcacatctcatttcatagataacatataccattaaattaagaggtaacatatacaatatgttatatttatcatacaatccccaatatttttaacactctcacatgcttattgaagtttgtgtaagggttacctcttacatgagaggtgattatttctctctcatctttcttctctcccccacctcatcgtgtagtcctacgcagtatcttggagtttgtgcttggataaacatagtatattcccttatagtacggactttaagacacaatgtgtgtatgataggtaagacaaagtattaatagtgtaatatatatttataggtaaatattgtataaattggatattaattgactatggataatttgaaacttgtaatttgctatgtactaaactgcggttgagttcggttattaactttcccaactcacatatctcattttccgagtgcacgtttttttttcatcttttgcaaataattttatatatgaaagttgatttaaaatcatattattctattttttttaaaataactaatactactaaattaatcatatgctaataaattactccgttttacatgtgggagagtgagttctcaaccgagagaaccgaacacaacaactctggggtctgttcggatgccccttttcctaacccatctcgctcattttccacgcgcacacttttcaaactgctaaacggtacgtttttttgcaaaaagtttctatatgaaagttgcttaaaaaattaaattaatctttttttaaaaaaggtaacaccaccaccgaacacgcctgagacaattaccaacgcatgcaccgaccatctcgggagtagttcggaaaaaaatatagaaaaatacagccgactcgattgccgtgcattcaactctttgatcgagccatatcttcgtgtcctgttgcattcactcccctcggcctttttcgcacagaccaaatacgaccacctaaaaatggttgggaatcatagtaaaaagaacactactactgattgcaaaatgaaattaacataggtttattcctagtgcaggattcatttgaccttatttgacagagatccagttatcaaatccacggtatatttgatgtttgtatattcatagtggtttaaaatttaaagtttcatctagaataagaacaaatttatttatccaattgctatgcatgtaatagtacatcggagggtgaactcctcaagtgggggacagtgaggccccccttgttagttcggctggggcagcgggtgaaaatcgagaactcggtgagatgtgtggtgtagagggcctcgggcccctcgagagcgatgagacaaaaacggtttatacaagtttggaccgctaagaagtgtaatgccctactcctgtgcttgattgatcgactaagaaattcaggctttgagccaatgagaaccaaacgtgagttagccaaagaaccaatctctcttcccccactaggcttggacctccttttatatcttaaggggctgctacatgggcctataaatttgcctaggggaaagggaggataatcacgttaaatgcacgtcttgttgcttgcctcagaagccattcgcacgtccgccacggcatggggcccgtcaattctatttggctgacatggggggacacgcatgtcattcaccatttaatgggggaagacttttgggtccttacttgcaccgggaaacgaaaatcctgctctggctgggttagatgaatcaactctggctgtaatgagaggcaaagcaacctctcatcatcatgatgtgacaggagatgtcaggcggcggcgtgccacctgacatgcaaccagtgcgcaggcgcactaccctagtcgtatcggtcattcgactcgtcacagaccagtcatagatcgatcaggtgcactacacgttgtatttgatgcggcgtagcatgcccgctcacaccaccttaaatgtggtcaggtaagcattggggtcgtccgcctaaccctgcacatgcggcgtcatgcgacccttggcatggagggggcggccgccgtcctacctcgggggagtgccacgtgggtaccagggggagccttctctctctgagcttgatacccccggttccgtatcactgacatagtagattcagatataaggatttgtggaactagaaatacctagctttataaaatcttggatctagaattatgccaagagtttcaatctcattaaatgaggaatcctgctatatgtacgatggtgccatctgattactatctggccgtgttacggcataaacacagctaacaagcgtatacgaagatttatcatggcgtgaatcatctaccgtgtgaggctttctttgttgctttggtcaacggcaacgtcatatgtatatcattttcattaatgtcacatatgttaaagtgacaacgtgtcatgaaatttactaaggccccctttaattcaaaggaaatttataggaaatttagaggaaatttatagaaattttagagaattttatttctataggattttttcctacaaagccctttgaatcaaaggaatgaatcctatgaaatcctataaaattcctatggaatgtctcttctcatacaagttttggaggaattttaacaagagattctacctcatggaagaaatcctttgagtctttatctctcctcaaattcctgtgtttttcaacagtcattcatatgtttttcctgtgtttcgaaatcctctgttttacacttatatttatgtcagaatcctatattttttctattcctccttttttcattcatgtgatttaaaggtgccttaagagagagaagggaaaagttttatgtaaataaatttggtttactaacatgacttaaattttctagacactatttataatgtcatcatcggcgtgaaaattcataccccatcagcccaccattttgtcgagttggggagtttgaggattgggcctgtgtacaagaggcagcgcaaccatgggcacggcccatttatcgcacctccagtacatgggccgcctccgtgggaaaggtgacgtcccagctcacacgtaaagcagcaaccgcgtgtcacgcgacggggaggggcagtcgagaagcgcatgacgagatgacacattgaaaccgtctcgcggtcatctcgtccatggggatggccgcgaccgagagagaaaccgtctcgtccgtccacttctctatccaccactgtccaccgtggccgctccgctccaccgcgtgtcccactcccaccacccccgctctcccgtccgtccgcgcgcttccccccatgcgagatcaccgtctcctccgcctcctcctcgttggctcgtcctcttcccccatccgcctctctctctctctctctttctctctctctccagtctcctccactctcctctcttcgagagccgctcgcgacgcgagcctcttggagcgcgcgccctataactaggcacccgtgtccccgtcccggatctcccccccacccgtcgctccgccccgtccccattttggatggattccattggtataaatcgcgccccgctgggttcctcctcctccgccgccgccgtgacagctcgtcgaggcatcgcgctccgcccggctcgccgctccgtcgcgagtacgaaccggtgagcgtgtgtttctccctcgcctccgcatttttccctcggtttttgaggcggcggcattctgattctgcgcatggtgatcctgagtgcagtgtgggtgtggcgacgatcggcttcggggacgcgtctgggctcagagcgtgttctgagaaggcaggtgtctctatctctgttgcgtcgatgcctcgtttccatgttgatttgggtgtaatgatccgagcgtaattggtggctggtgtaggttaggcgatttgattctgtacgaagcaccacggcgagagctcagaacgggaacgctgggagaagcatgaccgaggtatctcaccaagcttgcagttgctggcctttatattatgatttgatccatatgtacgtttttagggatcgcaatgcttgacacaatcatggtatgtttgtatgttcccagctccatgcaaacatgttctgtatctataaactggatcatgccacattttgccatctcttttaattttgcttctgattctaggatgtgccattttgtcttgtttttctaactttgtgttcaccttctcctttccttatttttaattatgtaaccacaggaaagaggatgtacaatgtctgatactgaaatgccatttaaatattcctctggtaaagccttcccattaggagtgtctcaagttgaaggcgggctgaacttcgcacttttctctcagcatgcttcttctgtcattctctgcttaaagcttcctgggaggtatagctttaccttttcctaaaactgttgtgaccttactggtttttctttttctgattatatgtgtacctgtgggttctggtctcttaaagtctcaactatggcaactggcagttttgttgcatgtcatctatctccttgctgtcatctttttatgaacttgctcaacatactttaggtctcatactcttacgagatatggcaaacttgtttttcatgaccttactacacgatattaagcagttgttatgcctttgacatagagtctatgaaattttgaattcatttttcaaatttgacgctcgaaaggaaaactacttttctgtttttcagactaccatatcgtgagttgatttggagtgtaagcctggttgaaaacttgaaataatctcttacagattaacctgtaattttagcttgtcctttccacggtaacatgttacattct

SEQ ID NO: 9840 - DNA, 42947 bp, Oryza sativa
cgatttacgtgcaaaactactttaaactgatttttgtcttaaattacttatccaaatcatgatccgattggaccattaaattcgttgcgattaaatctttaaaacaagaccacacatagatatattccgacgaatttttttaacttattattgaattatttttaaatgtttcacgatgttccaccaggtatatcggaattgtttcactgagtagatcgaaaatgtttcactcgtttaaatcaggtgttgtttcaccttatataaaaaacaatgtttcagcaaatagcgaaataatgtttcagttcactgcaacattagatatatacatagtgaaacattgtgaatacactagatgaaacatttttttggtggaacaaaaaataaaccaaattcccttaatagggggtttcaaaatatgtgggttattttattgcaatgaaatgtttcgttcactgcaacattagatctatacatagtgaaacattgcgagtacattaggtgaaacatttttagtgcaacaaaaagtaaaccaaattcccttaatagagggtttacaaaatatgtggttgatttgttgcaggtgggggcaggtaatgtggtggggcccaacagtagcgggggcggagccgcgggacagcgctcgatttttttctcccccgtcggtcgaccgacgaagagcattatcgtaaattattatattatttttctaggggtggtaaatttcttttatccttttccggttcgttttattaaattacggctgttttgggtccatttcaacggaagaaaattggtctagcagggccacagggtcatactttcttttcgataaaagctggtcttggtggtctcaatctcgagttcgctttgtttatccttcggtctccacacctcgcctgcacagttactgcaactgccgtcggtgtgttcggttaggcagtatagccaaagagcaattctacgtaatttagtaccttatagtatctaactatcgagacattctaaatttataataaaaaaaatagtatccccttaaaatcgtaaaattgctcgtaaccagatgtctactacatggctgtatctgattgcaaacgtggtcgaaacaaacgacttttgaggggataacttcataattgcttccgaaagaatcagaactaaacacgtctgatgacaaataattgacatgcgacaaaagcaatgggttttgtccataagcaaatgttttaattatatatcgtgctatacaaaggaaaggaatcttgctattaatcatctcgtcaaattcgtcgccgtttcttggatctagaaagatcgtgccattgccacacgagcttaattaataattgaacctctctcgtacgtccgaggatgcaattaaacccggtcgtcctgctatgtactccatccgtcccaaaataacttaattcttggtttccgtgtccaacgtttgaccgtccgttttattttaaaaaattataaaaaaatttaaaaagataagccacgcataaagtattattcatgttttatcatctaacaacaatgaaaatattaattataaaaaaaattcatataaaatggatagtcaaacgttagatacagaaactttggaattaagtcttcttgagacggagggagtacgcttggatggaaaaacgtaccggatatcgtagttggatcgacttgttggagtagtcctctcatcttgttgaaagccatttccccgtcgattaattctgagatttccggccgcgtacacatgtactcacctttggccgtaactgatcaaccacctccaggaacagtagccatcgatatactcgtagccgcttcctttgctatgtatatcgttctgttctattgtttgtgtttcctcgttgctgaatcgatcaagataaggacggaagtagctagtaataatcaagtacgccagctgcatcagcccagtaagcatcaccaaagagtattctaatattttattctcaaaactatatttttatctcctaaactgaatatataggaagtgagaaaactattatttttaatagatagcttaaaattgatttcctataattaaatgtgagccctccctttaactatcaacagaaaaaatgggtttttctatcctgccctgcgcgcgcacaacgcgagatgccgatctcctcatctctctcgcgatttttcttcactgacaccgatcaatctattcgagccgtctgttggttgctgatctccctcgattcccctctgccagctcctccatcccctccaatgccgccgacgcttgtgagggagacgatgatggctgctcgcgagtagggcgagaaaaggagcacgggaacattttctcccagcgcgcgcgagagagcgaagacagcgattgggaagaaaaaatcgctctctaacagtgggtaacgagatttccggaattgagaatctggattattggaagataggttagggaatctgttagatgcgatttttgaccaaactttcctaaatttgaggatagggaatagaataaggaagctgttagtgatgctctacgactacagtctacgactacagaccaaaaactgcgtctgttttcggtccattccaatataagaaaattttcgtaatttcttttcgacaaaagatggatttgggccattagataggcagttggctaaccatgtggtagttggttatagaacccgtacctataataccatatagggtgtcgatttgcaaccggcaccaacgattgaagtcatcagtgccgctagtattgtgccagcaatgatgaatccagaatgaaaatagacgggtgtcttgttcgaatgaaagtttcgggcgagaagcgttgactattataaaattcaaattttgatttattttaattttgatgaaaattctacataagaagttcttgctgaaatatcacaatgtttagtggtttgacaagcatatgcctacagaaattaagaaatttggttatctgtttattctttaatttgagttatttctggtacaaataagaaatttgatttacagtggattgatgtgtatagtttactagctttaggccatgtcctttcagatttagagttttttgcggtactttatgtatttgaaatttaactatatacccttcccaaaattgaacttctaggtacaaatatatacgtctcatcttagatacattttagatactgatactaattaaggtggtagaaaggcagtgtcgcggtagtatcaggaattaaacggtgtaatggaagaatgcaagctctaataattattttgtccgtgtcagttgtggtatacgtagttacgtacggtgtatccgatagtactctgttagggagtgtaaccaaatatccacaaggctgtatctgattgcgaacgtggccgaaacaaacgacttttgaggggatataactccataattaatcagattacttccgaaataatcagaattgaacaggttctacgacaaataattgacatggtgacaaaagcaatggaagtggataagcaaagattttatacaacatgcaattatttgaaatccttgaatccctgtgtctaactttagtcactcgttttttgagtctaatcctgggcgagtggatgggaagagcaccgtcagtggcggagctggacggaaaatcaaaggggggccagccggcttttgacagctcaaaaaattggcaatttctcctttttttcgtgtattggcaatacataaaagcgaatagtttgcagaagcggacaatatacttacatgttcatttaaactatacggcacgagtcttcactgtattgaaatcgctgctatgggccagcaagactgaattgggccatacggtggcctgctagacctggagaccatatataggggtaataaaaaatttctttttattgggaggggccatggcccctgccagcccccctcaattctgccactgagcaccgtgagcgtgctgtggagttaacgacccagctttttccgaaaagcacgatgcggggcgcacgggagggtgggaacagcacggacatgatgtggaacggtgcggcgtctgggtcagcatttcgtcaaacaccctgtgtgcgtgcaagtggctatctcaaggaaggagatggtgaatagttgcgggctgggttgggcggcctgcttaggggaagggaaaaagagaagaaaaaagtacaccaaaggtccctcaacttgtcatcgagttacaaaatcgtcctccaaccgtaaaactagatatatgtcatccctcaacttataaaaaccgttcactttaggtactttgatggttttgaccctagttttgtcctacgtggcggctgagtcagtgtaggccccatatgtcaggatgccacgtcagcaccctctctctccccctcttctctccacatatgttcacatattttcgctgatgtggcaaatgtctgggcccactcgtcaggcatggtgcgtgcaagaggtgcctctgccgctgtcgggagcaggaggctggctgccaccggtctcagccctcaccatgctcgcacgcggagatgccggagatctcggtggaggcagcgaagatgaagactcatcgtttccccaaccttatcgccgccgctaacagaggccctggtctaggaaggggcgtcctagatcatcttcggcagatcagtcgcgtgcgtcgctggtgagactgaaacagacccttggcgcctgatctgccgcctgtcacgctcgtcaatggcgtcgagcggatctagaggaatagggaaggagccggcgtcgacacccagtgttccgcggggggcggcggcgtgggcgcgtggggcggtgggtgtgcgaggaatcggagcttgtatagcagctccaacccgctgtaggagtcggagggaggagctcgtcggggaaatcctcggagacgagcgagcaacggcgacgtggttttgcttgacgacagagatacccgtggtctcctcgattgttgacggcgtgaacccctccctagacagcgtggagttgagcggcgtgtactcgtgcggtcgtgccacaacccgagcccgatgatgcttttcctccccatcctcatccgtcgtgctgccatgtcctcctcctgcggccgttgtctcccctctttgtttcgttgttcacagggcgggccggtcggtggggcaaggcgaggcgggataggaggaggtctaacggccggacacggtagcgctgggcagcagatagcggtgggtgcggaggaggctgccgaggcggctctgggcaccaccgaggcacggcgcgccgccaccaccgtcgaggccgagacctacgtggccgtcacagagtcgtcctccagcgccgcgcaggcttccgtcgaggacaggatcgaggtgctacaggtccagctccgccgcggctgctccggcagcggtgatgggtgcgaccatccatcgcgaggagcacacccaaggacaaattcgtcgttctccacatcaacgtgtcaatcaatcaatcaatgcatccatccttctagaacacgatggcagcagccactgcaacggcgacggcaacgaagctggcggtggtggtgtacacgaaggagccagcggggtcgccggtcggcgcaggggcggtggccggggatctcgccgggggagcgggcagcggagccatcttagacgccgggatgggggccgctccccgggcctatgcggcggctgtgacggtcggggaaaggcgacagcggcgctcgccgccggctgccgtgcacaggctggccgtctccctccgctgcttgagagcgaggaagaagagacatgtttacacccaaatttggcacctaggattaaaataggaaagatgaccaaaatttagaagtctaccggttttctccgagtgggccgatctgaccgccgtgtgttgggcggtcagaccaccggttgagggctggtcagaccgccggtgtgtggccggtctgaccggcaggtccaagtccgactgtgtttcgtcgggtctcgaggtttccttgctcgggaaagcatgtttcgggtttcctttggtttctatcccgagttggacgtggaggagggcctgtagagggcaagatcaacccctatataagagacatggccggttctattgtaactaaccaatctacagtcaatcaattgaatcgtttttcatattgcttttagttttctcttagtttgtctatctttctcggtttgcgccgtaaaccgttcgccaccgctgcgagagtgcgacatctctttgtaggtacgtcacggtgaacgagacggcggagcgcgcgctgttctactaaaggcgaggccgacggcggctccactacgtcgtccaaggcgcccctcctcctctggctcaacggtggccttgtctgctcgtcaatccggtacggcgccatggaggagctcggcccgttccacgtcaagagcgacggcgagacgctcagcgcgaggatgaggtggccaccagtgttatcgcaccacgtcgtgctgacctcgccccactgctctctgaggccgtcatgccgttcccgacgatgtcaacgggaagggggaaaagaagaaaggagaaggagaaaaagaaggaaagagaaggggcaatccgggtatttagaaaactatctcacctcttttatccctggaaataataaaataatgcgaccggtgttctacggccaattatacgcatttttagtgtccattagctgtgttacgttttttagtgttttctagctaattacatgttttttacgtgtcctgtagcaaattttgccgaacaaaagaatagggggtatagagaaaacgaaagaaaaaaagaaatagagaacaaggagtgtgaaaatgaaaactagtcagctagataggagaagagaaaaaacagagaaaagaatatgggttacatttaaaatgaaaaaaaaaagaaatagaggataaggagagaaaacgaaaaaaaaaagctatataagggatacagagagaacgaaaaagaaaatagaggattaggagacaaaaccaaaaaaaaaagaaatagaagataaggagagaaaaaaaagaagttatataggggcacaattggggctcgaacctagcacctcttgtctcatactctctccatttttataacgtaagactttctaacattacccatatttatatggatgctaatgaatctagacacacacatatgtctagatttattaacatacatacgaatgtagacaatgttagaaagtcttacattatgaaacggaggaagtagctatgatatctccatcattaaggacttgtttagttggaaaaaaatttgggtttgattgtcacatcggatattaaacgtagtctaatgacaaaacaaattatagattacgtcaggaaactgcgatacgaatttattaagcctaattaatccattattagcaaatgtttgtaccacatcgttaaatcatggcgcaattaggcttaaagattcgtctcgcaatttacacgtaaactgtataattagtttttttattttgtacacatttaatactccatacatgtttccaaacattcgatgtgataggtgaaaagtttttattttaagaactagacaagacctaagccaagcaaaccttttgtaaatcaaagtgcatatttatggttttatcctatgaagctctcagcaccaagtagtattgcgctgagctcggatgatttagcaagtccttgccatcttggacggaatctcagtgctaatattagtggcgttaagatgttatagcttagcgccaagcatgatgacaataagtaaaagatttattttttatttagtttttatcatggttcaatcttcaaataagatttctgaaagaaacattttgtcaaattttcggccgctttttccactgctcagcctgcacatgtatcacgcacgggaccagacgcagtgtgaatggcctgataagacaagcgagggcagtacttattccagcatcgtgtcaattggcaagttgattacaacacggaaaatcgaaagaacgtaactcacttgaaatatttttatatttttttatgtttaaattgggaagagtaacatttttttattattctctcttatttgtttcttttactctcctatgaaaattagaaagaacgtaactttcttaattctttttatatatttttatctttacagataaagaaagaaaacaaaaaataagctagataggagaaggaaaaaaagaaaagggcaaaatttgccacaggacacgcaaaaaacgtgtaattggctgggagacaccgtaaacacataacacggctaatggacactacgaaaaatgtgtaattggttataggacaccggtcgtattattttattatttctaggtcaaaagaggtgagaaaatttttaaaatagcgagattgcccctgacgccatcttctccaatccgaaataacaaaagttttgtagctgccggcaaggtagctggcggcggcgaccgcgcgccaggagcggcagatggcgcggaggcggacgtgcagcgatggctgctgcatcgcactgttcttgctggtggcagcagcgcaatgcctcgtgctgctcgctggcgcagccggagcggcggagccacgcacgcgccagggagactacctggacagactgcgtggctcgccatcgtcgagggtgtcgctggccgtcgtgtcagccgaggatcgtagcgcgccatcactctccgataggtggcatgcggcgccaacgacagcgccggcggcgcttgggagccaggaggcggaccgcatggtgatgctgctagggcagccgaacagcctgggcttcgcacaatacgttgggtatgtgtgatggtggacgaggtgacggggcgcgcgctgttctactacctcgccaaggccaacggcggctccgccacgtcgtccaaggggcccctcctcctctggctcaacggtggccttggctgctcgtcactcgggtacggcaccatcgaggagctcggcctgttccgcgtcaagagcgacggcgagatgctcagcgcgaggatgagatggccaccagtgtcgtcgcaccacgtcgcgctgacctcgccccattgctcctctgaggttaccatgccattcccgacgatgtcaacgggaaggggaaaagaatgaaggagaaggagaaaaagaagctaagagaaggggcaatccggatatttagaaaaatatctcacctcttttatcctggaaataataaaataatacgaccggtgtcctacggccaattacacattttttgcgtgtcctatggcaaattttgcccaagaatagaatagaggatacagagaaaacgaaagaaaaaagaaatagaggataaggagtgaaaacgaaaactaataagctagataggagaagagaaaaaaatagagaagaatatgggatacatttaaaacaaaaaaaaagaaatagaggataaggagagaaaacgaaaaaaagaagctatataggggatacagagaacgaaaaagaaaatagagggtaaggagagaacgaaaaaaaaaagaaatagaggataaggagagaaaaaaagaagctatatagggggacaattggggctcgaacctagcacctcttgtctcgtagctatgatatctccaccattaaggccttgtttagtcgagaaaattttaggtttgattatcacgtcagatatacagacacacatttaaagtattaaacgtagcctaataagaaaacaaattatagattccgtcaggaaactgcaagacgaatttattaagactaattaatccatcattagtaaatgtttgtaacacattgtcaaatcatggcacaattagacttaaaagattcatctcgcaatttacatgtaaactgtgtaattagttttttattttgtccatatttagtactccatacatgtgtccaaacatttgatgtgatgggtaaaaagtttttgttttggaaactagacaaggcctaatccaagcaaaccttttgtaaatcaaagtgcatggttatggttttatcctatgaagctctcagtgccatgtagtatggcgctgagctcggatgatttggcaagtccttgtcacctcgcatgaaatctcagcgctaatattagtggcactaggacgctatagatcagcggcaagcatgatggtgctaagtaaaagacttagttttgtaattagtttttatcatggttaaatcttcaaacaaattttctaagagaatcattttgtcaaattttcggccgctttttccactgctcagcctgcacatgtatcacgcacgggaccagacgcagtgtgaatggcctgataagacaagcgaggggcagtgcttattccagcattgggtcaattggcaagttgattacaacacggaaaattaaattggatgatccttaaattggaagtatgtcagaacaataaaagagtggcagccgtgcaaattagctttatgcaaaatctaattcgcgcgcgctctctgttttgtcttgttgcgccacatactcatcggccgtccgatccaacaagctctggtgcgtctgtacatagcctggtgattcacggacgtgccatcatccagaggaatccaaattggaagccatgtgacgctctacgctacgccggcttcaaaaataattttctcttaaacaaatcatccgatctacgatccgattacaccgttgtgttcgtaagaattgaatctttataacaagatctcatatgattatgttttgatgaaaaattagaaattacttttataatatatctaaattacttttagatttcactaaattacttcttagacccataaaagtaaatttaaaaaagcctaaaagtaatttacatatattatagaagtaacttagaaaaaaaaataactttatcacgacattaaaagtaaatccgttatggaggtaaaaacatgagtctatatagaaattaaatttaatcagcacaaattacatcattgactaaaaatgattataaaataaacaactcacaacatgaatgtatagatttcttttaatgccgtaacaagttacttcacttttgttttaagttacttttataatataggtaaattactttctggctttattaaattaattttatgactaagaagtaatttaatgaaatctaaaagtaatttagatatattataaaagtaatttctattttttcataaaaatatagtcatgtgagatcttgttataaagatttaattgctatgaacacaatggtgtaatcagatcgtaaatcggatgggtaatctaagagaaaattctataagaagaaaaaaaatacatgcacttttgaatataatagtagtaactagatatgaggttgagaggtagctggttatgaccatacagagaacggtctcgttgtagacacgtcctagctttatctattgttgccacgtttattttgtagtcatgtctgatgacaggtagctagggtggtggagaccatttgattttttttcacgaacataaaaaaatataaacattaatatattaaaaaatagaaaaaaataagtagaacccatatatcagtaacatatagaaaaaaaaatatttttctcctctcatttttcatttattttttcaaaattaaaaacaacattttattctttctttttaaatttaattgttttctatgtaactgacatgtggatcccactgacacgtaagcgttaccgtggtatgccacgtcatctcaagaatcaggttgaagtctatttgaacctatatggcattcatgataagtttagggattcaaaaatatattggtatgccacgtcatctcaagaatcaggttgaagtctatttgaacctatatggcattcatgataagtttagggattcaaaaatatattttaatagtttagagatctaaataacacatctgtaaggactacccgtgtatttcactctaatgttaattgtttagttatgtgatgttcttcataataataatagggatagcatgggtattctaattaaattaattttctcatgcatgtacttataccagcattgcatctatcggcaagtcgattacaacacggaaaattaaattggatggtccttaattatgtcaaaactataaacgagttgcagccgcacaagttagctttatctatcattgccacatttattttcctacatgcgacactgtcagcacctggatctggacttcacgacgccgacggcctcgagctcctccccaacctgtcctcacctcgtccatcacgtgcacggtgccccgttacctcaccaccacatcgtcggcttcgctgccaggaactgccggcgcacggtaccggtgaaggggtatcctcgccatcacgggcctcttccttatttgtttatagttgcgccaagccgccactgccaccggcgggggaggcggtgacctttgaacgacgccagcctctcctcgtcgcccaccagcttgctggccttctccgccaccagcacccagtgtttgaaatttcggttcgaaattttcaaaatttcggaaattttgaatttcgccccccaccgaaatgctaacatctcgcccgaaaatttcggtttttttgtatttttttgtgaatttggttacattttattcaaatttattaaaaatctgtcaaaaattcaaaaaatttcatacgaattttttccgaaatttctgaaatttcaattctatcgctcagctgcggcagaaatgctgatttcgaaatttaaaaccctaccaacaccctctgttggcaccgccacctgctagcttgttggattaggaaagaagtttgatcctaagagcaaagctatcattttgcaaaaattatctctccaaaatagcaagaattcatacaataacgtgtatggtgtctaccagtaaattaccacgtttttgaagtgtcctcgagcaaatttacattcttgtggtgtctcccaacaaaaacaacattttttgagtgtcttgtagcaaattttgcctaaattctaataggtgttatattatgatagtgcttgctaaggcaaatttgcacatagcattttttttctaaactaaacatttggaaagttattgatagtcaattttaaaagtttgatcaaatcttgtgatatttgagtttattgcaatatcctttttgtgtcagatgattgaagaatatataattcttatgtgtaggagttacattagaatcgaaattttggttcactgttatgctttttctaacattactattctcagaaaaaatgcaaaaaatgttaatgctttttctacctttaggaggtatgcatttttaaagtgatagtagaatacccatgcaagtgatagtagaggtagtctcttcactgttatatatatctgctaaactgttggagccatttatatcgtgcaatattatatctgctcctgaaatgtgtcttaactaatggcataccattccatatgcatcaattaattggcatataccattccacaactcaatggtcctagcaaaaggcgagttaatttgcgagatgggcttttctgaatggccttttttgaatgagctaattaattctttcaataagtacactatataaatagcatgacagtatacctggcctctatataaatagcatgccgcagggtgatcagtgtgttgcctagaattggtgtgttgttcccatcagaaaatacaaccatgatcaacacggaacgtgatttccacatggtcggaggggaaggagaaattagctatgccaggaattctagggttcaagtaactactctatctatctgtctggctgtcaatctgcatatatctgtctctcttactcactaacacatatgcgcgcgtttcactgcttttttccttaaaaaaaagagggtaagaggtttgcctcatatatattgatatagcagagttacttgctattgtgatacaaggtattttgccaatcatctgcatgcaagttatgaggtctgttagaacaatagctttaatttatgatagtatcagcaaacaagtaaactataagttgtgatagtgcaaaggtaaactaggttgtacccatgatgcatgattgcatggagcatatttatgaatttgaaaccatataaaattcactgacttcattagttaccaggaaaaaaaatgcttgtacagcatacaaagacaagattggaaattctttttgttggctcctagtatcgtacctgatatgaacctagaagtacaatgttttacgtacttttcatccgaagattaaagtggattaaagtgtattccttatacaccagttagaatagagggtatttgcccggcgaaaaagaaaaatagagggttttttcctctatccatggcgatcaagggagctttactcaggaatcattaaaaagaaattctgatgagtacagctttttggcttcctttgatttgtagagaaaacgaagaaagcaataggttccttgatatagaaagtaacatgtttcattttttgacacgaatgaatcgatgttttctttctttttttatcagattgatcaatgcacaatatttaattatttgattatgttatactcgaatttaattccagctaatgatacatcatatattagtagcaataattaacaatcttttcacatgcatgtacgctgttagaacaaggctatgatggagactaagtcaatcctcgataaggtaacccaagaagtatacactggtcttttaccacgtaacatggttattgccgaccttggctgctcttcaggaccgaacacattgcgttttgtctcggaggtgataaatatcataactaagtgccaaaataagctaggacaacttgatttaatggatcttcagttcttcttaaatgacctacctggtaatgacttcaatcacctctttcggacattggaaacgtttaagaaggcaaatgaaacaaatcatgaaggagaaatagtacctgcatactatatttgtggagtgccaggttcctattacacaaggctttttcctcaacaaactattcatctctttcactcctcgatatctcttcactggctctctcaggtacgcaataaaattaatcaagtgtaacatctatatatagtactacaagatgttcatacacatgtggtctctgccaatgcaagtcaaatcatcagcatgatactttgagttaattagcagtgctatcatttacttaggtgcctgaggagctgaatggcaggaaaaaagtgtacctaaatgaagaaaacatatacatcacaaagactacaccacagtccgtggtgaaactattccaagagcagttctacaaggacttctccctcttcctcacgttacgccatgaggaactcgtgcttgggggccagatggtactgacattttgtgggagaaagaatgaggacgcacgcagtggatcagaactaaacaatctctttggtttgcttgcacaatcactacaatctcttgtcgctgaggtacatatacaattatctatgcgaatttggtgtcactctctcaagatgcgatacaagatacaccctctatccctaaatgtttgacgccgttgacttttttaaatatgtttgaccgttcgtcttattgaaaaaatttaagtaattattaatttcttttctatcatttgattcattattaaatatacttttatgtatacatatagttttacatttttcacaaaagtttttgaataagacaaatggtcaaacatgtttaaaaaagtcaacggcgtgaaacatttagggaaggagggagtatatcatatataaaaaggaaattttcaggtgaatacatgtaattaaaataaactctcggcatgtatataacagggcttggtggagaaggaaaaccttgagtccttcaatctaccactgtatgggccatccgtcggtgaggtagatgaaatagtgaagaacgtcaatttgttcgaaatggatcacatcaatctgtttgagtgtaattgggatccttatgatgactcacaaggtgatattgtgcatgacagtgccttgagtggcatgaatgtagcaaagtgcattagagccgcactgcagcccttaattgcatcttattttggagaagacatactcaatgcgttgtttgaagaatatgctcaccgtgttgccaagcaccttgagaaggagaagggtaagtttgcttttattgtcgtatctttgaagaaaagatgctacataaagatcgggagctagtactcgagtatatcactaaatgtattgctacgttaaacatatttcatatctgctacttgtttgtttctttcacctacttgcatgttattgtcctccctggatgtatatgtgcatgatcaaatatggtcattatatttgtgtttccttgtatctctatggatataaataaaggttaattggatccgtaccattataaatttatctgctaggaataatatcattgctatttaataatttgctctaatgtcattacaattttatacttatttaaaatatatatataccccgtacttaacccttcactatattttctaatatttttagaccaaatcaaccccttctccttgctcgtcctctcatctcttcaatgggtctaaatccaatccaaatccgcaccaacccaacacctcttcaaagcagctcactcaaccaatccaccccacttcttcacctctgggacccaatccaaaccagtccacaagcagtttcaggccaaaccaacccaaaccataatagtcttagtggattcaatccatttggaatccatggattcaacccacatgcagtccacaacggtgctaagcgcatcgctcaatggccgcacagataggaatcgtacagcaaaggccggaccccaccatggacttcttcgataccaatcttgcgaggaagaacgtgacatccacacgcagcgatggcctgcttcttttttaggtggatgaaatcaaggcgacggcgagcaggacgaacccgacgttcgcggcgctggcgctgcgtttcgccgttcgcgtcgagctcgccggccaccacgcagagcccgaacggcagtaggtcgagccccagccatggccgcggtgtagtttgtcgaaggatttgggtaacgtgcacgtgaagcgccgcgacggcgcggcctccgccgcagcccgcagcaatgcaggtgaaccctcactcctgtccgcatctagccggctagcctccgaccgtgctgcgctctcccgctccgccgcgatggcccatcccgccaagcacgcgccaccagctcggctgctcctcgatgcgctccgcaccaccaccgccgctattcgcgtgcgtgcgccagctgcgctctcccgcgccgcctccgagaagatcgccgtgccgcggatcgcaccaagccacgccgtgccgcctccgccgccgccgcctcaagcacagtaggactcaggccattcagttcatccactcctattcctgggttgaaccgatgggtagaatccatttttgacccaaaaaatttagggaaaattggaaccatgccattataattttgtaaaatttaagatatgtcatcctgacccacatgtcattgactcatgtaggtcctacatgtcattgagataccgatggcatatctcaaactttgcaaaattataatgacatggttccaaattacccaaaaatttattacgacatcgaaaccaatccaacccatatttcagtgagtccaaatcgctccaacccattccaagtcctaccccatttcaatccaaccgaagacggtccatttaaaaacccaacccattccaccatttacatccagttgtcgtcctcctgcatcaaaagcatcatacggatgccacacggcaccggaaagcttccaccaattgaggtgcttgaacagggtggattgtatcaccatttgtgtgagacctgcggcgaggagccctctcgaacagtgccacccccaacaccagcatgtcgaagccctagctcgtacagcgccaccacctcgtgcttgcgcctctcctccttcatttttttgcatgatggcgttgacgatgacgtcgaccggcacgaacacaaccttacttggccttactaaaactagactgaatttagaatctaacaatcgatgtcaaacgtaatctattcgccacaaaattatctacgacaactttattattcgatcgagataaagtttaagattgttattaggctgtaaaagctccttaataaaatctaagtttggtgaaactagtggtaagaaatctgatagagtaaggtgcgatctacgtttatcccaccaccaaacactacatcaaaaactgtaaaatcaaagtgtttttgattctttattctgtgatgaacaagtggcgtctgtgattattggttttgatacttagagattattggcgaagtggttttggagatgattggtttttacaggtgatatacaggtgctgctggatatgtggtccggttagaccgggcagtggttgctggtcagaccggcgtgtatcgcgcggtcagaccggctagcccgcggtctgaccggccgattctgtatttcgggttgtttgttgggatatccgtgattgtttcatgtttatggcttctagatggatactatgggtatgtaatcactacactggccacggtcacctgtgacgggcccaaaccatcacctttgacggctttgagcatggtcagtgatcagtggtcactagtgagtccagtcaccttttacgggtggccggccgtcacaggtgacacccacctctgacgggcaagttactagaaggccgtcagaggtgttggtctccgctagcctagggccagttgagacccgtcacaggtggctcatctctgatggccctttaagtaaaggccgtcagaggtgatggtctccgtagatagaagcggtcacaggtgatctacctgtgacggccccgaaagtaaaggcccatcacaggtaggtcacctctgacgggcctttatttgcgagtccgtcataggtgaggttacctttgatgaattttggttccgacccgtcactgatgtattaattccagaaaaaaaaataaatgctaaatattggctagccctaggatttgctagccatgccctttaaaaacagaaacatcacaaatatattccagttacccccctaatataacatcacagatccatctcaaacatcacagatccccaacatcacagatccatctcaaaaattgacatcattcacatatgcaattcaaatgccacaattttgcacagcaaattcataccccttgaaagccacaatttcggtcgttactcatagaactgcatatatgcttaacaaattgattaaagccataatgtccttgacctccacgacctgtcaattagaaaaaaaggagagaacaaatgaatagtacaacgtaaatcgtagttgatcaaatttgatgacaatttagcaaactaccataaatattgcacatatgaaagtaaattacattgcactccataatgtagaatcataaaaacaactttttttacatcacaagaatttatctagccaagtttatgagtctatttgacatgaaaacatcctttcttgttcattatttccgcaagaatgaaggtggacacttcgcctctaatagcgggagggttgatgggtgagatcttcaagccagctctacctttctgtttaataaatcagagattagcacgtttagaatagcaatgttggtattgaaatgagcttattcaccattagcaacaacctcagtgtcgaaatctttcacctctcttagaagtgttgacatgttgtggcacacgtggaaaccacactgatctccgatctgttgtgcacatgcaaacttggtgtcatgatagagttcgtccttaccctccttgtgcctaccacccttttccacatatgggccccaaaccatatttaaggccttggtgatttcagtgaaatcataatctttcgtcttattggagttaaggtaggtaaccctactccacttaggtacgatgactaaaagaatccaatgttgcctgtgcggtggttatgtagcattagtaataagaaccttaacttcaataacaatatgcacaaagggtattgtcctcttaatcctggttgtgtgtacacatgatgtactccttgtcttggtgggcccataaacaccggttgagatagtcaaccacatcagtgaagctctagagtaaattgacctcgttcaccatggatggatcatggaacccaacctaattaccaaggcgacgacgctcgatccaacacaaccttaaaacatttacgtattagaactaacttaattaggagatatagtccaatcatatcacaagtatagaaggtctgcacttacaaggagtagcattttagaagtccagtgtccaacttccggatcctgaacaagtcgaagaggtcatcaaagcctataattatataggcaggcgacgataggaacggctgctggtcgtgatgtccaactatggatgactccctcattttccgcttggcattacttagctccatgtattgcctatatagctcttagcaagcaatacccatcacggctaacacattgtcctccaccaatggcatgcctagttcaaattgggctggcgccctcacgacctttcccgctttgctcaccgacatcgatgtagcagccttgcccctttttggcaccggtgccaactccccgatcttccccttgccgcgttgacgcttctggcccttgacaagtggtggggaactatcggcctttcttgtggtcttaattggagccaagctttgagctatatctgccaagtccatagcagctccactaggagaatgaggtactgacaatgccgaaccacggggagcctcaattgatagcttagacttgggaggtgtaagctccgtcggttgacttggacgaggagtcatcttcacaactatgtcttctttgggccattgtatgaacatcttgcgcgcatcgcccaaagtcatgatttcatcattggggggcacaggcagcggatagactgaccaggtgtcctttactgtatcgatggacaccttggcatacccagctagcaagtctgcgttgtggaccttatctataaccgagggtttgaaagccatgccctcagcgacttcgggagcgaaagttggttggaccctagccagtaggatacactgtgctacgccctgcatatgtaaagtttgaatttaatattggaacgtgtaaaggtttttgattagatatggatcggataacatcatttacctctatgtggtccactgcagctagtggtgcgaccgagagaccaggtgccggcacctctgtggatgcacaactactcctacgctgtgacagactcgcgttgtgttgtgcacgaggagttggatgcatagcgtgtgttgtgcctcgaggtatattcatgtcggcgaggacctttttaaccctttcttccaccctagcgtccatgcttgcttctagttcttgaatgacctctaccttaagctcggccttcaaacgagcgtctctctcttccttggagactttccgtttcctatattgggagctgtattgtggcagtccatgcttccagggcacatcgctgccaattccccgagtccggccaggatgttctttggttccgagcgcctttgtgaggatgtcatcttcgcgcctcttcggcgtggactcaacctcgctttgtgaagcttgttcagcaaccaaccccaactataaaaacaagaatcgtttattcaaacttctacttcatgcgaacggtaattagttaggttaagtagtgaactcaccagttcctgatagatgacggcagcacttttgttctcaaatgtgacagagtcgttcgggttgaccttaccacatgcccgcgcccagttgcgagctctttgttcagggatgttcgaaaacggggcagggacattcgctgctgcagtggctgcatcctcttgggctcatattagctccttgccgatgtacccttcggtgcccagccgatgcgggtgctcgagaagctcctagttaattacctccgtaggtctaggtctgcgagagaacgtccgattaagctgtctgtggtcttcttcgcttcgcactctccatacatggtgtgatagtggtagatgtgcagatgtgggagccagcagcgatccacggcctcgtcggtccgtgcgccgatgttggtgaaatagtcttagcatcgtcttcacccgccctcgtcgtctagcctcctcagtcttaaacgacatgttggtgtagattgcttgatgaagacatgcgtggagctgcgtagctcgaatagcttgatgtcacaacagttgagtcgggattatattaggaaagggagaagtcgttggagatggtaggtgcagatagcggactccacttagtatatagcgatacacatccccacagccaagtgagtatagcttagtaataaagcatttgattgtttttgtgtgtcactgtagtgtacagttgcatgcatgcacaagcatacacacaatgcagtgtacaacactagcatgtgaggattgtgtcacaatatatggctccgtctatatatgacgcgctcatctccggggaccttcacggatgacttggccagtggcttcacgggaaaaccccgaccacacggatgcataacgcgacgcctgcggcgatgaagatggagagaacacgtcaagaaggaggcagtgccggcaaggatgattgagtagtcatcgacgatgcccaaagagaccgcgacgagcgtgaaggtgtcgccagccagtggactctcagtgagacatcctcactcctcattgttgttgcaaaatccaacatgcatggcaagggcatctctcccataggagaaaacccaagcttggtcccgagtggaccaggagagtggatggaagagggtcagaatcagtggaatgggggagagatctccctctcttgcccttggagggctccttttattcatatgtaacagaaaattacttctttgccattgatttattatacatatacaacacccttttagaggtattttagtcattttatacattagtttatgcaacatcctaagtatggggttattccccaacactcactcgacagacgacgttagcagtagcgtctgaagacaccatcgtgtcttttaggtggtgctgcagtggtcacaatggcggcatcctcggtgcgacgatgtcggcatgcacgtcggccaccttcttcagcgggatggcactcggcggacggcatcacggtggtctgacgggtacgacaagcgttagggcgttgcccacaaggaagacgagataacctcacggttgacagcggctccgctccatggggacaggtagcgtaggcggcgatcgaccgacaatctgacatgatgacgatggcatgccggccggcggcctctgatgggatggcatggacgagcaccgcttggtagtgcttcagtgactctatggtcttcacaacatggttttaaatttcgaaatcaacatttctgtcgctggtgggcgatagtaccgaaatttccgaaatttcaaacaaatttcgtatgaaattttttgaatttttgatagattttgaataaatttgaataaaatttgaccaatttcataaaaaattgcaaaaaatcaaaattttcgggcgagatgtgagcattttagtgggggcgaaattttagaaatttcgaactgaaatttcaaaccctgcttcacagacgcgggaatgataacaatccggcctaggtggggttggccgaggcccaacaaattaaggttgaccagaccccaacagttcttagggacacccactcagggaaaggcccaatctctctaaaagactagtccaataggggaagggtggctctctcttttaaggtagcttcctcctcccaagctaagcaaggtgggattatttagagcctcacacggtcgctgtccgacgttggtgtctttgccagcgggtaatagtggaggatgtcctcatcagggcagcttggcggcatccgcgttgttgtcaacaagacctcctgaatcggcatgaggcggcgtccgcggctactctgacgatctccatcacgatatgacgaggtgcactactggagaaatgctttgtactcctaattggtaacccctgtagtcccggttttctaaccgggactaaagtttagtctcggttagtcctgttggttcaaatagtcccgttgcttttataaaccaggactaaaaattgttttttgtcccgatttttaatggagcctggactattgtagaatttggtcgaccgaccaaaagatggtttctccagtagtggtggcgtcacgatggcgattagtcgacaaaggcgagcactgcttggcagcgcttcggcgactcaacgaaacggttgatggcacggatggagtagatgacaccgtgcgggcgtgagtgttggcgctccggctgatgttctcctcgagcggctcgacgatgagtgtgaggaaaatggcaaagccgacgagggcaagcagacgttggtggtgtcgcgaagaggaggctgcgaccggcaagttgacgacgtccagcgtctcgatgacatatcacatcgcccagctagagacgtcgtgaggtagagattgcggccggcgaggcgaggacgtcgcggcagcaggtacatgtgtcactggtggccggcgtctccgacgagagggaccaacacgatctccggcaggcagcaccggcaactcgtctcgtcgccatctcgtgcacgcatgatgaactgaactgaaagagaaagaaaacaagaagaagactcaagaagctatatatatccatggcgatggctgactacgtacgcgctcccctccgtgttctgcgcagccgctgtccacgcgttctgtccggccaccggcgtgcagcgccttgtcaccaggacgatatatcgatggctgtgctgtcgcgaggtgtagatgggctgtagctgaatatcgatgaaggtgtggatgattctgaatcggaggtggatgttgtggttgtgcacttgtgctgtggagtgtatgtgaaatggctatgtgtagtgtgaggagatgaaaggaatggcagtggatgatctgtgtggaatggcgcctgtcgatggcctcctttttataggcacaggagtaaccctaaccagcaccggccgcgcactcctcggcgccgccgcggccacgcgttggtttgctccgaagcctccgggcgccattgctgcggatatactgtgggccggcggcctgtagttgcgcttcacgctcatcgtgtatatgcggccggatatccacgcctgtacgcgtacgcggccaggatttctcgccaaatggcaacgacctacaacaggccgccggcccatatatgcagcttcggtgttagtcccagcttgccgctgctttaattaaacccatggaaaaccatccggcatacatataagtatacgtatacggtaggtgcacggccacgagaactcacgtataactgtacaagcttctcacatgtcgctcaagtcggggggcgctgatgcgcagctagtagcgcggccgtgcacgcgcgcgatcagctgcctccctctagtctctcttcttcgtatcactatcgctacttacttaaaaaaataagaggggcttctatagttcgtcaaaaatatcagacgaaaaaaaccgagaaaaaaaaaccggacgaaaaaagtccgatccaaagacggagtgataaaaaaaagggagaaaaaaaaagtccgataaagaaaacggagcgaaaagaaagggcgagaataaaattctgtccgacccaaaaaaaaataggaacctaacgaaaaaaacgagcgaaaaaaacctggtgaaaaaacagtccgatccaaaaaaaaatcggagcgaacaaaacgggagaaaaaaaaatatccgacccaaaaaaatacgggaaaaaaaagcggaaaaaaacgaaacgagtcagtaaaaaaatagggcaaaaaatttaaaaaattgtttgattccaaagaaaaaggaattatatgtgatatggtaaaaaaatcgaccgggcgaaaaaaaccgagcgaaaaaccgggcgaaaaaataaaaaaaagtccgataaaaaacggggcaaaaaaaaaatctgtccgatccaaaaaaaaaggaaaaaaggggaagaaaaatcgaaatccaactctatcgacacggtaaaaaaagggctaaaaagataaaaaaatatccgattccaaagaaaaacatattatatgtgacgcggtaaaaaaatcgaccgggcgaaaaaagaaacccgagcgaaaaaccgggcaaaaaaaaataaaaaaagtccgataaaagaacggggcaaaaaaaaatctgtccgatcaaaaaaaaggcaaaaaaaaaaggggaagaaaaatcgaaacgaatccaactccgtcgacgcggtaaaaaaagggcgaaaaaaataaaaaaaagtctgattacaaagaaaaatgaattatatgcgacgcggtaagaaaaagaatcctattatatccagaaaggtccgacactgtaataaagtggtgaaaaaaaccgttcgtaaaaaaaatgcacgagaaaaaaataaaaaggcagaaaaaagcgcggcggaaaaaagtctaatttctattcgttgttttagttgtccttttatatctcttctttatctctaatctaatataacctaactatttaaaaagagaagtttctaccgtatatttaaaaagaaaaaaatacgcgagaaaataaaaacggtttaaaaaatgcgtgaggaaaaaaatgccagaaaaaagtgcaaaagaaaacacgctagaaaaaaagttctatagtccaaaaaaaacacatgagaaaaaaatacgtctgtaaaaaagcaaaaaaaaagcatacgaggaaaaaattgttagaaaaaaacgctaaattgatggacacttggtcggataggctccatccactttttttcatctcctacacgacttttgtttgtcatctattctcctatagtggagaccctgcacatctttataggcaattatcatactattttttgaagtatagctattattcttgataacatattatatggaaataatcttagaaaataaacatattttaattgttatttagagaagagtgcacagtgacactattttgtgtagacttgaccatacgaggcagtgtaggatttgattggttgcaagaatgagattaaaagaatattttagattatatgcatgttgttatatgaataattcaattattggtaaagcaaacatcttaaggttgccatcatcgaggttgggctattacatttaagatgttccaattttctgattgtcattgacatggttatgaatgaaaaacgtatattatcattacgtctttttcacccgttgcaatgcacgggcatgtttgctagtatatatactatatataaaagctttgtataagcgtatacaaaagtttatatacgggtatataaactttctgtcgtatacaaagtttgtatacgtgtatttttttggtttttatatgtacgtataaaactttgtatgcacgtacgtataaaatcttaaaaaatatgcatatacatttttttatacacgtatacaaaatttatatatgtacgtataaaaaaccgaaaatactgaaaagatatggaaagaaaaaaaggaaaaaaaagaaaaaaaaagaaaccgtgcgctgtgaaaaaaaaaaccacgggctgtccgccacccttctctccgcacgtgacacgtgtgcagtcacaagggggagggctcacgcggctggtcgctaattagcattctcggctgaacaaatcaaatatgcgcaacatgtcgaactctcccgaccctgcgaggcgagctagcgcacgcaaatgtgtttcacctcctctctccaccacacatgcttcaagtggctaggagggcatcctcccttttaaggaggtccccctctcctagaataagtaaggtggtactaaactttacatgcatgccatcccaggtccccctctcctagaataagtaaggtagtactaaactttacatgcataccatcccatgaggtgggcttttgtgattttccaaagaattaatcttcgaatgggccttagcccatctattaattccaacagcatacgtatgcaccaatcatgctcacatatatgatatatgtgattgtaccgcatacatgcgatcttgtttgcttgatgtataaaacgacgaaatatcatcaaacaaatatttcatcgctcaatgaaatatatttctaaatagtttgatcagatgcactgattgcaacgccctgttatgtagaacatcgaagaaaacatagtgcacgtatgtacaaaatcctagtaaaaagatgatgaaatgctcaaatacagcaaaatggataaatgatggcctgaaacaagcccatcatgcggcttcttcctctatttcaatgattggatctgtcttcttctagagtggttatatctgccttcttcctccactatggtggatggatccgccttcttcctctggcgtcaccacatgcgtggccagacagagatcattggtggcaaactgggcctccataatgagagaaatcaatatattgtcgtgatatgagaggacttgtttgatttgtcgccaacggtggatgagatatacccacacacaacgaaatgccattgatagagacttcattcacgtctgtgtactcgcaacagcatagattgtcccacctgtatgagttgaggctctgcaggaggttcggaaatgcagtggagcgtcacgtcttatttttatccccgtgtcatttctctataaaaaaatgcaacttttatacaagtgaagttcaattattgatttgctttgttttttatttttttattaatctagatgcatcattgtgcttaaatacattatatataatttataatttcacattggtacgtaagaatttaaaccaaagcacactttatttcatgtaggtaagcatttagaccaaaacattctctctttttttaacatttaaggttggaaccttacttgtttcgccattagaaagaatatatgttaaaaaaagtgattgatagattacaatctaacaattttgcttcttctacctttattttagcttcctaatcttacatggtgctattaatttcagtagcatgaaattaaacatccaagttccccgaaaggatcaatgcatagattagtcgcatggtcgaatgtgtttctagctaccactaaaaattaagtaccaccgtcaagttatttgctgatttactgaacttttttatcatgctaaagtatcactgcctcagttaccggctatgtttcttcaggaatccaatattttacacgttccctcgcaactaaattagtgcacaccttatccacttatcctttttccgcaccgctcgaatcccttcatccgtggttcctcctatgattcttttcttccttctatggttactgttctgtcttcacccggtgacgcaactgacttgggcaccatctacttactcctttaccttctcttaaaccagacgatggcaagctaatcacatcctagtggcttgtagggcattgtctttttcatctcttcaacaacatgttgctcccccctaccccgcctcctccaccacggcataccagtaagcctagacttttgtgttccgatgacctcctcccttgctgattcgccctaccgcctcttcctctactagactaccacgacaagatgcttacaaccgtgggctcattcttcctagtgagatgtcagtgcccattttttcctcctctttatcagacccagataggagtatctgtagaaacttccactgatttgagtagaaagtgttgatttttttagttgaaacatttcaattgaaatacttttgatttgaaagtatagggattttggttagaaagttttgagtttttcaattgatttttttaaaaaaatatttgaattgcaagtttagcccacaacttaaaaggtttttagatttttaattgaaaattttgtcattttttagatgaaagatttgatattttagttggaagtttcatatttcatatcaaaagcttttttttacactgagttgtagttttaattcagcctagaaaaatgcctatgcgttgcaataggggaagataattttcatgattaataaaaactcttccaatttcaacggcaaaccaaaacaagacaaacaaagcaatagtaatacaaagtcagaaatcatgtatagtattgtactcagttgcgctcgcttcattcgtcatcacacaaaaaaatccattactacacatatcggtagcctcaaatcgatcaggtggctattccataagttgacacgtgtgtgttctgctatacgtcattgatcaaatatttaaattttgattattcaattagtgaaagtttttcacctgtagatggaaattatttgcaaagtaacaaactttccttatacacaacataatgataattttaaaaggaagatatttatgagaggaatttggaagagaaaaaagagggaaaaaaaagaaaaggaggataaaagagaggagatagaatggagagggagaggacaagatgatcaggagaaaaaaaggataaaatagaaaaaagatgccatcggggtagagacgcgtgccgccaagttagggctttcaacgagcaccccaatagattacagacagaccataagtatccgcatctgtaaaaatcaaatctcattttccaatagggctcctaagacatccgtataaaaaaatccatttttccagacaacccacttaaaataagggtattttggcatctcgggctcttaactctcccgcatgcaaatttttattctccaatcctctctctctcccatcaccccactccactcctctcttctcccagcacacaaacacacactctctctctcccactcctctcccacactcctctccccactcgtccgtctcgggagcaggctctagcggcggcggtagcgatggcatcttcctcttctcccccactcctcctctccactctactccctcttgacggcagtggaaggcggaggaggcatgcgacagtgtggatccgacggcggccacgctccccatgtgcggtggggacggatcggacggtggggaagtgcagcagcggcggatccggtggtggggaggcacgagggcgtcggatccggctccggtgacagtgacagcgacgggagcgggataacctagccgcccctagccccctacgcccccatgacgatgtcgacgacgatgaggatgaggtcgacggcgacgatgacgacgacggcttccagcaacgatggtgacaacgaggaggacggtggcggcttctagggttagggtttagtattttttggtttttatttttttcggatttttatttttgtgtgctgacgacagattttcgcgtgcgggtacaaatagtgattttcgcagaccattcggtgcgtgcgtctagccctactgcatgtgaaaacccctttcaggccatctgcaaaaaatccttttttaatagtgttagcagcccccatatttcctctgagatgagaataagattaaatatcaatcgcttttccacctatgatttgccataattatccgttaaataatgtattttttatgagtgatatatgatcgatcgatacttctccgtaatccatatttgttatattggttctgaaatctatctatctatctatatctatatctatatcaatatctatctatctacctatctatctatacctatactaattagtcacttcctacgagctcacatattaaccagaaaaatctagcccttgattaactagatcgcaacatctcaaccattaatcactatgtttaatattatgggcttctttaagagtcaatctgtttaatattatggcctatttgaaagcccatcttgaaaaaaaaaaataatccaatctgttattgcctatacccgtacgtctatctatctatctatctatctatctatacatctatacatatactaattgggcacttcctacgagctctcatatatattaaccagaaaaatctagcccttgattaactagattgcaacatcttgaccattgatcactatgtttaatattatgggcttctttcagagccaatccaaggcctatttgaaagcccatccaatttgtgttttgaaaaaaaaaatccaacctgagcctctcgcaacaaaaagaacagaacgcgagacagtatcatgaaaagcagctcccgttgcgcttcatcctgatcaataacgaatttggactccatccgatccaattagactgtgagcaaatgggaacgtacatgagcacatgagacttccgctagaaagatgggagacgttctaaatacactttgttctgatttgggctccaactgctgctgattatatcagggatgatccttcccagctaaatcttaggtgtgattttattatttttttaagctgaaaactctacagaggttcgacatgttctatgcgcatctgcaggtagcttgcagtaatgtttttgtttcttctgttgcttctcccgtcttgcacatctcagtgtgatttgctgataggccagttctgttatgtgatttatgttttatagcaacctaacaatgtatgatcagtctagaatttgcaatagatcgactacttcattaatttgagtgtgggcactgcgtatgatcagtaattaaaatcataggaaaactctttcttctttaagaaaggaacaatgtattttttaagacagaaaactataattttttacaaaggaaaattgcaaattcacacaaaacccaggaactgctttatatttattaattacaatttcaaaagtaatagatcatgtataagggataattgagacttcaaactccgtacttattaatttccaatttataaattaaattagtaaaataactaaattaaaattccaacatggcataaaatgtcgacatatagttaaattatgattttttttatttttataacaccgacaataataacccatgcaatgcacgggtagacgactagtaattctaattgtttaattagcagtacagtacagtagaacactagagggcggtacagacgtcaggggatatgttacatcctgaccagtacatctgccgacaccacgcactaaaatgtcgtcgcgcctcaacatggatctacagtcaaactaatcgatctacagtcccgtcttcccttcagtcccactgtcgctagcgacaccgaaacagctgaatattaatcatctcgctaaattcgccgccaatttagtggatctagctagatcgtgccattgtcacacgaggtcacgacttacgcgtgatcaattgtttaattgaacctctcgattacgcgtcatcgctctcgtactgccgaggaggcagactgatcacccggccggtcgtcctgctatacgcttgaatggaaactggatattggatagacttgagtagttctcaccttgttgaatgctgtgtcgctctgggttttcttatccaacgtttcatttcaagtgccgtgtcccttcgtcctatttcaagtgcacttgtgagttttcgtatttaacatttgaccgtccgtattatttaaaaaatctattatatgctaaaagtccatgaaacttcctacaaacgctctcaagccgccatgtaggatttctataaacgctcctaagccatcatgtggcactccaataaattaaaaagattctaaatattctaaaaaatctcaaccgttgatttccccttaactgcaggacccactatttaaattgtagatgtattatgtttagaaatagttacatgtacgtactccctcctctcccgtgtcctcttttttaagctaacctctcctattttctagctaacaattaaataaaaaataatttaattagtatttcttaatttagacctatattaaaaaaaatatggtacatggatgcatattctaacactgtacataccataaaccgatgtgcaaatattagagtacaatttaatatgtggattaagaaatcatgcacttcttttgttccaaaattataagtataaaatataagcatatataaaatattgacataccaaacgtgttaaacttaataaacattaccacatacatacttaaaaaaaatcgtagcaccaacaagtacattgcacacatatagcactctaatcaacaaatccccaatttcaacggtcaaattcataaatttggggaaaaaaagggttatagaattattctctgatctataaatttcaccaattaaaaccaaagaaagagaaagagtgggagaagatttttttttaagataatggaataaatcctggcctttacttcaaagaagctacaactacttattaatctcacaaagagaacaagcactcaggcaactacataaagagtgactaaaaaccaacacaaaggacaaaacaaatttgagagggggaattgaggagtatatcttgctcttcgatgtccccaaaagttcccgcaaaaaatgtctccaaaacgagtggattttgagaaggagaggtgagaggggagagagcaagagctcttctcaggcttgcgcatgggacaaggggggaatggatggggagagggaggggggaggggtggggcctgtcggttaagtgctacccaccacccaggaggagcgtgcaaaaggcactggcgccttggggtggagggggggcatgataacaccagctactctggcgtaccaaaaaggatcatttctagaataagttttttatgggtctatttttaaaataagtttttggaaaggaccaaatggtaaacaatctagcatctcaaacaccgtaccaaaatccaaatatacatatattttagagaccgagtacgtattgatctataaacacgtgtatctaacaaaattgcttaaaaataattaatttcaataaataatatttttggaaaaaactacgattattaaaggtacaattttcgatagatgacgccgttgaattttcggtacacattcggcagtttatttatattaaaaataaataataataatttattttttgacttggtttataacttaacatgacttacatttccacatgttttcataaaaatattaaataagacaaatggtcaaacgcgtgtaaagaaaatatacttacccacgcaaatgcgcgggttaccttcctagtttatgaaatagtcgcacgctataaaagacggaaaccatcatcacatccctaatttcattaaaatcttattgaaagcccagctacatgtttaatatttataaacatcagaatttaaatggtgagtgaaatctcatacaccaacgattctagtgttccctccccacgtttgaccaccatcagaaacagaaatagtaaccatcgatttttatacagccagttcctttactattgtcctgttgtttgtttcttcgttgctgaatcgatcaagatttgcatgggagtgcttgccgtacggagactgatagtataatcaagtaggccacctgcatgaaagcccagtaacgggccaaaaatcagagtaatcaagtttttgaccccgtagaaaaaaaatcggtttcgatgacgcgtaatatagcaatacactaacattattatagaaacgtactaaaagaaggactaaaaccgatacctataatacttttcccacctaaacacgtgccaataggacgccaacggctagaaaccggtacccctgtgaccaaatagttgccggtttttaactgaatcttcacctatctttcctgccagagaaaggtgcatgttccagcaaaaagctagcaccttttattctagggaaattttgctgtaggacacagtgactttgtgttttagctctaggacacatcaaaagttgatttttggcggaatgcattctgaaaatatggttattgactgatggacaccgcagacattaaaatattgatttctggttgaataggagagatagacagtgtgaaaggttaaaaatgcacctaggtccactagtcatattcttctgcaacatcagactccctcctggcatcatctgactccgccacggtggcatagcctggcaaaccctcagcgcatgtgggtggtggcacagtctggctaccctcagtgcacatgggcacagtgcggcctggctcgtgttgctgatggaggtgcgcgtgaaggtagccgctgcacacggagggagggagcttcggtggcgacacgaaggaaactgcggtgattccggcggcaagtagaggacattggggtggtgcgcaaccctcggcgtccccggcaatgcgtgaagggagttgcggcggcgcgtggccctcggtgaccctagatgcaagtgtcctcctccccgctgcggccggcttctctaactcctctattagcttccccttcccctccttgccgccgtcggttggcactatccattcgttggctttccctcctccttcccgacatcgctagcttcctctccccctctggtgaagacctcgacagcggcgctctgcgctgtgctctatgcacttgagcacacggcgtgccagggttaattttgtcctgacgcgtcaaaaagtgggccctctctcgcctagtcagcattaaaacactaaaataattagcatggtgtgctcttgcaaataaccaaaattacagagtattttcctccaaaagtgactttgtgcaacgtcttatagctaaaacaacgaaatctcaatgtcccgtagcaaaaatttacctttattctatcccatcatagtggttggttccgaggcccagtttagagccaatacttttgagacattcactcccggaagtagacattggaggacccacttaaataatcagtacctatatagctgtcaaacatatgtgtcggttctagttaagaaccaacaccaccgacacctatgagctctatatatagctcatccccttcctctcaagctgatcgagtaaagaacatattttttggtgttgttggagattgattgctaaaaggttatttttatttctcactccatttcactcttgcttgttgaactgaactatttgctatgtatatatataaagtgtgcaaccgaaacaattatttgtatttgttttctacggtaaatatttttttatctgttttgtttatttaattagatccatcctcggatgaccacatgacaattttgagtttaagtattgacatgacggtagttgattttgtacataatatttattattaggtgctttaaataatattcatacagtagtaaagagaagtgtaacacaatgttataataattaaatcattgaattgcttgtaaattataaaatccaaattgtatttatactgcatggtttgtaacaaaataaattattatattatttttcaaggggtggtaaatttattttatctttttcatgttcgttttattaaattacggctgtttttggtccatttcaacggaagaaaattggtctctcatggacacagggtcatagtttcttttcgataaaagcaggcctcaagctcgagttcgctttgtttatcattctgtcttgacagctcgcctgcacagttactgcaactgctgttagtgtgtgcccgatagtgttcgtttagggagtataaaccaaaatgtccacaacgctgtatctgattgcaaacatggcggaaacaaacgatttttgaggggataactttataattgcttccgaaagaatcagaactaaacaggtttgatgacagataattgacatggtgagaaaagcaatggttttgtccacaagcaaaggttttatatatcgtgctatacaaaggaaacgaatcttactgtatactgtattaatcatgtcactaaattcgccgtcatttcttggatctagcaagagttggtaactttttttagaagaagataatcacgatcgagacacctaaacgccttgcggtgatataggaaagctagactaagatgggttttgatagattaaactgactagcggagccgatttagatagaatgatggataactacccgtctcatgggcaaacggaaggtttatgggacaaatctacaaaggatttcgcattctcgcagcgaaggcagacgatttgtgacgcaaattgacaaagatggacgaactaaactagaaaagtatatgcgatataggaaaaaacgattcaatagcttgtatgtagattgtgtgttgtatattacaattgaaccggcattgtctcttatataggggtttgtcttgccctctagaggccctcctccatgtccaactcggggtaaaaaccaaaggaaacccaaaacatagcctcccgagtaaggaatctcaagactcgacgaaaacagagtcggtctcggactctgccggtacgaccggccaaatgctgcaggttagaccggcccatatatggcggtcagaccggcctagtagaggaaaccgacaactttctcaaatcttggcaattttccttgttttgaacctaggtgccaaattcaggtgtaaacgcatgccccctgcctttttgatgaataataaagcatcatattcggcttgattatttgtacaaaaatattccaaacaaaccgatgtttcaaagcatgtaccattgggcgaaaacaaaacatatcctcttccgccataaagatttgattgtagccggcgttaccatccaagaaactaatcaccttatgtcctgaagaatcattgatcaacatgtgggctataggcacggtaaaaaaaacatgtgagctataggcatagaatattcatctttaggagtaggttttttcaaatctctaaaatctatgcacactctaatcataccactccccttcttatcaaccggaataatgctagacacccactccgcataccgacatggcctaataaaccccaccttcaataaccggtctatctcttccttgacccgatcatataatagaggattaaagtgacgaggtggtttcttataaggcctaaatcctggttttatcgaaagccattgttcaacaagatcagggctaagttccggcatctcatggtactcccatgcaaagctatcaatgtattctttaagcaactcgattatcttaaccttataatcgttaaccttataatcggctttcatgtttttgtttacaaaagtcggccttggtatatttccatcacctatatctatttcctctaatggatcggccgatataaacccttttcctagcttttctacttcatcaaaatcttcaatggtttccctaatatagttctttgtagaccgatattcttgcactcacttttgtaaccactctaaattaacgtatgagaagacgaagactctaaccattagcacatcaaagaaaactttattactcttctttcggcttccttggtcatcccaatgccacacaactttttttagaggttacgaggtggtgttaagcgatgttaagattttcactcttctcttatatgtcaccaaatatttttcataactagtaaggtgaagatctcactgttaaccgttctacacataccgacggacccctaatttaaattatctgttaaattttttcccctatacaagccaatgattaattatatttttcgttaattaaaagggtacaccaggggaacgagctaatacagttcattctccttcctaaagtggtgttaaaattaagagggtgctattttggcaacaacaacatgagtgtgactatgttaaagtcgaatgaatgtttttgtttaacctttagaactttgatttcaaaaatttacatgacaataagtttataaaacctaggcaaaatttgctatatgatattaaacaaatgtggtctttgttgtgtgctgggtagctctcactgccaccgctccaccctaacttagatctcaccaccacctcttcagtacttggatctagacttcatgacgccggcggcctcaagctcctccccaacccatcaatcacctcgatctgcgttgacctcggccgacatcaatgtcctcacctccttcatcacggcaccccatcgcctcaccaccacatcgtcggtttcgccgctaggaaccaccagcacaccggggaaggggcatcctcgccatcatgggcctcttccttatttgtttatagctgtgccaagccaccactgctgctggggggagggggtgacctttgaacaacgccagcctcgccttgtgacgaatctactattcctccttttttcggccagcacccttattctccatatttttcttatttctattttattcaaattataaatatttactctaggtgtgttacctttttagaaggttgcaaattgtactttctccctctctgggctctaatcacctactttttgtttcatacttctagaaaatgacaaatctgcctggccttaatttctataaatagcacaccataagggagagccagtgcaacattattgtattagctattattcccattggaacacacaaccacgatgaatgttaacgtagaacatgactttcacatggttggaggggaaggagaaattagctacgccaagaattccagggttcaagtaactacccatctctctccctcccttaccccccccccccctccccctcgcttggtgtgtcaacagcttgcatgtaagtaataagcaatgagatagcatcaattcacattggcaacaatacttgtaccatgccatgattaaggaaaaactaagttgcaccatccatgatgcatggagtgcacatatagatccatttggaacactactccctgatcagcgtctagattaattgtagaaagttgctcggacctctttcaaacactattaattagacgttattttcgtttgtcataactctcctacatatgccatgtaagtatttttatagtatgcagctgtcttaaagaactgcctgtgtaatctgcctataggaaatatttgttttctacaggtctattatcacaggcagttggttaaaagcatgtaaaatgggttaccggctgcctgtaaaaagtattttcctagtactatgctatctaacaaaaaaaagagttcctatacatagatattagatggtctatccttctccttttctttctaaagatccaatgtttaattataacaataaatgaattttgacatgtatgtatatatggtgctaggcgaaagctatgattgaggctaagtttgtccttgataaggcaatccgagaactgtacgcaacccttctagctaatatcatggttgttgccgaccttggttgctcttcaggacagaatacattacattttgtctctgaggtgataaacatctttacgaagcaccaaaacaatttgggacaaagtgatacggtggatcttcagttcttcttaaatgacctaccgggtaatgacttcaaccacctctttcggatattgaacacattcacattcaagggggcatcaaatcacaaaggagatatactacctgcataccatatctatggggcaccaggatcttattacaccaggctttttcctcctcaagctgttcacctatttcactcctcgttgtcccttcattggcgctcacaggtaggtaatgttgatgatagtataatgcaaaatgctctttcaagtttcaaacatgtattttctccactcttattaagtcacataatcgtcatgataatgttatatattacaagtgctatatcacttccttaggtgccggagcaacttaatgggaagcaaaaatcatatctaaatgaagaaaacatctacatcaccaagactaccccactacacgtggtgaagctattccaagagcagttcatcaaggacgtctctctcttcctcaagttacgccacgaggaactagtggatggggggcggatggtactaacaatttatggaagaaagagtgaggacccatatagtggagatgtaaatgatatttttggtttgcttggaaaatcactacaatctcttgttgctgaggtaatatactcctttgatcccattctattttacttgtcatatatatgagacattgacataatcatctctgcatatgtaattttagcataacttttccttcaaatagatctatggaaaattattgaaaatatatctacataaaggcattcttgttgactaattattgaaaatataatctactaatcaatttcatttttttacatatatatatcatgtctcaatagttttgcatatatcgttagtaatttatgatttttatgtttgactacacacatcctaaagtgcaatagattttgtgattggagtattcttggttaaccaaatatatacctacatcctgtcatataagggactttgcctctcctatcttatcgatgatataagagatttttggtgtactatttgtgtgacactctgggcccaattaggatgtggcctatgagtgtcatgtacacttaattggtactatcttatgagttgagcaagagtaaaaccaacttataaaaccttgtcgctctaaccatacaacttctgagttaacccttttacatgaaacgagcacaaaagtataagtagattgctatgtgtaataagtgggtctgccgggctaggctgtgcggatttacagctattataggttgccacattaatcaactcaaattttattcaatcttatccaccaattaaccactaactctcacttaatatagctaggatagtcctttatctatattctaaatatctagaaaagagagaatatagataaatgactatcctagagacagtgtgtgtagtaaaattatgggatttccacgttaataaaatctaaactaaactttcgatgtgtattaatacttaatagggtctcgtggagaaggaa

SEQ ID NO: 9841 - DNA, 66512 bp, Oryza sativa
ctttttcagttgaaatcatttagtatttgaaaatgttgtttaacgttgtcatatttttaaattcaaattcaaacggttaaaaaaatattatatataaaatgaccaaaataaaagttataggtattgatgagttattcaactttgttgttgatgactttttcagttgaagtcgttcactaacaaaaaattctatttgaatttctcaaactttgaatttcaaatttcaaattgtttaaatagagtcagatggagaaatgaccaaaataaaaattttgcatctcgatgagctctacaactttggttttggtgacttttccatttgaaatcatttattaaccctaatttttcttcgaagttgtcaaattttgaaaattcaaaatttgaattgttcaaataaacttatttgtacaaatgaccgatacaatagttgtagatctcgatgagttatacaattttgttgtttatgatttttgatggttgtgtatgtgaatgaatgtatatgaatgggggatgttggggtgtgacatatcccggcctagggcttaataggattaatagagctactcttctggaagccgatctctaaataactttgatattaagcgtgcttggcctggaacaatttcaggataggtgaccgatcgggaagtgaacttcgtgcacacgagtaaggaaaaaaaaatgattggcatgagaggggcggggatggcatggcaaggctagccaaaaataaaatttattttttttaggattatactcatcagtgacgagcattaacttaggcccgattgagatgactcatctgtgacgggctatagttaatgctcacggtgacgggctatagtttaggcccgattgagataggtcatccgtgacgggttatagtttgacatgtcgtctgggtcaaagctatcagtgacgggctttaattagggcccgattaagataggttcatccgggacggcatggcaaggctagccaaaaataaaatttattttttttaggattatactcatcagtgacgagcattaacttagacccgattgagatgactcatctgtgacgggctatagttaatgcccatcacagataagggtcatctgtgacgggctatagtttaggtccgattgagataggtcattcgtgacgggctatagtttgacatgtcgtctgggtcaaagctatcagtgacgggttttaattaggatccgattaagataggttcatccgtgacggccgtttgcccgattgagataacttttcacatcagtgacttctaacctgtgacggacgccgtgcccgattgagatggaggttgccgcccgattgagctgatggtattcgttctagtgtgtactgattttcaaaagtacaaataattttatgcctttaaacacagcacaacgtcacccaaaaccactacaaatctagtgaaaatataaaaggtgaatggtatggaacgttcaatataatgatgagtattgtgcagttttgaagtttaggaaaggctgctaacaacggaatatcatagacggctcaaaagatgagcttaaaatggactcctgacaactaactaaagatgcggtaacaaaaatagcatacatgcccacaaaaatacgcaaccaataacttctaacccatgtgtccacaggtaattaattaaattgtctggctatagtattcaaaattcagctgcacattcgaaagaaatactatatgcttaggataggaggaacagtttatgacagatattttactgttccatatccctatataagaaaaaaaacaatcgacataagatattgcaaggaaatgtcttatgttgtctttttttttaaagtatctatgttttaaaatataagacacattttgttttgttagggcaagctttgagcaacacatttatgtgatccaaaagcataatcatatataagtaagtatttttgaatatgaatttaataaatttaattttgacctaatatagtaattgctagccaaagccttatcctaatgaaacaaaatatggcttatattttgagatggaggggtaaaaagcatggctacatatgtacatacaaattttcaaactaaaaagtaatctgtgctcacatagtcacataaatgaataagaaagttgtgttaaataacatatgaaagaaagagaggtatttttcgtcaaatcatagacaaaaatgtcatctttgaatcttttgcacaaagaaaagtctgaaagctaggctctgagctgaccaacaacacgaatgtgcgataaaacacgtgatgttccttgcaaatggtccagacatcccaacaaatatggtctccatcaaccaatcatcgtcgtactaattaaagtaatagagagaggaattttgtagcatatgcttttgcctaatagctagtgagtagaaacattaattcagaggatatgtgttgcatttgtataaatagtagaaacagtgagaggactatttgtagcgttcgcataaaaagtagaaacaatgagaggaatctttgaatcattcaaaaagtagaaacagtgagagggatctttgcatcattcgtataaaaagtagaagccgaaagatcatccacaaaaccaagtaattaaggtaggacctaaatatattgttctttactcagttagaccagacaatctcatagtagaaattttgtgttgatggaaaacatacaacaccactagggtagattcaacacatatttttgttcatagtcaacttttatattagttgagctcccagcaaccaaaaagccacatagaaaaagaaaatagtcccagcaggacgaggcgtgcaagctgggagtggcggcggtggatacacaggttattggtgctgcagtggttgtggagtatcgcggacgatagccttgatgagtgtgcatggatcaccaatctgtgttccttgccaaatgaccaatgtgagtctccaaaatgagcttctggtgtttaaagaggggactaatgcacatttgcatgggtacaaatccctaagttggccccaatttgtataggaccgagtttcctttacaggaccggtttgactgatgatgtggggccagtctgatcacggtttgttggcctgtcagaccggagtcctagtccaagtcgaatttcgtcggttctcaggttttcttgcttggggaggaatttttcaagttttaattggtctctatcccgagttagtcatggaggaggtgttgtagaaggcaagaccaatccctttataagggccaaggccggttaaattgagcatgttaacctaaaactcaagaagcttgttggcatgttttagcttcagattcggcaccatgcgctacctcccacttggttttccctatgctcgtccacctctagcagtaccatcatgttgcctcttagaaatcggaatagtctgatgaggatatgaccatggctactttatgtattcattaattaaaggtgcatattttctctgtgagatttatgtgttatatatttgaacaagcgttactacactatgagttttgtgtcttctcatttacagaggttcttggttgggtgaagggaaagagaccaaacacaagcaatgcatggattatcaaataagttgattaggtactgttgacgcgaaaaatacacactggcctgggagatctgcttagctccagtgaaggaccaaaggttgatgagatgcggacatgccagccagtttaatcctacaactgacaagatatacaaatagcagatcaatgagtcgatcggctgacaaactgattgagtaattccggccgatgccgatgtcagccgatagcgatagggttttgagcaatcggctatatatccaatgtagattctgacacttgatgtaaataacaatataaaggtgatcggccgataataatataatatagcaataatgtagtccaatagaaaccatttggctaataataatatgataaataagcatcgatccgaaggttaaagcatacatcggctggaggttcgatgtcattaaattctcaagattagataaacagtaaaatctttgttatgatcgactaaatctaatatgtatgcaatccttgtaagccgatgcaacatatctagataactcatcggctgaaaccccgatgaaacccttattggcagtcaaaaagtaggctagggattatggttctaaacacgacttggtagattaaacttaactgatgttgcactaagtatgaaaaaaaacataatatctagacaatcaagcccttgactgatttttagggtggtagatgcattagctaatctaatctagtaaaacaatttatccggtaccggcaggaaccctaaagcgagaaacaaccgatagaactaaattgagatattaagactagattaactaaaatatatgataaatagatagacaaatatctcatccaaaccggaatagtctaagaggtcgaatatactgatgcagccttgaacgacgctgacatagacgagacaattgcctgggccagcggaacgtaggacttaccccttcgccggagatcgaaagtcgatgcagccccgcatcaggtgccaagttccaccgaatagtaagtaaaaacttcggtaaagagggtgacgatgggccgagagtagttgtattgatcgagagatagtttacaatgaccccgggtatacatatttatacccatggggagatactagtccttgtaggacaagaaagaaactttcctaaaagataaaaggaaaacataaagtgcttatgggacactaaacacactttcctaaaagataaaaggaaactaacaaactatttctaattaatagataacttgccatgccgcatcctccttaaactcggtcacttctggataagtttcctttaatagattaatttccttaaccgaatatagcaggaatccgactattggcgacgtgataattctcttaggggcttaccaaatttcactgttaacaggtaccaaaccaatacattttccaagtctattccaacattagcatattacttttggtccatagaatgcaagaggttttatacgttttggattcggatttggcttcctaacaacatcaacttcaaacggaccttaccgccaatctagacaaaatagtacctattgcaaagcttatggagtctacattcagatgattttgatcccacatcaaaattctgaataagttgtcaggaatctgcaaaacaagccacataactcatccaatccgagtctgatttgggccttcggtcttataattgtatcgtggctaagctcaagggatggaaatcctaggctaaccctatgataaccctagtcatatatattcagttgttgtcatagtttcgagttggttttgcttagattatttctgttattacagtttcgccgttactttggtttgtggaactccaacaaatgcaatagtgttgcaattattcttgcttgtgttctttgatttgcatgtggagattagccttctcggcgagatcaattgggcagtgcacagttgataaccataggagacatggtgttgcaattgtagggtttggatcgtgttgatcggaagtcggaccatgtgtgccaagcttccgctgaatcgagtgttatcaatacctatcggatgattgggacctagtttctcatcacggtacagttttggagttagataacctgatgaggacatcattggctcggatataaccatgcttattttacacatcaacaagttaatggtacatatgtgctctattagatttacttaattaatatatgtttgaacaaacgttactgtaccataagtttttgtatattcttatttgcagaaatacttgcgtggatgaaggaaagaagtacgggctcatgaagtactttaaagatcaaagaatttgactagggacataaccaagaccttctccaagtctattcctaaatcaccactttactttcggtccatagaaggcaagagatgaagttttacaccttctgaattcggatcccgtcctcctgacaacatcaacttgagaaggacctagccactaatctagaagcaatctcggagcctataagtacttgttggaaaattatggagtctactttcagatggttttaatcttacgtcaaaattcataccgagctatcggtaatctgcgaaacaagtcacatacctgatccagtctaagactaatttaagccttgtaattgtgtcgtgggctaagctcaagaggttggcgccctagggcaaccctagcatggcctaatgatatttatttagttgccatcatagtttagacgaggttttgattagattattctaccaattgcagtttcgctgcaaagttcggtttgtaaaactccaaattcgagtgattcatcattcatatgcaattgagttacaatctaccttgttcttgcttatgctcttcgattcgcatgcagggattaacgttcttggtgaggccagccaggttgtgcacagttgatacccagaggaaatgtggtgcttcaattgcagggttcggatcgtgttgatcggaagccatatcgtgtgtgtatcaagtttccgccaaatcgagagttatcaatactatcgaaagattaggacctagttctcatcaattggtatcagagcaccagattgcccgttaggtataccttgtctcttctaatcactggttgcttctctccacttgtaaacactcaaaagtagtattatctaatttgaagcttccggtctcaaggccggaagtgctctttcaacgttttcctagatcgcatagtgcgcaatgtatatgtatacagtaccggttgaaagacaaaaaaaaaagattatcttagtatcctataaaacacacactacggctgctcttggtgataaaaaccaaagtacatctcattaataacaacatattattattgaaatggtaggaacttatcgatttgtgaacctagagtagctaagaaggtactccctccgtaaaaaaaaaaaaacccaaccctagatttgactatgtccagattgaaactcaagattggtttttttttttttttttttttggggtggggggggggagagggagagtagaactgtactccttactctttaccaaagttagatggctgaaatcaagccttctcgggagaaaaaaatgtggatgtgtataagttttggtaacaattttgtgaaaaataatctatgtagctttctggctagaactatatcagcaacgttgtacgatggagaatgacatatagaatggatgttttcagccggtaacgatcaagataaagatatagctacaggttcctggatttagctagcgctgattgcaagtgatttgtagggtccaggctagttcagtcatgggttttatgtcgatcgtcagacttatcttcatagttcgacacgacttttctttggctgcagtgcaatgtcctagctagcttccaaaatacacatttcgattgagaagcagagatccatctgcaactagcatcacacttaatttgtacttttatatatcctcaatttatataaaaaagttaataagttgaaagggccgtggtttagagacgtagatttgtatgctaatccaaaaatatccaactttcatatggtagcgtaatttcatcaacacacaaccataaaccacggaattaagcatctattattaggctaagggtatttaccatggagaaattcctctctttttgattatcatttacgagcacatttattcatcgataggtaccccttctcattcaatagcctaaacatttgaattagacacatatatatataggcatagtaagttgcgcagtgcgagtatattaaccttttaggattttttgtcttgtttattttgttgcttcttataggtttgcacatcatagagaggctatataattaaatgcagatcaatatataccagataaacagatggtccacaattagggatatatatctatatggacatgagagtggacaacagtgggcagcaagcagcgatagcttggttccatgattgcatcaaaccaacagttttgctgctccaagtaaattcagataaggttagggctgagtattgagtggacaggatcaaaccaaactgtgcaatatatatattgatggtgatcctatcaaaggagttgcggtttgtgccttaattatctctaattgaattactatatatactaacatagctcagatatattctgctcgtgatctcagtacaagcataaaaaggattactacaactttattctgaaagttgtgaagtactgcattgaacttgttaacctaaatatgtaacttctaggtacacattgttagatttaattgggtaattaatccatttaaatcaattaaatcaaataaattccaaggctcattatgctaggaattcatgattgttgatgcttattcaacgttaagcatgctcatgttgattacattcaccactatcactggatcaaatcctattgtaaatatcatgattattatcttgttattttggattaaaatatgccgaattatgaccaaatttccaacattccaaaaacctgataggtcattttcggtagttggctttgctgctgcactgaaaccacatgcttttgatggttcaaactataagagatggaaagcacgtgcactattgtggttgacagcgatgcagtgcttctatgtttcacggggcaaacgaagtgaaccacctctttctcctgaggaagaggctaagttcgaggcttcggattgcctgttccgtggagcattgatcagtgtactcgctgacaacatagtggacgtgtacatgcacatgccttctgggaaggacatgtgggatgcacttgaggccaagttcggagtttctgatgccggcagtgagctgtatgttatggagcagttctatgactacaagatggtcgatgaccgttctgtagttgaacaagctcatgagattcagatgctggctaaggaacttgagaacaacaactgtgagttgccggacaagtttgtggcaggtggcattattgccaaactaccaccttcttggtcggactttgccacttctctaaagcacaagagacaagagttcagtgttcctgatctcattggctctttgggtgttgaggagaaggcgagggcaaaggacgtccgggggaaaaaggttgagggaggttctagtgccaatatggtacagaagaagaaccctcatgcatcccacaacaacaagaaagttaagcctgatgtcaaacccaaggctgcaaccaattttaagaagaaaagcaagggaaaggcaaagggagactgctttgtgtgtggcaagtctgggcattgggccaaggactgtcctgagcgcaaagacaggaagtctgccaacatgatcattagcgagggcggaggaacatcggggtacggtaaaatactacctacagttctctctgtttttcattcacctgattggtgggtggacactggtgctaatattcatgtatgtgctgacatttctctattttcttcttatcaggtcgggagaggttcctccttgttgatgggaaacgggtcgcttgcggctgttcatggtgttggtacggtcgatctgaagtttacttcgggaaagaccgtgcagctgaagaacgtgcagcatgtcccttcaataaagaagaatctagttagcggctctctattgtgtagagaaggttttagacttgtgtttgagtccaataaatgtgtcgtatctaaatatgggacttttgttggaaaaggttatgacagcggaggcttgttccgcttttctttgaatgacatgtgtaataatcataatgctgtgaaccatattagcgagaatgatgagtctaatgtgtggcattcgcgactctgtcatgtgaatttcggttgtatgacgcgcttagctaacatgagtttaattccaaaattcactttggtaaaaggttccaagtgccatacttgtgttcaatcgaaacaacctcgcaagcctcacaaggcatctgaggcgaggaatttggcacctctagaacttgttcattccgatttgtgcgaaatgaacggcgtgttgactaaagggggaaagaaatatttcatgacactgatagatgattgcactagattttgctatgtgtatctattgaaaacaaaggatgaggcattgcatttctttaaaatctataaagctgaggtagaaaaccaacttgaaaggaaaatcaaacggttgaggtctgatagaggtggggagtatttttccaatgagtttgcatccttttgcgaagagtttggaattattcatgagatgacgcctccctattcaccccaatcaaatggggtggccgaaagaaagaaccgtactctaactgagatggtgaatgccatgttagacagtgcggggctttccaaggaatggtggggtgaggcagttttgactgcgtgtcatgtcctgaataaaattccaatgaagcataaggaagtaacaccattcgaggaatgggaaaggaagaaattaaatctctcatacctacgaacatggggctgtttggccaaggtaaatgtacctatagccaaaaagcggaaacttggaccaaaaactgttgattgtgtgtttcttggttatgctatccacagtgtgggttatagattcttaatagtaaactctagagtacccgacatgcatgttggtacaattcttgagtccagagatgctacattctttgagaatgaatttcctatgaaatatacacctagcacttctagtaaagaaactgtcatgccccatgagcactttgcaccgatagaacacaatgatcaaacgcctgaggaaaatcctgaggaggacaacattgtagatactcgcaagagtaagagacaaagggttgcaaaatcctttggagatgactacattgtatacctcgtggatgacaccccaagaaccatagaagaggcatattcatctcctgacgctgactattggaaggaagcagtacgcagtgaaatggactcgattatgtctaatggtacttgggaagtcgttgagcgtccatatgggtgcaagcccgtaggatgcaaatgggttttcaagaaaaagcttaggcctgatggtacaatcgaaaagtacaaggcaaggcttgtggccaagggttatacccaaaaggaaggcgaggacttcttcgacacatactcaccagttgctcgcttgaccacgattcgagtactacttgctctggcagcctctcatggtcttctcgtccatcagatggacgttaagacagctttcctaaacggagagctggaggaggagatctatatggatcaaccagacgggtatgtactagaaggtcaggagggaatggtgtgtaaactattgaaatccttgtatggcctcaagcaagcacctaagcaatggcatgagaagtttgacaccacgctttcatctgtaggctttgttgtgaacgaagctgacaaatgtgtatactatcgctatggtgggggagaaggggtgatcttgtgcttatatgtcgatgacatactgatctttgggaccagccttaatgtgattgaggaggtcaaagactatctgtccaagagttttgaaatgaaagatttgggagaggctgatgttattcttaacatcaaactacaaagaggagatgagggtgggattacacttgtgcaatcccactatgtggacaaggttttgagtcgctttggatatagtgactgcaagccagctcctactccttatgatcccagcgtgctattaaggaaaaaccgaagaatagcaagggatcagctgagatactctcaaatcattggttcattgatgtacttggctagcgcaacgaggcctgacatctcatttgctgtaagcaagctgagccggtttgtctcaaatccgggagatgatcattggcaggctctggaaagagtaatgcgctatctaaagggtactatgagctatggaattcactataccgggtatccaaaagtactagaagggtatagtgactcaaactggatatctgatgctgatgagataaaagccacaagtggatatgtgttcacacttggaggtggcgctgtttcctggaagtcttgcaagcagaccatcttaacgaggtcaacaatggaagcagaacttatagcactagatactgcgacagttgaggccgagtggcttcgtgaactcctgatggatttgccggtggttgaaaaaccagtgccagctatcctaatgaactgcgataatcaaacagtgattattaaagtgaacagttcaaaggacaacatgaagtcatctagacacatcaagagaagactgaaatctgtcagaaagcagaaaaactccggagtgatagcattggactatgtccaaacggctagaaatctagcagatcagtttaccaaggggctaccacgtaatgtgatagacagtgcatcgagggaaatgggcttgatacccacctaaggttgcataatagtggaaacctgtccattatgatcggagatcccgtgaatttggatggtgaaacaaactattgtgtgactgaagagacccttgaaaagagctcattttcatgatgtgcttctcttctttcctgcatggtaggatggcttatgtcttaatgtgatccgagtggcttttccaagcagagatgttgacctgcagaacatcttagaaggaacacacctatatgagttcgactgctagtcacagtctatgagatttgggtgatctctagatactcatgaaaggcctggagtatgacttataagctccaacccgagggaatactaatggttgcctagtatcagttatggaattgagtgaaacctaactgcacaagactgacaattcaaggcatagtccattgttcagttgtggtcaggtgtagctccttttctaggtgaaagttcaacttaacagtcttcaccgaaacactggtatataaaagctgctatggaatagagagcattctcatgagccttgaaatttggtggggattgttagatttaattgggtaattaatccatttaaatcaattaaatcaaataaattccaaggctcattatgctaggaattcatgtgaattcattcttctatgggatatcaatgggatgaagagttttgagaattaatccatttgattaaggaattggtaacttatatcaattagtcctaattgatggatggttgatggttgtgtagtggaggatggttcatggctagttgatgacaattagttgctctattcctcttcctattccattggtaacttacatcaattactcttaattgattgttggttgatggttgtgtagtggaggatggttcatggctagttgatgacaattagttgctccattcctcttcctattccatgactcttactcttcatcttccattcctcttataaaatgggaatggatttgatctcccgcgagaagaagaagacacactttcatccattttccaaagctgttgttgctacggtaatcccatcccgacgagtgtgtgcacacgcgttgggagagtaggcctccgaaaccacgcgttgctgcgacgtttgcacagacgggcgggcgatcaggtttttggggagcgcaaggcgcgactactcactgttcgtcaacatctacttcatcttcaccaacatgtcgaacactggagacaaggagaaggagactcccgtcaacaccaacggaggcaatactgcctcaaactccagcggaggaccattcttggggtataaccttattacattatttcaattagaagttttactgttaatgttcatcgcaatgtcaacattgtgtcattatgtgattgttgatgcttattcaacgttaagcatgctcatgttgattacattcaccactatcactggatcaaatcctattgtaaatatcatgattattatcttgttattttggattaaaatatgccgaattatgaccaaatttccaacacacatttcagtaaagtgaggtcagaataggtgtaagctcatatagctaacttcacgctaggtttagccatggtttaatatatcgattgggcaatttctattgggggaacctatacgactgaaatttaggatattttggtccaaaaaaatttgaacaaaatgggtcaaatttgagttttttctaaattcatgaaaatttgaaaaaaaaagatctaaaaatttcgggcaaaatagtttcctatcccggggaccgataaaatgaaaatttccaaaactgaaattttgttctggaattttgaacccaagtttacgccttgagcaagttctaggctgcatacctacaaaactagaaaatacattaaatatttatttcttcagaaatgacttgcttcaaattgagacacatgagaaaacgacatacgcttcaaatttagtggtactaggtttcctcgtagcttgtgttttgaagctcccattgcatgcactctactagtgcatgctaaaacaaacattataaataagggctattaggcaattccttttgataaattagggccggcctccacatcttgctatggagcctgacttctgcattaccaaaggatatggagaagctagctatatgaagaactcaaagctacaattttgtatactacccaacttgttctctatgtaacattaccatagtgctattttagtagatacatctacgtatttcatgctaaataaggttgttttctttcattatagaaatagaactacatcaccgacctgtttgtactttccttttcatctttagggtgaaatcatgtgttcatgcaaattagccatctctttaaatgtcagaacctatttaaacatcagatcagcgttaccatggatgaaaaacatctatctatttattatatactaaaagtccattaaacttcctacaaacgctctcatgccgccacacgagactcttacaaacgctcccaagccgtcacgtgttaatctaataatctggtgaacccaatattatatgaaattaaatctatttttggaaaaaaaaatccacatcccacgtccagcttggtctgtgcgtacgggatatgtacgtacgccctcccatgtttcccctttaattatctcctatttccatgctacatgatctcttctatttccatactatattagttcctatttttatgatatattagtcaaatgtaaatcataatttataataatagttttcaaaaaaataactaaatcaccgtcatataaatacacatatatatgtacaaacgtacgtactccctccctcctgttccacaggaattagataagaagtgcattttatttttatccgttcgtgagtatgagaccatcacaaatgatttatcatggatggcttcgcttaagcgtgtcttaaattgaatgtgtagatcggctaaaaaagtaattatttatttatgtcaccaagatcattcatatataaattaaagttcatagatccaataatttttatagtaataaatgatggtgcataaccttaataaaaaataaaaaagaaagagaatactgagggggaggggagcagatgtggtggtacgtgcgtattatacgtacctgtgggtccaagagaaaagggtgatcggatcggtggatttaatctaatggttagtattatcgggttcatcgttttaaataaaaataaacggttagatatctttcttttttcttagaatttattagagtgccacgtggcggcttatgaccgtttataggaatcccacgtgacggtttgagagcgtttgtaggaagtttaatggacttttagtatttttaatttatttgaacagtaattttatttgttattaattatactatataaaagtcaataaaacttcatacaaacattctcaagccgctatatggacatcctacaaacgctcttaagtcgtcatcgtcatgtggcattttaataaattaaaaaatatcacactactccaaccgtatgtacgtatgttttcctccctctccctactcttctttaaattaattttttaatgaaaaaacaattaataatttaatatccatatcacccatattttactataaaaaactaaaatacattatttgaacagattgcaaccaaacaacatccaatttttaatttatttgtaattaattattaatctatctattaggtactaaaagtccattaaacttcctacaaacgttcttaagccgccatgtggcactcctatagatcctcctaagtcgccacatggcaatatctaatctcaccgttgattttatttaaattaatggacccattagtttacactattagattagatttattacttaaaaaataataattttctcatgtttataacgtacaggcggtactactgtccgtacgtatgagtttgtacgatacaaatgctactgctgttctttccatacgtacaaacgtacatgatctttcctaatcttgctgaaaaaaaacatacacatgtacagaaaaagacagaaaaaacatacatccataaaaatcagcggtctttgaaatataatttttgataaaatatattacttcacaaatataaatatatttagttaaacaaagatctataataaatatccaatcaatattctttaaaccatcttctgaatctatctattatatattaaaagtacattaaacttctacaaacgcttttacaccgctatgtggctctcaaatatattagcgaaatcctagaaatctattatatattataagtctattaaacttcctgcaaacgctcctacatcgtcacgtggcgctttaatttagattaatcctagaaatttagagtaaaaaaaaagagaaaagcatccaatcttcaattgtcacttaaattagtgacacattattttaaacattggattagagctcttaaaattcccacgctgctaatctctatcccggaaaaaaacatagtgtgcttacatcgtacgatcgtctccctaccaagaaaacaaaacttaaatacctacgccatatacgatcaaaaaaaataaagctaaaaaataaaaaagaaaacatgcacacgtacatagaacaattggaaagaaatactaatcaggaaaaatcatcggtgtgagcacatatttgttgtcaacggcctttaatctacaattttaagatcttcctccccactctgttatttatagtcctggtgtagatagaacttcctttatggtttaattccgagcggtagtaaataccaggacttagcaatatttgattgatcacaactcattatattccatttattataaatcttccaaagtaattcattataggaatgctttcaagaaatggtttgcttttgcacatcgaaacaaaaaattaatcgcgcggatatgtataattcaaaagaatagatgagtgattcatacacagatatcgggatttttatttaaatctaagaggcattcttatcatattagtagtatattaaaatctcccatgtattttaggataatctaaattcacttacaatatatatatatatagtgatgtattattccttttttaataacaaataagatgctcgtacatctgtacgaaattcctttccgatttatattccggaaatgttctccagtttatattctgtcattatagtgtttgaaacacaaaatataatacatgcccgcgcgaatgcgcgggctacgttcctagttaaataaataaagataaaaagttactgtgtacagtctacagattatttcattctattcaatcgagcctctacttattcttgttgatttgtgttctcctgaattgtcatactttctccacttgtaccctttgccttagcagaagattttcttctgatctgttgcttcatatatatatatccatctcctattagcccaaccagtcacatgcatgggcttcttgaatactccttgttcatctgatccaagcccggttttttactcccttgtctctatttgtacctaattgatcagctctcctctttatagctcatagagctttgctctcatcccacttgatccctctatttgattgctcaagcttcccgttgaccacgatgggttgtcgatgttaagcccccgatggtgtacctttgggcactaggtttgtcgaaagtatatgtatgtagttgcaaaaatgctaccttaaatcgttctaatgattattattcaagtgagttccaatggagcaaaaggattgtgttctttattctagttggtttcttgtatttggtttgcatttaattagttggttgtctttatgctagttggtttcttgtatgttggttttcctttaatttgtaataatattgcttaatgaaagggataggtataactctatgaggatgatgggcgaccctacttggggatgagagaagtaaaataaatatgtgtaacaactttacattatgatataattctatgcccaacacgattttattagaccacctaccagttatataaactagtgatctcttagaactagcaaggtgggactaaataaattattttactatgtgtgcacatgcaaccatgttgtataagctatcagcataggcctagtaccaagcagtcacattatgagtgagagacatgctataaacatgaaaaagtggcaatctatatgaatatgaatgagagacatgctataaagatagggaaaaaatgcaattttactagttatataggctatgttgttgtaatatatgttaatgtcaacggtacaaattttgttgacggtaatggggtgcccgatcttccatcaagtagagattatcgatttggcagaaacttggtacacacaatctggttttcaatcaacaaatataggttctagctaggtcgatcaaggacctctagaagcatcattattggacttcaatacgatacatggcccagcggcccaaaagatggtgatgcagcactcagatagattctggacgccacttctttcagaagaatttttgacgtgagaccagacccattggaaaggtggtctcgttagctttccatatgtgagtctgaatgcggctgcgtgatgtttttagcgcagactactcctagagcctaaggtagactcaaacttgatatgagttggccctccatcttgacttcaacgcctgacatcatccttctagcctctctttttggtcttctccatagtttctaattataattaaatcattggttagtattttatcaaaatcacatgaagaaatacttaggaatgagctcacctgttattgcaatttatgaatgcgagctctagtgattggacctttcatgacaacttagagagttttgtgtgtatccaaagcagtcatatgttctcatcactagtttaactcaaagtgaaattatcttcagattaaattaattacatgtaccatgcatatatttttctagcttgcagtactggtttcccacagttagtcacaatgccatgtatttatgtttgctttgaatgttagggaaaggctctgcttcagacaaaaccgatgattgaaaaggccattaaaaaagtacacactgctcttcaaccaatgatgatacttgtagctgacctaggatgctcctcggggccaaataccctaatgtttgtctctctctaccatgattagagagatcgctgaatattataacaggatcggtcagtgccccgtggatgttcagtttttcctgaatgatctacctagcaatgattttaatcacctgtttaaatctttagaacagattgataattttgttgctaaagatcaaaacagacaagcaactacactgcctcaatactatgttgctggattggcaagctcatactatagaaggctcttccccaaaaatagtgttcatctgttccactcctcgtatgctctgcactggcgatctaaggtaatcagacaagcttatcacagttaattgcagatgtccaggtgaagcatacttttagagtagtgcatttagacatcaatctcatttgtatttagccttttgagatatatgctttactaaaattgtagtatttgttttgaatttatatatgaatatatacaccttggccatcgatatagatcatgcaagagtattgatgaataatttacctgctatcgccagatcttgtcaaaggagcatttttttgggatatattctaaatgttatttttatttggttttaccataaattttgatcatagtactagcattcaattattgagataactaggtgaaaccccgcgcattgctgcgggaatttagtattataacaataaaaaaaataacgtgtaagatagctatgatagctagataacaccagattaagtaaattaatgtggtttatgataatttaaatttaaatagtatgtagaatggtgattcaaacgtaaaaagtaaggtggtatgattttatagaagaagaaaaatagggagatagtttaggtgtgtggaccatagattaatcatctaaaggctaaaaacaattgatgggatatgacttaattagagggaaaaaggagaaagataatctggaccatagattaatcatttaagcactaactaagtgatgatgaactatataagtatataggatatcataaaacataataaagatgtatattgaaacattatgtgaattatgttggatgataatttaacatgtttgtatttgaaaagctcttaaattataaaaactataaagacatagcatgtttgcatgatgtttaaatgtgatgattgttagtggatgatgatgtggcatcttgttaattagtagattagtgaatgatgatgtggcatcttgttagtggatgatgatgtggcatctttgcatgttaagcttaagtagttagtgggggataactttatagtaagatagaataagttgggacttgttatcatactttttctttcacctatgatataaaaagagtaaatttcactttggcctacatttgtgaccgatgtttcacttaatttggatcacccttcaattaatgctttcactttggactgagtaattttacctttgtattactttggactaacctgactctttttcgagcatatatatgaatgatctcaagtacatcggctcctactcgtcaataaactctcacagttatacgcaataccatttctttggcatatgataaattggttgtagatagataaaagagttaagggtggttgaaagtgcctcaaaggtaaaaatacctgatacaaagggataacatagtttaaagggtggtccaaatcataaacaaaaactgatgtagtaaatgcgtatatcttgtatatgcaggcatgagatatagataactgttattattgagggatcaaaattgctgttagcactatagcaaaatatcaagattttgttcttcatatccagatgttcgaaatgaaaaatataaaggagcccctgaacgaaggcaatatttacatctccaagactacacccatatcaacagtcaagttatatcaggagttatttgagaaggatttctcaaatttcctcgagttgcgctcaaacgaacttatatctagtggtcagatgctactcactttccttggaaggaagaacgaagatgtatctgatggagatcaatgtactcttcatgtattaatttcacgagcaatacaatctcttgttatggaggtctacacaatccatattactcatgatatattaattactatacattgtcatatatatatctagctagattcttcaatgaattaatgtgcttaatttccactttcaacacattagggtctgatggagaagaaaaagcttaacaacttcaacatgccggtctacatgccgtcaacgcatgaagtgaaaacaatcatcatgcggagcaagctgttcatcatcaaccagatccaactctctgaatcaaactgggatccttacgacgatgacttagaaggagaggttgtgctctacccggcgcaaagcgggttgaatgtcgcgaggtctttgaggccagtgttgaggcggttgttcactacctattttggggaatcggttcaagatgttctcttcttaaggattgccagtaatgtaagcaaataccttgacaaaaggaagggaaagcacaatgtcattgcactgtcattggcaagaacatatggagatggagtgctatagatgatgatgatctggctggtacatcttacttcctatgtttcatattataagttcttttctaatcaagtttggttaagtttgactaagtttgtagaaaaaattagcaacatctaatatattaaattagtttcattatatctaacattgaatatattttgataatatgtttgttttgtgttgaaaatactactatatttttctctaaacttgattaaagttaaaagaagtttaactagaaaaaaagttaaatgacttataatataaaacggatgaagtaactatgttagtggccagaatgacgatttttggctggtttgtcgtttgtgccaatctgggcagaggtggagaccccacagtttcaaaatttgcattgtatttactggagtttgaacaaaatctgaaaaaaactaaagtattggcttcgttcaatcgaatatttttagtggtcctgtttccgccgctgattctggctattttgatccatacatattccatttttttttcctttttagtgattattgcaaggctcacatgcacaaatttatgtgacatcaaatttgatcataaaaagtataggttctacgatgaatttggtttattcatggatgatacaagttccatgacaaaatttgctgattcgtcgtgactaaacgaatgtcacgctccgttttttacgaacacgtacgaatacgtcacagaaattttcttatgacgaattcgtcatcgaccatgacattaaagttttatcatagatatgcacatttctactagcgactacaagctgccaccagcccaccaccacacctctgaaacatacgtcgagcaccttgtgtgcgtgcccaaagcactaccagttcaatgtacatatatgacggctagattcctgatcaattatttccgatcataccatatcgccgtgaagacccttctttcctcccacgcatggccgccatgcaccggcgaaactaggagtttgccgtcgcgccaacccatttggaaaaggaaaaattggaaccatgccattataattttgtaaaatttgtaaatttaagatatgacatgctgacccacatatcattgactcatgtggatgctacatatcattgagataccgatggcatatcttaaactttgtataattacaatggcatggttccaatttaccctttgcaaaatcaaaccaactctcacaggcgcaatatgctcgtgcgctaggttgaaattaggctgtttggttggctctcaaaggttgctatatcaaacgttaagcataccataatttgttagtatagtatttggttagttgccacacctaaatcatgcctcactttataaattattgggcctgcacgccatatactcaaattcttgccaaacttaattatacttgtggctaacaaattgctagtctcactttgtatggcataacacacttgtgacagagtgaggtgtggcaaacttagtcatcaaccaaacaacccgttaaaacctatgatccgagtcagctctgcgcatgtcgtgtcgccgtcgctacagtgccttgcgagggccatatgccatcactgtcctgtccggtttgtcgtggtcgcctcgtcgacatgccattgcgcgtgcagacggcgccatgccgtgcctgtgccgctcgtcatgcacaacatgtgcgagagagggcgagatggagaagaaacagatggaatgggagaagttggcatgaccccacttttgtcggcctccctggtttttttcctctgagagataaatatcatgtggaaccacctgtcagtggtggcaatattttgatcttagaaaaataaatcaagaaatctatatacctaataaaaaaataaggtaaggtaaggttcctaataaaagtttttgtccggcgtccatcgcaagcggaatcaccttcagtaatcggtttatttttacaataatcaatatttttggtaatcacatccgtttcctaatctgcaaatctgcaaagccatgcccaccatcaaacccaaataaatacggtaatcagttttttttagtaataacatttgttcatgatagcatcaagtttttgcaaccgtcggcttgtttggttttagggtttattgtttggtccacgttcaatttaagattgttttttaattcatgtttatttcttgtcaattgaggtataatttccctggtaattatgttatacttaagtttcatgtacttaatttccccccttttattttcaagttctgatctagcgtaattaaggctcaatatctatgtaagttgcatcttgcctttcaaattcatggcttgagtagcacttagaagtaggggatcacgaatgggattgaaatcaagcaaatttccaatattccccaaattcaaaacccaaaactttagttttcctcaaatccgaaatcctaatttcatttcccccaatatcaagaactctaacctcctaaattagacaatcccgaacccaaaaaaaccccaaattgatcaaatcttgaaacaattagggcctttgctaaccgaattaggacttacggatcgtccaagataactacacgaggcatgagctatgtcatcatgcgcatctccgatatcctcctccgttatcatgcgggtgatgtgctacttcagctgcgccgtgtaccggccatatttcgccgcctggacaatcccgcgcatgcctgacttggccgtgtgacaatgaggctcgcctcttctacagcctcaaccacaccaaggaggagaaccatggttggggagcggaccattgacctcaggccaccgtgcgccatcgccgccgtcgtcatcaccttgacatcgctgtcctttgtgcatatgggcaccctgctcgggtagacttggtgatgtcgactcacggcgcactatcggcttgaccttcgtatccgtgcacggcctaagcccgccacacacaggcacgccgttgcgaatcatcgccaccgtcgcctagctcccttgctcacaccggagaaatcggggaaaatgggagaaatggcctaagattaaggtttttcagaaaaccctgcttccatgatcagtttgaagcaccctgcaggactgatttattaaagtttaaccatacaaacagaaaactaagcgcacaactgtcatgtaaacttttgaaatattttgtaacgtagtttatgctgccatcgaaggatactatggaatttcaccctaaaatatgacctgtgtacaaggagattttttttagataatgtgtacaaggagatatcggctaaaaagagaaatatgctcataatctggagtgatttgtagcttttcctttcttttatttttgggggagtaaaatatgtcaaaaatagtttaggggccggtcaattgtaaaaaaagtaaatagattgaggtagttttttttttctggcgacctaacccattataaaaaaatcagcgacttacgtaaaatgtataaattaagcgcgctgctatttaacggcgactgatggcggaaacatgaattagagatttttttttagataatggaactttttattgaacttagactagatcgccatccatattcctgggtaaaaaacaaagactaaattgccactcatgaacaactcattggccatttcctctaaaagcacagagttttaagggccaccaattctaagactagatcgccatccatattcctgggtgaaaaacttcttaaccatcttctccaaatattgacataccacaactaccatatcctgcgaaccaggcaaccaaacttctataggatagcctatgtacgaagccaatggataagagaatatataaccttcaaatggatgtgaggatactaattaaaagtcatggaggaagcctaaacactgtatggcctaatcagtttgatgattatatgtgagaaaaaaaatgctggatcggagggcccaagctactgatcgttccaccctgcagtctccgccactatggaatgtacctcgttgctgtctagctgcctgaagcatgtggatcacacgccacaaagtttatatgtggatgagatttttttcaggattataatcttgggagtgttgcaaattaatgtcatatatatatggaccatatgtgatagcccttaattttcgcacttttcggtggtagagattgattgtcctgaatgcggacaaacacagcagcaatatatacgtggggaaacaacaattaattaccatcccactttgtaaatatatatttgtatatatatcattaattgttgtaggcgtgataaacgtgtacaatcaccatttgcatctataaatataatggcaccatgatttctatatctatatatgctacttgtgtgttgaacctcccagttgtatacactcctaaaaagaagttattaggtctcctcctgtatcacattatccacactcttagtcttagctatatggaaattgactttggcatggttgaaggggacggagaaaatagctatgcgaagaactcgaagcttcaagttagtacacactacacactaactctgtttctttgagaaattgcagattcatttcagtagatatatattatatatatttatagggaaatttacttttaattcggtatattatgttgatttgatttgtctaaattgggctacacatatttgtattttcttggatcaagttgtttcgtgaggacttctgtctatattatagtaaaatttttcagtccttccgaaagtctcaaggtagtttcctctggtaccaaatattggatggtaaaattgctcaaattttatactaaaaattttggtatctcgatacacctactacctgatactacaaaatatggtacatcccttaaggatggtaaaatcacttttatatgcatgcaagtccaatgtaaaatcaaacatcatggttctgggtgaaaaaaaaaactaaaaatagaaaacatgcataagctaggttttgtttagataagggattttcattaatccggccactatgcccacgaggggtatacatatccaaaaaggatacaagagtatttaaactcacacctcaatagagaggagaacacaaacccaaaaaatgaaaaacctacaacctctgcatatccctgtatcccgacatcctctagtgaacaaaattgacgagtggaagttgtcttctcatcaccgcccctaatgcgttctcgctgctaatctccactggtgccatcttcatccactttaagtgaaccggtgccacacgccaccgggtagcccaccttcatccatcgtcgtccagtcagaactagccgaccaaatgcgagatgaaaggatatgcttatgctttgccggattcctaagcctttgcagccgatagggccgttgccaacgttggaatcctctactacctctcggactctcagcctgccgccacctctaccggcgtcctctgccgtggtgatcgagcatatcatctttcgtccggacacccaggcctccaccacccctagggctgccatcaccgacgagatccaccttcgcctgtaccaccttgcaccagtccttatgccgccgccgcccctaagaccgcagctgccgtaactaaggagatcgctgctcggactcgcaggccgtcgcggcctctagggtcgcagctgcctacgacatcaccttcatcggaacggccttctccttgctgaggactgagcatcgaagcttaggccccctgctgtcctccgctgcacccgctgtcctccgctacacccgccgccgcagagacgtcgcggccgacccgctgtgacaccgcctcccgacccctccgctgccgcatgccaatctcgggttcagccactgctgctgtccaacgcttgcgcctccatccctcccaacaacctccgctggcacgcgcggccttgaccaccactgcccatggcccctccgcctcccacgtcgctagatttgggggctggaacccgcagacccgacactcccctccgccgcaccgaggtctcctctggaaaaccccgtcgccgctttcctcacagctgcactgctcaggtggtggcaaggccatgggaagaaatgagataccagatatggggaaaaagccgaatcaggccagtagtatgaccatataaaaagggttaattggatggatgtcattgcaactttactattttgaaagaaatgttactactagtcgagtgaaatctattagtatgtgctactccctctgtattttaatgttgacaccgttaactttttgaccaatgtttgaccattcgttttatttaaattttttatgcaaatacgaaaatatttatatcatgcttcaaagaatatttgatgatgaatcaagtcacaataaaataaatgataattacataaaatttttaaataagacgaatggtcaaacgttggataaaccactcttctcaaagacctgctaatctccccccaaagcatgtaatgagaataaaacatgcaaaagaaattgaaaattcatttcagtagatcagaatgtgccaaaaaaaagtgaagcctttatctcagtaaagccgggcgtgaagcctttgatctaaaaaaaatgtgcaaaaaaaaaacagatctggtgtggtttctttctttcctccagcaaaatgtagggaaaaacaaccatggataaaatcgttcgccgtttgctgaagaattgaaagccctagagttcttccgtggcggcggcgacaaaagaatgcgtgcttgtgcggcaggggaagaaattgattgttttgctgaccttaacgtattgttgcctcggctcagctcgtgtcgtcttgccggcatccgctcacagcacggatgaagaactgcacatcaagaagctcaagaatgacaaatggggcggtataacttgattgctggcccgtgatagctcgccggcgtctatgcacggaggcaactcttgccacaggaggcttcgcgcagccgccgcaggcaacagggcctccatgtgcggcgatggaagctcgtcggagtccaggacaatgactcaaggagtgtgatgtggaggaggggacgggggatgagggcagaagggggttggggaagaggggattcctagagcatacctgatggaagtcctcggccggagactcggcgagactggatggagtgccgcttccgccaaaggaagatgcaacggggatgcggccggctagcggcgagcggccgcggcggcggcgggtggcgattcggtcccgataactcttgagaatctggacgagaataggaggtgtcatacacacgtattggtcccccccccacaacaacccacatacgaatcttcaggtgggccagcgctgtatttcgagcgtgcactcaaaataaagaaaatacgatcctaaattcctaacatctccgtatactatttgacgcacgaatctttaaaccatcgtgtggtttctagcctaggtgccgcagcacctaggtgctaaaaatactttccgaactatctcctccttccgcacggccgcaagtctccagtagatcgtcgccatcggcttctcacaggcacagctcgcctcgtcgcggagctgcagggagacacctgccacgccaccaatggttgccgcacgcatggggtggcgacccgccgccgccgcccgagccgttcttcttcgcgaagctcgccacctgcgcccaggcccagcacactacgtacgacgtggctcgcgcgccggagtgaagctgtagctagccatcactagactagaaggcacgacgacatgtactctacccaacggcacgaacagctagcaccagcatgacgcgctccttgtagacccgagaagttggtgctgccgcacgccagcacactcgccatgccgatcgaacgtcgactaatcaaaattgaccaagaaaccatccacaaattcaacaaataagtggtagaaattgaagcagttcttgcgtgcgatcgagaggggcgttcgatcgaccattacatacgagaagctagggaagcgccggcagggggagctagcttgccgcatccacaccacgttcccgcgcgcagtacgccgctggccaccagctgcccgcgcctgctctcgcccttcttgccggaaccaagaagcagccaccagcggcacgaacagagcttctccatggccatgggattgggggaaggggacagaaattgtgacggcagtgacgtacggtagtggtatgttttcaaatttagaaaattttgatggcacgtagtaggttttcgttagtaccgatggtattttttctagaaaatatataagaaaaaggaaaaggtgtaactaaatttatagaaaaaaatagtaacatctacgacaccaaaatagttttattaaatttaatattgaatatattttgatgcaatttttgtttcgtattgaaaatgttactatattttgctacaaacttgatcaaacataaagaagtttgactaagaaaaaaaatcaaacaacttataatatgaaacagatggagtagtttgtttactagtatgcaactgttaattccaaacaatttaacttgatttaatataatgtgcacatgaattttaggagaagactttggttgctactaagcctatgattcagaaggccattcaagaactatactctgcagttcttcctaggacgatgcttgtcgctgacatgggctgttcttcgggaccaaatacactaaactttatcttcgaggtgataaaagcgaccagcgaatattgtcaaaggataggtcaccgccctgttgttttatgaatgatctacctggcaatgactttaactacctatttaaatctttagaacaactagataacttggtcgccaaagatcaaaacagagaagcagcaatactgcctaagtactatgttgtaggcttgccaagatcctactatacaagagttttccctgacaagagtgttcacctcttccattcatcttattccctacattggagatctcaagtaagtctgtctctgaaaacctatcccagttgagtggtaactcattaaataggccatgcatttttttttactgatcgaaagagtacaaataaactggttattagttgctaaagatttctactgaattctagtattctacaacaaataaagtagttatttctatatgtacattttgtaagttcccatcgattatatactcccataatttgtcgctttttttgagaaaataatttctctattcactcaattcatacaacatacaaaacagtgatattatgaaagtagtaaagtgaatgcattttttgctgcaatgcatgagatatccaaaaagagagaccgcattttctgtaccagcattaggagttcatagcaccaataattaatatgtgtttatatcttccactgcttttgtgcacagatgtttcaggagagcaacaatggggaattcctaaatgaagggaacatttacatcgccaagactacccctaaatcggtgataaagctataccaagagctattttacgatgatttctcaaagtttcttgagttgcgctaccaggaacttgtgtctggtggtcagatggtgcttagttttcttgcaaggaagaaagatgacctatatgatggaaacctaagtgttctttacggattaatctcacaagcattgcaatctctagttatggaggtacactaaaccactaaccctactaattacgaactagcattatacactcccattttcctatagcttaactaatttctatattggtggatatggaagccatgaaatttagaggtccgtgtatatatgaacatacacacattttccaattcaaaaaaaaaaactttgggctttcctcaggacatattctgtaaaaagaagattttcaaaccaatttgattaattgaaatgacaatttactcaggacaatgcagatttgtttcaatctaaaatgagccacttagcacttactactatttttttaaaaaaatggattaaaatccggtctctatatccaaacattattacaccttgttttctacgctgatacttcacatttccagtcttatgtacaggatgattggttgatagcaagaagagtgttataaaatgaacaatacatattattttcctcgcctgatcagtatattataaacagagtctctaaaatgaaagaacttgctttctgctttcaacatggcagggactcgtggagaaggaaaagcttgactccttcaacattccaaattacgagccatctatccatgaagtcaaaacagtggtgataagcagcaagcttttcaccatcaacaaaatttacgtctttgagtcgaactgggatccttatgacgactcatcagatcaaggacaagcaactaatattaatcctatcaagagtggcttgaacgtcgccaagtgcattagagctgtgcttgagccgttgatcgctagccattttggagaatctatactagacgtgctcttctctaggttcgcacgtaatgtcacccagcaccttgagaaaaggaagggaaagcacagcgtcattgtgctgtcgctcagcaaaagaaagaattaatcacaagagcggatggagcatgagaatttagccgttaatttcctcttattttgatttgtaatggtggtaatggcctggtcattgtgtagtttgtgcttgttcaagccttttgtgtgttctggaatgcaccatagtattttgtagtttaataattcttaaatttagaattaataggtattgagctgtatctgtgttggaatttgcttgtattatattgtacaaggaaatatcatttctctaaaattaatgattatccggttgtacctaacatgaactgctattgtttttatctcaatcatattcatctaatatttttttctttctttttttttgaatttccgttagtttgtacgtagtaaacttaattactttccatggctatttaattagtctgcatataatctttttgtcagacttttacaggagaaatctgaataggaatgctagcaaaaacgtcatgtgtattatcatatcagacatatagaagtttttctgtgacttctacgttggtaaaaaatcagattacgcctctatcaagcccacatttaaggaaacgaaatgtcgtaccgatatccgacctagtaagtaacattgattttagcgtttctcttaatccgttaatcgaatttgaatgaaacaagccacattacaacgacgaggacagtgcctaaaatttctgtttagactacataacccaatttcaaaacattttttcagcatactggttgataaattaaaatctgaacgtttgactatcgaatcaatttctattcattttttatacgaacagggatgaaaagtgtaagatcaatctgtgttttgattcttattctgtgttaaacagttggcatctgtgattattggttttgatatttgcagattatcgtcgaagtggttttggagataatcaattttcaggtgatgaacatggtttactgttttgttgggaccggtcagaccgggcggaggttgccggtcagaccagctcatgtgtagtggtcagactggccaggcccgtggtctgaccgggcaacgctgtgtcggtttcggtttcgggttgtttctttggatatccgtgattgtttcaaggttatggcttttagatggatactatacgtatgtaatactgttgtttgctaataatgagtcaagtgggggatagtttggtctcgaaatatagtttctttgtttgtttcatgtgtaggtgactcgatgcctcgggagagtatttgtggtgatggaccgggagtcggattggtggtaagacgatgtccgtgatggtcagatatcatgcgggatactaagactagagttgatgcacgtggttggtgaaaattccaaatggcatacgatagaggtattgtgtgcgtatgggatgcggagtcgaatttggaagtagtccaaatttggtatgattggttatgtaaagtttgtgtcttgtactagagggtttcctaaggtgtttaggactcttagtatgagtttggttcgtggctttaggctgcctacctcatgtataaatatagggggagagtgaggcttcccggtatcgtttttgagagcaattgagttactagtttagttagggtttcgagtttagtcgagatttttgtaaggagtgctattggtgcactttgtaaacacagagagaagcaataaagttatcatctactttaagagttcttcgatttgtgtttcatcgggttcggcggtctaaccggcgacatatcggcggtcagaccggcggcaggcggcggtcagaccgacggaggagaggcggtcagaccggtggtgacttcacacgcggcaggcaatctttaggcggttggaccggcggatcaacaccggtcagaccggtggcacgagctcggtcagaccggcggatcaacctcggtcagaccgatctacattgaatttgagagtaacttttattcccgctaaaagtttgggtttttgggtatatcaaccatttacaccccctctggttggcttagtttttgtgattcgatcttaaaaaaaggagctacccattgcaaattaaggacaaactgcatatttgaggttgaggcaaacccgctaaatctctgcagaaaatacccgaaatccttcagttctcgtctcgatctgtttcccagacgaaagcctctggctgttgcagcagctagcagcaaggatttacggtagcagcagcaagcatgcatcaagcatcattggcagcagcaactcagcgggtaaggaactgagtctaaaccaagtctaggcgattgattagtagttcgattttcattagactttatctttttaactaacagaaaaaaaaataaaaaaagatggaaaatgagagatcgatagcgctgctgtgcgcttgtgccgcttgctgtcctctgctcagttccttacctgctgagttgctgctgccaaaccaagtctaggctcagagttattaatttcgaggctttctatttgaagtggcaaaatatccgtacattgcaacgggtgaagataattttaatacattgaataagatggtgcctaaaaataacaaagtaggaatcatgcagctgtttccatgtttttttgtgttgcatgggaacctaagcttatacgggtcgaccctacgctctatttcacggtatcagcatatagtacttcgtgatctaattttgttaaaacaagagaagagggaaaaaaatctacatttatagtatcataaatcgattatgcatgtaataaacaaacacattaatccttttattatttttttcgagttcaatacatcaattagtcacatgcaattaaaacaaacactattcaaatcatgtctaccttttggatcccctccagacaaaggtcacacatatatttttttctcctataaatactaattagccaaaaaaaaaactgataaccggtgtcgatgatcggtaatttttgaagtcaccacagatgtcttggtgtcaacggataagtcacttataaatgaaagaataattagccgtaaatttgagcacccatgtcaaatttagtatttaaacacgggttgactgattcaaccacaaggaagctaactagttgaactacgcttactttgcaatgctaccagtttatttctagtggaatatattttgacactatatgatatcggtgattacatgcaacacaatttgccatgacaaaagaattatttttgatagacccacaaataggtaataagaataaaacaatacaaagaaccgtaaaaacttttctaattttaacctagaaactctaaggacttagtcttgttttaatatggttccagtccttttgcctatcagctaacattattcattttgtattttttacatggacttctttttttcaaataaatagtttctgcccgtgcaccccaagggcccaccttgggagagacagcccagtagcccacggcatggctttcaagcagcagcaccagaccgaggcccaagcgacctaacatatgttgccgacttctatacggacgggtagacgtccaagtcaaaaaaaaaaaaaatccgtattagaagcggcttgacggacgaaaagtcgaaaaaagatgtgtaaacgaggtgatgagtttttaaaatgtactggcaaaaatgcccgtacgttgcaacagaaagaaaaaacaaaaaagatgaattaaaacatattaaattctaattaaatgaaatacaaactttctagaatatttaggtattttttaagcaggtaggtatataattaaattaatttacaagtaaagtaagtgtgaggaataaaatgatatggtaggatttaatttttattaaattctccatattaattacactttttgaaattttcttcaaatttatagagattaattgctaattttgataatgcaaatattattttagtatttatttaaataaaaatctaaataaatatccttcttctctgtggaccattttcagcccattttcttcctcagccagcaagcgaccaaagtctaattaatatcctcatattcctcctttcacttgccatgtgagccgtaaccagaaatgtggtgcggtccggtgatgcaggccagcccaacacgatcgatcgatctgagctgttcgttttgatggacggctcggatcggttccaaatcaattaaaaccataacactaaccctcccccctcccccgaccggctctcccatcccccatcccccctcccaccatcggccgcctccccgcccgacgccgagaaagctaatcggcgaatagtcacgcgcccgccaccccgcgcggtgcgcgcgcggagagaccaggcgctgacacgtgtgtgattttttcctttttctggttttttctttccccttttttgtggttttctgttccggttttttctttctgtttttttatgtttttttgcacttctggtatttaacatatacatatacaaactatgtatacacacagatacaaactttatatacgcatatacaaacttatttttacatgcgtatacaaactttgtatacatgtatttttgggtttttatgcgtacgtatactaattttgtatacatgtatacaaagtttatatgcacgtatacaaagtttgtatacacgtattttttaaattttttatacgttcgtacacaaactttatatacatgtgtatattttttatacattacaagtgtatacatacaaaaaaaaattatatacacacacgcgcatgtatatactatatatacatacgtatacaaagtttatacgtatgtatatatagtatatactatactacatatagcagtatgtatagtagtatagactagagggggggcagctgatcgcgcggtgctccgctcgcgaccagtcgcgtatcagcgccccccgcccgatgtcgcctctcccctctcccctccagcggcgccgctccctctcccctccctctaccctccggcggcgctgctcagtctccccctctccctcctgtctcgccggcacagcgcggcgacagtggggtgcggcagagatggcggcgacggccgtccctccccctctacctctccacgtcggcctcgacggccgtccctccatctcgacaacggtgccctctccaccctcaagatccggcagtgccctcccaacggcggtgtcagcggcgacgacggcgtcagttgcgtccgcaggtagatccatcggtggtggcgatccagcagcggcggctctctccgcggcctctattctccctccagtggcgccccgtggtcggatccaatggtgacaacagcattggcggcttcccagtgatgttttagttttcttcctgttctttttctcaatcgcttgattgtccgattagattttgtatttttttttggctttatttgccttattaagcactcgtacggacgaaaaatcacgtggactgactaaacggatggtgacgaaatgaaaattacgaatattttaattagttaagattaagattttggccggcgtttttttctctttggcttttttttcgctttttttttccgccgcttttcttgctgacggcgttcgggcctttttttttttctgttttttccttccttttccgaattgttttctgattccatatttgagacggttttttcggcgttttgtatttttacttttttgggcgcttttttaaaaaatgcctttttagatggattttttttttctcgccggtgttttttaaatcggaatggtttttctctctctctttcttttcggacgatggaaacattttgcacttttaaaacagtagaatagatagatagtagagaaatagactaacaaaataccggtgcgttgcattctaatctcttttgtttttcattactttactctgtggaattgggctaggaacctatgatgtgttcttcaatgcaattccgtttcaacacacatgcatatttgctagccatatgaaagtaattccaaacataaatctaaaaatgcaacatgcatgacaaaatattactagttaagctattaactttaaagttggtaaatgttgattttttaagaaaattgtggctgccttataataatttaggatagagatagtagtaaattagcgcggagagatgaattaatcacgtggcttcatcactccgccaataattttgaacaagggaaataatagcagcaactttgtctttttccttgtttgttaggcggagaaggactgggagagaccgaccggtgacaacgagatgtagctagcgacgagcagaggaattcccatggcagcgtccatggaggcaaagagggatggagaggggaggttaaggggaagcccttagctcttagcattcccttgacatgctagaggcatatgcctagaaggtcggagatggcacacagtggtgaattgactgcgcgcctgcgcgggcgtggtggcttggagaaattggcggaagcggattgatgtgatgttgctcatcttttaataagtactccctacgtcaatccaaaatcagatgtgacactatatagtacgacgaatctgaacatgaggcatgttcatgttaggttcattctaatatgtagtgtcccattcgtatctcccaatttgttacactacattggatcctaggatgcaatattataggatggagggagtaggtaaaatatataaagttttttttcgaaacaacgtaagatatatacggtttcaaagtcctattgtattgttttgtagtatgatattgcgtttaggtgaagcctataacagcccttcctccagaactgtgtagccaacccatccgatgggcgggcccacttacacataccactccgcttatacttttgtcctcgcttcgtgtaaaagggttaacccgagagtgacatggttggaggaaagaggccttataagttggtcctcactttgtgtaaaagggttaaacctggggtgatatggttggagggaggagtccttgtaagttggaacatggttgtaaggaagaggccttataagttgcttcaagagaccttataaattgcttctcgcttcgtgtagaagggtaaacccgggagtcatatggttgaagggaagaaacattataagtttgttccaaaccttgctaaactagcaagctgtaggccgtgccgtaaaattcaggggtcctgtgcaaaatcactaaattgataataataataataataataataataataataataataataataataataataataataataataataataataataataataataattgatggatcttctttttaatatatttgcatagctcctttcttctattgttttttttcttcttacgcttttcacgaccgaagttatattttgtaatctgatttgtagacgatgtggcttgaaaattaaaatactagataaacttatacacgtatagatacaacatgaaaagaaaaaaaataatttagtccacatagtagataaaccaaataacctatgcaccaaaattgagaaacattatcatcaaataacatatgcaaccaggaggccagaagcagcgacgtaacacgtcgactccaccggtaaggcagaaagacggacgagcgatcaaggagacgaagaggcaacaaaaaaattggaagacgaaacgacagacggatgagcagtcgatttaattttttattgagctgcccacacgcatgtacttggggtattgggcctttgtggcccctcgaagatggggccgggacgggcctggcaaggtgaatttaaacatatgcagatagctcttatgggtcatacaggtcaaatcctagttggaccagaatgtcgcaaagccaaacctattgtgctatagaaatgaccaagatggaccaccgacagaaaaagttcgtattttcgaagtagtagagaaacggtttcaaagttaatttttttacatatttcttttaaatatttttaacttgaatttatattttttcagaaacttacatttgtttgaagcacatggatattgcacctaagttaaatatttcgtgtgcttagcgtgttcagtttgatatgataagacaagtggagagaggggaaggcagagagggcgacatgacaggtatagcggtacttattatgccagttgacattaattgatggcatggcaagctgattgcaacatggaacaaacgagtggccatggccatgtccacatagccgcccaagtcctttttgtaattagctttctcaactcacatttcttgtttttcacgtttctgaaactactaaacggtatatttttataaaaaaattctataaaaaatgttttaaaaaatcatattgatccattttcaaaaaaatacgtagctaatacttaattgatattgcacctaagtcaaatatttcatgtgctcagcgtgctcagtatgatatgataagacgagtagagagaggggaaggcaaagagggtgacatgacaggcacggcggtacttattatgccggttgatattaattgatggcgaacaaacgagtggtcatggccaagtctacatagccgccccaagtcctttttgttagctttctcaactcacattccttgtttttcacgtgccggcttgtgaaactactaaatggtatgttttctaaaaaaatatataaaaaattgttttagaaaatcatattgatttattttttaaaaaacatagctaatatttaattaatcacatgttaatggactgttcttttttgcatgtttgaacggagagttcccaactctaacaaaagaacatagcatttcccatactttcccaactcatctctctcgtttttcgtgcgcgcacttcccaaactactaaactgtgtgtcttttaaaaaaaatttatataggaaagttgctttaaaaattatattaatttattttaaattaatacttaattaattatatggtaatgagttattcgttatacgtgccgaagaggaggagggttaccaactcttctctgaatccagcctagaccctccctttcctcacctacatccctccagcttctctatcttgttgcagtactatttgtgacagagatggtgacgggggctgtgtccggtagcacgaaaaatagagctgtccattagcacatgattgattaagtattagctaattttttaataaatggattaatttgattttttaaaacaactttcgtatataaactttttgcaaaaaatacaccatttagcagtttgaaaagcgtgtgcgtggaaaatgagggagaggggttgggaactagaagttccgaacacaccctgggactgcgatagtgatggcttggtgctttgatgaagcctagtcttgcgctaattctagatccaacgctgataagctgatcactagaggtggatcggccgccacaaggcttgggagtgacggattcgccgccggcgagctgagaggcagatcattgccagcatgttggggagctagtggcctctactggcatggtgggtcctcgcattccatccgtccaaaaactgactctgcctcatcctcgccttcatgttggctattgtctactccctccattctaaaatataagcattttttggactctgatacggtttccaagatgctacttttaccaataatatataaaagtaagatgttttaaataaaaatagttacacattatgatagtttgtttaatgataaatctagtaacattaattttacatgattgatctgtcgaaactagatttcggcaatataaacggggtagcgcatgagacctacaagtggatggatgcagaaacaaggatttagacaggtttaggccctcttaacgagagttaataccctactactattcggggatttgaatccgccgggtgtaatattgatccgacgatctaattgtgaatcctctaccctagaggacctcctatccgccttatataggatgaggggcaggattattacgagatagaaaccttaaccaatacggtatcgattttctaaacctactttacaatattatcaaaccaggactttagactgttccgtaatatacaaggaaatgtaatacccaagtcatgatccgtacatattccatagatataagttatcctctataactagtcggataactatgccctgtgggtatggggtacccataatctccacgtgatcttttttatttttgttctttttaatagtcaaagttgaaaatgtttgatacgtcactgtgctaaaaattcttatattttgaaacggagggattacctcgctctctccttcggactagcttcgaagcagctgaagaccccaatccacatcttgatttgtgctgcgtgtttcccgtctgtgaagatcgatgtttcttaggcctttggttccgtgtggtctgtttacttgtctatgaaaattcgttttcaccgccagcgaaactaatttagtacgtactactccagtagttacacctgctttctgtacgactgtaccagtgttagcttgtgggttggcacagatttctcttgcacaattttagatattctggcttctagctagctggcatatgtatagtactgctggtacatgtcttggtgatggtctatatatgatggcacctcgcaatggagagagtacccacacttgagttgcattaatattgtgcttattgttgctactcaaagacccacatatctaataatccaagacaagccatggtcaatatcgaaggcgatttacacatgaccagtggggaaggagaaggtagctatgccaagtactccaggcgtcaggtgattatattgctcttcgttttattttattttttggctgtcaggttacatatatgtgtacaaataacaacatcatgacgtgtttggtttaccttggtaaattatgtttattgtgatttatcaaatatatataacaattagcttttcctcgtataataattattttctctgcatcttcttttctgctgaaaagcacgaatctctgtcgtctcttaattaattatcctcacagaaaatatatatgtgctgcaattaacaattagccataactattcgtagtactggagaaatttgtttagaagaatggatatatctgtcagttattgataatattaacctagcatctacatactatacaagatatacatgcattagacataggtcgacattgtataacaccatataacgtgtctatatcatgattaagagctcaaaattttcttttctgctcattgctagacaattgttatagatgaaactaagccagtcatcgagaaagctataatagaagtgtacaaggctattctccccaaaactatggtcattgcagacttaggttgctctgcaggaccaaatacgatgttcttcatgtccaatgtcatcaacatcatagcagaccactgtactaagttggatgaacatgatcctatcgaacttcagttcttcctaaatgacttaccaggtaatgatttcaaccaactctttcgatcactcgaaaagatcaagacctcaactacgatgtatcacaagggagattcgcttccatcatactacatatccggtttgccaaaatcatattactctagacttttccctcgtcagagtgttcatctcttccactcctcgtattgtcttcattggcgctcccaggtacgattattgatataaaaatgttgttgggaacatatcctatacacacaagtttcccgtaatacactccatacacagcaactaacaaatatcacagaaaattatatgaaaaattcggcacatactttcaatagtattgcacctatatgtgaaatcttatcttcaaatttattatattttagctgtaaaaaaatagagaaaattctaacagctttgtactctgaaaattgttagatttttcacttttttgttacagctaaaatataatgaatttgaatatgagactttgtcactttgcatatatgtgtcatcctattaggagtacatgtctattttttcgacatttgctagttggtgtgtatgggaaacttgtgtgcataggatatgtttcccaaagttgtttatgcattattgcatatatctgacgtatatacatgatgtgtaccaatcttgcatacatgtgatattgcttttaatttgtagctaacttgagctgtgaaattttctaaattaagtgatgtgtacatataggtgccagagggactagaggctggtggaaaatctctctcaaataaggacaacatatacatcagctccaccacaacaccattagtagtgaaattattcaaagaacagtttcgaaaggacttttcccttttcctcaagctccgccatgaagaactagtaaacgatggacacatggtgctaatattttttggacggaaggatgaggatgtatacaatggaagtctcagccatattttgggatgtgtcgcaaagtcactagaatcacttgtttgcaaggtaagagtagagatatcgctaattaacattctaagaagagatgtgctagtcagaattaaccattgattgatcatatagggccttgtgaacaaggaaaagttggaatccttcaacctacctatctatgggccatcagatgacgaagtaatggaaatagttatggaaagccatatgtttgacttggttcacatgaaactctttgaggcaaactgggatccttatgacgattcagtagatgacgttgttcatgacattgccagcagtagccaaaatatcactacgggcattagatctgtgctggagtctttgatagcaagtcattttggagaaagcatacttgacgtgttgtttcaagagtttagaccccttgtggcccaacaccttgagagggagaagacaaagtatgccgtcatcgtcatgtccttgaagaaaatatagtagcacgtgtggtccatgaatgtcctctctcttaattacgagatgcttttaaagagatcaaacacaatatggtgacatatatcgtaataagaacacttgtgtggttttgtttccctcctttcaaccatttgcaatattgcataatgctcatattctgtaaaactctagctaaatggattgtttctccattgtttagctatatatggtgtttggttacttggctatattgatttgcctcggcaagtatctataggttaatttgcaaaatgaacttcaacatatatatacaaataattataccgtgtaagaccattatgtcaattttaccagttatacatgaaatcgtgaatgagccgctatgcataattgccattgccaaactaatcagctaccatttgttcaagagtggttttcccactgaaaatttggtaacatgcaacgttaactagcggatccaggcaaaatggtcccggggatcatagactagtcaatagcattaataataagttgaacaaactaagaaaaacatatgacgacaatatataatacaactgtatatagatccctaatatatgatctcctctctagctacatcttcgcaggtgaattatcacatcatcatttggaattgcaggtagaaaaaacatcgcaaatgaagcatatacgataaaaatcattcataaatttatcatatatatacagttccataactttatcttcatttttttaccaggaaacagtgagggaagccccacggtaattttcattaattaaaaagaactgtacaaaggaatgatgaacgccacgatgcatcgaagaataatgatatggcctagccctatgggtggctatttcctcattagggttggtcctcgtccccaacgggagagggggcaggtgggaattcctacctgcgggtgagcgaggacgggggagagaatggacccgcaggtctcccagcaggcccccggagctatgagaaaccactatgaagacaatccatttaaagacccggctgatctattttggtggtgaaattgatagaaccatgtaaaagctgaaccctaatcaaccaaacctaacttcctatatccttcactgttccccttccatcgccgccaagcgtgctctccccatccaccaccaatccgtgccctcgccggccccaaccgtcctcaccacccctagacatcgtcgcatcgtctacgccgaccgaccacaactgttgcaagagggaacgactgatgtggttgtccgactgagggttgttgtaacgtaactttgatacgttgtaattatgttggattggggaggagcgtccataatcaatgtcccagtgatgtaggtttcagctggacatcgttaacaaatatcgtgcttctgtgtgttcattaaatttgaattttctatagtgtcggttttcaagatatatatctaggctgcgtcttataacaagctgtattagagcttgcgggagatcccaggtagaggtacgagggaggtgccccacaccacaccaggttacatatgtgtctgagataggactggcacaaggtggaacaaggtgatgatcaacgaagtttaattggtgggtcttcaggtggcgatctgtaccattagatgggttgcaatcaatactgtgaggactagatgtggtgttcggattgatggcagtgggagcgattggcactactccggtggtgtcggaaactttggttggatgactcgaactttcaggcgagctactatcaacttaattatcatatattttttatatgggaaaacctgtaaatatgatgatgaagaacttatcgcagttaattgtcaactggttggattcatatttatgaagtgtcttagtgccacaccaacattttgtgtaaaaaaagaggagcttgtaaaatccttggaataaataaaatctgagtttccatatcattcattgtttctgtccatactcatcttgtatacgattgtatactggagcgtctactttttattgtccaaacatagataaatatagtgatcgaaaagacgaaaacaagatgcaacgcctatagttagccctaataattaaatcttctctagggcttgtagtatgtcgtccttgaggtcctcaaacttttcgatcccaaaactaaacctcacaaggttatccttgatcccattctcggtcttctccgcttcactcttgcccctagtaaaattaagcacgaactaattatgccaacattaattaacacatgttacgtgcgtgcaccagattaaatccgttaaatgtatgaaattgagcgagcagttaattactccatcctttccaaaatgatcgatcatcatatatgtttatacaccaagactaaaaaaatcacctcaatcaagacaccatgcacatattctcccacaatgcatgtgtcgattaaaacatcataccaattataccttagcatgcacacattctctcatgctgcattacttgtattatgataaaatctatgtccatgtggttatatgatgatcaatttaaaaaatattgttttctattatatgatgataaatttggaaagggagtaatatttactgttgtcaacttaataaaacacaaacaagggtgcataccagtaggacatgatggccggctgctgcactaggctctcgcacccgccgagcgaagtcgcgatgaagggcaactccagcgcgtcgacgaacctcatcgccccgcgcatgtccgacgccacctcgaagctgatcacgccgccggcgccggtcatctgcttcctcgcgacgccgtgccacgggctgctctccagccacgggtagttgacacgctccaccttggggtgcctctccagcagccgtgccacccgcagcgccgtccggttctgcgcctccacccgcagcgccatcgtctttagaccgcgaatgatcatgtacgctgcattctgaaaaaaaaaatatgtttgttgttgtaacagtatataagtgaactgtaacaaaacggttaggtattgctccccccgtttcaagttgtaaggcgttttgactttatttaaagttaaactactctaagtttgactaattcggtagaaaatagtagtaatatttacatcaccagtatagtttcattaaatttaattgaataaattttcataatatatttgtcttggattaaaaatattactatttttcttgtccacatgagcgcccacagcaaaataaaccggcacctttatgaagaaatagatgtcagttttagagaaaaaccgacatcaataatatataggtaccggttttgttccacctctaatttattatatgtgccaattatttaaaaaaaccaatagctataatatattataggtaccgacacctctaaaaactgggccaagctcctctctctccagcgtcgacggccgcactgccccactgtgagcggcggcagcagcaccctcccccatcgtgagcggctgcggcgtactcctcaccctcaagatctggcggcgacagcggtgtccatagccttccgcgggcagacctggtggtgacgatggtgtcagcgacttcccagtgttttgttaattaatttttgtgatttttgcggtcaatgttgttggttgatggatcaatattgatgaatcattagaatttttgtgatttgtgtgggtgatgttattgaatgtgggctgctttgcgagtgatgtggaactgctcgatgcattagcttgaatcgagatgtattttttttttgcattatggaaccttaaggtgccagttcctaaaccgacacctttgaggaggactcaaacatacgtgatgtctaccgggtgccagttaagaaatccaacacccataccggttgtaaaatccgtcacccatggggtttcccaaccggcaccaatcaccttttgcatagtagtgaatacactttttaagttttagttaattcttaattaacgatgtaataatcaaccgctccgttatatgtaccaagggggaaggttcccaatcctcttaaaacaagaaagctagccaaagggttactggactgatggcgccgccaaggtcgtggtgccacacgcgtatgcgcgagatgagctcctccgagccgctgacgcagccggcgatcacgtcgtggtggcctgcgatgtacttggtgatgggagtggaggacgacgtcggcgccgagggtgagcggcttctggttgatgggcgacgccagcgtgctgtcgatgcacaccagagcgccccgctggtggcacagctccgcgacgcgccgcacgtccacgcacttgaggtgagggttcgtcagcgagtccgcgtagaacatcgttacctgcacacatgtacattctcgatcgttagaatattttatccatgtgtgtgtgtctgtgcatcggaatatcgggggttcgtgtgtcacgtacattgccctgatcaagaacggattgcaacgcctccatgtcgtccagatcgacgaacgtcgtctgcaaattaatgaaacaatcgacatcattcaatctgcaaattaatgtcatagtaggagctatatattgcaatggtgcgtgtatattaatatgagatttactctggtccaacaaaaaatatctcgaggtaccggtaccgtacggtattaaatcgtttctcaatgttggatctagctgggtaggatgggtattgttagatccaacgatcagaaacaatttggtaccatatctcaaaatactttttgttggatcggagcaaatctctattaatatagcttaccctaatgcccattttggagagcctgtcacgtatgaaggcacgcgcctcgctgtagcagtcggtggtggcgacgacgtggccgcccggcgggacgacggccagcagcgtcgcaacgatcgcgttcatgccggaggaggtgacgatcgtcgcctcggccttctccatggcgctgatcttgtcctccaggacctccacggtggggttgccgtaacgggcgtactcgaagctgtgccgccgccgccgccgccgcccgccgccttccctgaaggcgacgaggtcggccgagtcgcggaaccagcgcgccgtgccggtcacgatcggcgtcgcgatcgagtagtccgtcacctccgccgcgacgccgccgatcgcgcgcgcgccgccgctccccggcgtggacgacgagcgtgtcgtcggaggtgtgccgccggcgccgctgcggcgtcggagcgtcatcatggcgatctacgtcgtcgagggtagtcttggaagtccggcgaccgagggcaaagcgtggcaccaaagatatcggcagctccatcaacggtggcgagaagaaccacgtacacctcggagttaattaagctcagggtcagggacgagcgcggccgtggctacgtgttcagccttgcagggacaaacgacgagggcacggtgcattcagtgcatgtgccgttgtagtgggagtggaattgtaattagctgtttgacgtccacctgataattgtttattaagtactaattaaatagttatgaaattgctaaacactattatataaatgattttcttgcatgagcatccattagatcgccggtgggccataagtggctgcacctgcaaaaaaccaatccccaggaacgggttgacctaccacacgtcaaggggggtggctgaagtgcggtcagccgcgagcggttgcacccgcgcggcgcacctcctccctttagcctcttacgtatctacgtatgtagataatacgaatgttatacatatgtatacaaagtatatacatatatatatacatacactatatatatatatacacacacacattgacgtataaaaatgtatactaaattgtatatatgcatataaaaattttatatacacatgtatacaaagtttgcatacatatgtatactaactttgtataaatgaaaaaaatacaccatatatagttcgtatacatatgtatgtatacaaactttatatacataaatattaaaaaacaaaaaaagaaaaaaaaccaaaaataccgaaagaaaaacgacaaaacagaaaaaacctaaaaaaatgaaaacacctgaaccaggctaccacttgcgcccctcccccgcgccgttccaccgccgccctctgcatgcacgccacatagctgcgccgcacgggagaggcggcgcgcagatatccttgtattagggatttcgcaagcgaagaccgattatcatcagcggtcgcttaagaggcccgcacgcgataacgcggccaaatctcatgcgaccttcttaagcgaccgcatgcaataatcgatcttcgcatgcgctcccttaattaagatacttgtaggtgattatggaccatatatcttctcctagcctaagttgccgccatttgaaagcgatgtttctctctctaaaacgaagatataaatagggggaggtttttcaactcgaaatatttgcttgcaatccatataaaaagttacatgcttcatttcctctttcatttgccgccttttatttctcagtttattggtgaaatgtgacaatttttatagtttttttaatggaattttaaaaactattttgctatatttagtgcaaatatattgtttagatgaccaaaatttttattctaatcactagttcttgatgcttcaatgtattgtagtttaaatttttaggagatatttgtttttccatgatgtgtgagaaacacatgcactaaaattttattcgtactgtaattatttataaattgattgggcatggatgtacgagacgtggataactcatccggcgttcatgaaggaagcatcaaaatttactgatcaggcaaggcatatgccccgagggagaataagagggatatttttctgtccgtgctttgattgcaagaatcagaaaatgttgaaagatccgaagataattttgaagcacatagtgaagtgtggattaaggatgattacaagatatggacatatcacgaggaagttgccattcctaaagagactcttgatatatatttccttcgatggggcagaaaattttacaatagaggacatgtcccgtgatatggttgatgaatttggtggctcggatattgatgatttagatgctgattttgatttagaggatatgttatgccatgctgaaccagaggttctaactggtacaatgcaatggttagacaattgggaggtgttttataaatgagcgaaggatcttctttacgacgaatccaagacatgtgataaggattatatggtgctatgttatgtgctagagcttctcagattgaaagctagacacggatggtctaatactagtttcaacgatttgatgggtctattgagagttatggttcctaagcctaacttgttgccattcaacacgtatcaagcgaagaaactgattttccattatctctaggtgttcaaaaaaatccatgcatgtgttaatcactatactatactacaaggaatacactgacttggacatgtgcccaacttgtgggacgagtcggtacaaaagggtaacggggcctctgatagtgatgttgtcgacccagttttgttggtggatacaaagagaaagattttggccatggtgatgtggtacctgccaatgaaagatcgcatgaagcacatgttctcaaaccctatcaatgtcgagttaataagatggtatctaaagaatcagaagatagatagatgatatgattctgtagtagtgaaaaatctgtagtatttttttttcaaaatacttccaaatcaaatgcaactacttgtagtgtaatacaatataaagttgcattggaatctctatataacttataacttaggaacaaagttgcatatattttttgtaacatttatatataggttatattaaagttatagtatagttatgatataattatattacaactatactatactgtagtacatttgaaagttttccacttcaaaatacttgtggtgacattttagatagtcccaatggttattaaaaagtttcgaagaaattgacaagatagattaatatgaagtatatcacttcacaaatatgctagatcaaattcaaattctacaagttgtaacaaaaataataaatttaactgtaaatatgtgtatactaattagaatttaatctgtcatttttgtaacatcttgtagaagttcaattcaaatttctatgtttgtgaaagtgacatatttcatataattttgttcatagctgtttagttgatataattaaatgggtggatgtccacgtaagttgaattcaaatcaagcgcgtaagtaagacaataataatgccaaagtattccatgtctccatctttttgttcgtttgcagatatggatattataaaaaattgatggaccaaaatgtataaatgcataaattactctcacggtgcaaaatatttggtaaggtcaaatagataaaataatatttagttttggtgtagcaacttatctctggtccgtgcgaaccaaggcaaaaatagtgcacataaacgaaaattatctgaggtggcactcatattgatggtacgtagacctgcggtacatagttgtacactactaagaaaaagacacgtatagatcggcactataggtgttggaatagctaaaactggcagccgagccgggagcctagtctgaacttttttagcgcaaagcggctgagagaggggggcaagtggataagccccacactcgcccatctctctctctccccctcaccccctcagcctctcctcccctccatctcccgtctccgcggtccctccacctcccctatccacagctctctctctctctctcccctaccctcctcctcccctctatggcgtcaacaacggttgggcggcgtaagcggtggctccaagcatggatctggcgttgttggcaagcggggcggcgtcagcagtggatccagcatcggtggcgtgtaagatagaatcggtgacggatcagacatctgtggcatgcgaggcggcatcagtggcggtcgggaagcagcgacggcggctcctagcacggatccagcgtcgctggcaagcggggcaacatctgcggtggatccaacatcggtcgcatatgggatgatgtctacgttggatctggcgtctgtggtgtgtgaggtagtgttggtggtaagcgggatggtgtccatggtggatccggcatcggtggcatgcggggtggcattgctggtgtgcggggcaacgtcagcggcggcaggggcgatgtcaacggccattcccacaacatatcaagcatcatctgcgtcggcggcgggcgagatagtgtcggctaccgttcccgcagaggatggtgaaatgttcaaatacagcaaagtgcaaaatgaataaattatggcctacaacaaagcccatcatgcgtcgtcttcctctatttcaatgattggatccgtcttcttcctatacagtggttatatccgccttcttcctccactatggtgaatggatccgccttcttcctctggcatcacctcacgtgtggccagacggagatcattggcagcaaagtagacctccataatgagagaaatcaaatcgtcacgatacgagaggacttgcttgatttgtcgccatggtggatgagatctgcccacacacaacgtatattgtctcacttgtatgaattgaggcaccacgggaagtgcggaaatgtagtggagggtcacgtcttatttttgttcccgtgtcggatgtgggacatacatcatttccctatagcaaaaccaacatcttttatacaagtgaatttcaattattgattttctttgttttttatttttttgattaatctagatgcataattgtgcttatatacattatattgtctaatttcacattggtatgaatttaaaccaaagcatacattatttcatattggtaagaatggtaagaatttaaaccaaaacattcttttttttaacatttaaggatggaaccttatttgtttcaccataagaaagaatatatgtaagtgtgaacttgttgatcacgccaaagtatcgctgcctcgattaccagctatgtttcttcaggaatcctactttgtgcacgttacctagcaacggaattagtgcaagccttatccacttatcctttccccccatcgctcgatccctttcatccatggttcctcctgtgattcttttcttccttctacggttctcgctttgtcacctcccggccggtgacgcaactagcttgggcaccacctacttacccctctaccttctcttgaactagacgatggcgagctaatagcatcctggtggcatgcagcacatatctttttcatctcttcagcaacactttgcttcaccctaccccgcctcctccaccacggcatacatgtaagcctagacttttgtgtttcgatgacctcctacctagcatgctgattcaccctaccccctcttcctctaccacgacacgaagagatgcttacaaccgtaggctcatccttccgagtgacatgtaagtgcctcttttttttcctcctctttatctgatccagataggagtatccctagaaacttccactgatttgagtataaagttttcagttgaaacatttcaaattgaaataattttgatttgaaagtttaggattttgggtagaaacttttgaatttttcaattgataagtttttttagaaagaatgaatcggtagttatagcccacaagtttaaaggttttatatttttaattaaaaattttgccattttttagatgaatgttttgagattttagttggaagtttcatatttcagatcgaaaggttttttacacttagttgaaattttaattcagattagcaaaaatgcttgtgcgttgcaacaagtgaacataattttcatgattgataaaaactctaccagtttaaacgacaaaccgaaacaagataaacaaaataaaggtaaagcaaagccagaaaccatatatagtattgaacccggttgcacttgcttcatgcatcatcacacaaaagaaatcccttatctacacatttccatagcctaaaaaatcgatcgggtcgctattccataagttgatacatgtgtattttgcagtacgttatcgactaaagattgagattttgattattcaaattagtgaaattctttttacatgtagatggaaagcatttgcaaagcaacaaactttctgcatacacaacttaataataatttcaaaaggaaaatattcgtgggagaaaattttgggagagaaaaaaagaggaaaaagataaaaggaggaggaaagagaggatatttgtaggagagggagaggacatgataattggaaaaaaggaaaaggagaaatagaaaaaaaaaggagagaaagaagacgttgtcgaggtaggggtgcacggcgccgagtggaggcatgcgggacggtgtggtgggatgatatgggtcagttgggttgggctgagagatggagggggaggggttgggctgggaaggggtgtcttttttttttataatgcaatagagtgccgacatttgatcaacgagctacaaccaattattacataagctcgcgctagaaaagagcacataaacaagtcttaaaaagcacaccgaaaaaacctaaagcaacgacaagctaataaaagcccacaaaacataaagaccctttaattattgaatcctatttgtaaacctccaaccataattggccaaaaactgcaagaccatcgacttaacaatgtgatatctagttttagctcggtgtcctcatcacacttttgtatctaaggctagaaccggagctaatacgttaccctaaagataacctgcatataagatgaattggatacaggtgactaaaactaattaaaaaaccaacactaacactgatgacgtaccaatttttttacgaaaacatcctcaatttttttaatagtaaagaagagattataaataaaaacagtggatctcaagttctatcccctccggggtactgcatacgcgagttaagttcgacgtgcggctgcacgaattagcagcccctatgtttcctcttacatatgatgagaatacgattaaatataaattacctcttcgcacatgatttaccataaaattccgttaaataatgtattcttttatgagtgatatgatcgatgatcgatacttttctgcatgttatttggttctgaaataattctaattaatgggattagcagtacagtatagaatgctagagggcggtacagacgttaggggataatgttacatcctgacccacatccggcggcgccgagcactaaaatctcgtcgcgccggaacttggatgccactaccgtcttcccttgggtcccacggtaggtagctagcgacaccaaacacagctgaatcctccagccaaattcgccgccaatttcttggatctagctagatcgtgccattgccacacgagaacctctcgatgacgcgtcatcatatcgctctcgtacgtccgaggatgcagactgatcgtcctgctatacgtacgcttgaatcgaaactggacatcgttggatagacttgttgggggtagttctcatcttgttgaatgccgtgccgctgtcgattatttctgagattctggccggccgcctccacgggtcgctaacacagcaccaatgatcgatcacctttggccattgtgaattagtttgggtggaaacgatcgcactaatcctgtgcgtcgccttcgtgttaatatatatgtgatgggaacagcccccatcgtggcgatacagagttcggcgcagctgagaacaaccgaagccgagattgatgaaacgactgcatgcagtaacagaaaacagaaaacaaactctaacaaacatctgttatcgcatgtggaggaaaggctaacctgatccgcatggatagactaacctaatccaaactaacctcaacaactacatgcatgcaagctgtcaggtcgtgatcacatgatccgaacctttcttgctaactaacaccctctctcaatccggacctaaccaggttcagattgcttttgaaattctccaggagtcttactgacagaggtttagtgaatccatctgcaacttgatcattagtggaaacaaaatcaatttctagaagtttctgacttacccgttctctgacaaagtgatagtcaacttctatgtgtttcgttctggcatgaaacactggattagctgacaaatacttagctccaagattatcacaccatattttagcagcttttggacttttaatctctaactctgcaagtaaagtctgcacccacattatttctgcagtggcattggcaatagctttgtattctgactctgtgctagatctagacacagtggcttgttttctagcattccaggagaccagatttgaacccagaaatattgcaaatcctcctgttgatcttctgtcatctaaacagcctgcccagtctgcatcagagaagccactaactaaagtagatcctgacttatgaatttcaagtcctaaccgagtgcattgctttaagtacctaagaatccttttcacagcaatccaatgtacagttgtgggagcatgcaagtattggcaaactttattaacagagaaagctatgtcaggtctagtaagagtcaaatattgcaaagcaccaacaacactgcgatagtgacttgcatcttcaggccctaacaatgagccttcatgaagagagagtttctcacttactgaaagaggtgtattagcaggtttacaatctatcatgcccactttcttcaataaatcattggcatacttgtcttgattcagtacaatgccattctgaaccttgcttacctctattccgagaaaataatgcagctcaccaagatctttgagtgcaaattccccttttagatcctgaagtaaagctgcagtggccctctctgaagagctggctacaatgatatcatcaacatataccagaacaaacatagttatatcacctttattcagaaagaacagagacgtatcagcttttgatcctttaaaaccaaggtccatcaactttttacttagtctagagaaccaggctctaggtgcctgttttaacccatacagagctttatcaagtttacacacatgatgtggcttagtaggatcctcaaaacctggtggctgtagcatataaacttcttcttctaggtacccatgcagaaaggcattttgaacatctagctgtctaagactccaacctttagacactgctaaagacaatattattctgatagtggcagctttaacaacagggctaaaggtatcttcataatcaataccatacctctgtttaaatccttttgctactaaccttgccttatacctatctagggtaccatcagctttccttttaattttatacacccacttacagccaataatatttctccctctctgaggaggaacaagatgccaagttttattcttaactaaagcatcatactctgaatccattgctagtttccaatttttatcctttaaggcttctaaatcatttgtaggttcacctgaagcagtaaaccaagaatgcttatatttaatagtaccatcagtatataccttttccttgcgaactccactttgcaacctggtgcgcggtcctgccggtgcctctgaacctgtgtcagtcacatctgcatgctgtaatgtattagtctcatctgtgacagcctgtgcatgttcctgcgctggtgaggactgctcctgctcctgcaccacctgcgactcctgctcctgcaccgcctgcgacactgagtcttctgctgtctcctctgctagcgatgatgctgccccccgtggcacagaaccaggtgtgggacccggatgacggcctgatgacgtggccgcaggggagtggtggacgacacggtctggttctggaccagaactggcatccagaggaggcgtcgccggcggatcttctgcatcagcgggatgtactgcaccatctctatgtggctcattagcacgattagataaagcagcagaaacatcagcagataatggattagtcactggatgcatgcattgttcattcccaacagaccgtatgggtcctagcagttcaggagtgagaatatcaatctcagaacgaagacgggcaccagcattggcatgaagttcagtgaagggaaaaatattctcatcaaagacaacatcgcgagaaatatagatgcgtcctgtagagacctcaagacacttgaaccctttatgcatagtgctaaacccaagaaaaacacaatgcttagagcgaaattgtaatttgtggttattgtaggggcgaagattaggccaacaggcacaaccaaaaattctcaaggaggagtaatcgggtttttgtttgaacagtttttcaaggggactaatattatggataactctgctaggcacacggttaataagataagttgccgcctgaaaggcttcatcccaaaactttaatggcatgaatgcatgagataggagagataaaccgatctcaactatatgacgatgttttctctcagccgacccattctgttggtgagtatgaggacaggaaacatgatgaacaatgccaatcttagaaaaaaaagagttaagggattgatattcgcctccccagtcagtttgcatggctagaatttttctatcaaattgacgttctaccatgacttgaaactcctgaaacttgtcaaacacttgagacttatgttgtatgagataaatccaagtaaatttactaaaatcatcaataaaactaacataatatttttttctcccaacagactctggagcaggtccccaaacatcagaaaagacaagttctaaggggtgtttggaaacactggaagaaataggaaaaggtaattgatgactctttgcttgttgacaagcattacaaactgactcactagacaaatctgaacaggggaggctaaacttattgactacttgtttaaccgtggtaatggaaggatgaccaagacgatgatgccaccggtccaaagatagtttgatggcactgtaggcttgcttcaaggaggagtgtggtagaggatatagcctgcgccatgatcttcccttaaggagagttttcctggtgatttgatccttaagaaagaaataatcacgatgtaattcaagaaaggcagagttatcattaactaagcgatgtactgaaacaagatttttcttagcttgaggcacatataaaacatttctaaggtggatattacgactattgggattatgaacaatagcatgaccaatatgactaatatccatacctgcaccacttgctgtgtggatttgttcaccaccgttgtatttttccttcatagtgagcttgtctagctctcccgtgacatgatctgtagcaccagtgtcgatgtaccaatttgtgtcaattccataggagttaaccgctgcagctgcaacatgcttggcgtcaggaacgtaatcctcgtcgtacctataccaacaatctgctgccgtgtgcccccgtttgaaacacacttggcaaattggtcttttatcaacgcctcctggtgtgcggcctcgaccacggccacctcctccgttgccgcgaccatggccgccgccgtcgccgccgccgcgcgaacctccttggccaccattgctgttgccacgccccccgtggctgaagcctccacggttgacaacattgacggtgacctcctgtgcgccgcggtagatggcttggcgagcttcaaagttcaacacttgagagtacagatcactcacagagattggttcaacccgagcgtagacagccgacaccacctcgctgtagccctcgccaaggccggtgatgatatactgaatcagctcctcttcatcgattgggcgacctccggcagtagccatctcatctcctaaggatttcatttttgcaaaatactcaggagttgacatgttacctttctttgtattggtgagagcaaaccgagtgttaatcgctcttgctcgtgtgtgggtggagtacatctgctcaatggcgctccacacttcagccgcggtgtcgcatgtagcgacctgcatcagcacctctcttgtcagcgacgagagaaggtaccccagaacttgctggtcggtggcttcccagtcttcatgggctgggttcggctccttcttggtggcgccatcttttgtgacagcgatctctgccggcggccgcttggttgcgccggtgagatgcccctgaagccgcgctcctctgactgcggcgcttacttgcaccttccagagcgcatgatttgccctcccaagcttctctgagattgggtggccttggaacggatttgtggcagccgtactggacgacaaggccatgagtattgatctcttagggaattgatcaacgctctgataccatgtgaattagtttgggtggaaacgatcgcactaatcctgtgcgtcgccttcgtgttaatatatatgtgatgggaacagcccccatcgtggcgatacagagttcggcgcagctgagaacaaccgaagccgagattgatgaaacgactgcatgcagtaacagaaaacagaaaacaaactctaacaaacatctgttatcgcatgtggaggaaaggctaacctgatccgcatggatagactaacctaatccaaactaacctcaacaactacatgcatgcaagctgtcaggtcgtgatcacatgatccgaacctttcatgctaactaacagccataacttcttttttctttttttctttctatatacaggagacacatgcacataccaatatacacgcaacatgacattcacatctcatgaatgtatctcctaacacacgctataaaagacagaaaccatcatcacaacccctatcttattaaaatcttacggaaagccctgtgtaatcactagtacagatcctatcatctgtgacgggctcaattatatctgtactacttgggccgtcagaacgaagtcatctcaattatatctgtgacgggctcaattatatctgtactcactctaagcccaagtacatatagcccgtcactgataacactcatctttgacgggcaaagatttaggcccgattgagatgacctcgcatatctcaatagggcctagacaccgagcccatcagatatgagggtcatcggtgacgggctccaaatatggcccgattgagatgactttaaagcccgtcaccgatgattcatatcggtatcgggcttttgttgatgcccgttagagataacttttacttaggtcatttttttatataactttttttctgaacagcttgagtttgaatttgaaaatatgacaacttcaaacaatatttttaaatactaaatgatttcaaatgaaaaaaattatcaacaacaaagttacataacataccaatatttacaacttctatttttattttggttatttttctatataaaatttttttttgaacagtttgaatttgaatttaaaaaatatgacaacttcaaaacaacattttcaaatactaaatgatttaaactaaaaaagtcatcaacaacaaagttgtataactcatcgagatctataacttttattttggtcatttttctatataacgttttttttaacagtttgaatttgaatttgaaaatatgacaacttcaaacaatattttcatatactaaatgatttcaactaaaaaagtcatcaacaacaaagttgcataactcatcaagatctataagttttatttttgtcatttttctatataacgttttcttgaacagtttgaatttgaatttgaaaatatgacaacttcaaacaatattttcatatactaaatgatttcaactaaaaaagccatcaacaacaaagttgtataactcaacaagatctataactttaatgtttgtcatttcttcatccgataaagtgctagtaacattgttcacaaaatttacatacatgttttatagtttataaactagatgagagatatgtgaattttgttaacaattttactatcactttgtcggatgaaaaaatgaccaaaataaaagttatagatcttgatgagttatacaattttgttgttgatgactttttcaattgaaatcatttagtatttgaaaatattgtttgaagttgtcatatttttaaattcaaattcaaactgttaaaaaaaatgttgtatagaaaaataaataaaataaaagttatagacactgatgagttatacaattttgttgttgatgactttttcagttgaaatcatttagtagttgaaaatattatttgaagttgtcatatttctaaattcaaattcaagctgttcaaaaaatgttatatagaaaaaatgccaaagtaaaagttatagatgttatacaactttgttgttgatgatttttccatttgaaatcatttactatcaaaaaaatatttgaatttcttatattttaaaatacaaattttatatagttcaatcaaacccggatggagaaatgaccaaaataaaaatggtagatctcaatgagttctacaactttgtttttgatagttttttcatatgagtttcatttagtatcataaaattgaattcgaaatttattttttcctagaagtctgatttgcctccttctcatgataatacttgctaaatatatatttgatccaattaacttggatttgctggtgaaatatgtgatcaaaatagatgttatgtgaatgaatgtatatgaataggggatgctagggtgtgacatccaggcccagggtttaatattattaatagaatactcataccaacaaattacaatttctttctcggaagccaatctccaaataacttggccgatgggtgacctatcgggaaggcacacaagtgaggttcaaatgggtgaccgaccgggaaggcacacaaggctaaccaaaaaacaaaatttattttttcgtggattatactcatctgtgacgggctataatctaggcccgttagagatgagagtcatccgtgacgggtgataatctaggcccgttagagatgagagtcgtccgtgacgtgctataatctagacccgttagagatgagagtcatctgtgacgggcttttgtattggcccgattgagatgtgtcatccatgacggccggatgcccgattgagttacggttttgaaccggatctggcacatatctttccttccaaagaaaggtgccgcaaatagttgccagttttaaactggatctggcaccaatctttccttttaaagaaaggtgccggtttcagctaaaataactggtacctatatatttattagacatatcagctatgagctcagaatatagcttatcctcttccgtttgagctgatcgagtaaagaacaaaggggcgcctcttgttattgctcgaccagctagaggatggggaggttttgccctaaattaaaattgattgctaaaaggttattttttttatttctcactctattccactcttgcttgttgaattgaactgtttgctatgtatacatataaagtgtgcaactgaaacaattatgtgtatttgttttctaggggtatttttttatctgctttttttattaaattagatccatcctcggatgaccacatgacatttttgaatttaagtattgacatgacggtagttgattttgtacataatattaattattaggggctttaaataatattcaaagagtattatagagcacaatgttataataattaaataattgaattgcttgtaaattacaaaatcctaactgtattattctgcgaggtttgtaataaacggtaaattattggatgcgactacacgtcggtcgcccgatggaaagctcgggaaatcgggcgaccgacgtgtagtcgcatccaataattaaccgtaaattacaaacctcgcagaataatacagaaaggattt

SEQ ID NO: 9842 - DNA, 50860 bp, Oryza sativa
tgttatcaccttaagatgttgcagtcttgtagtcaaacataaaaaagtatccacgtattgttgtgtaagaggtaattatcatatcaaaagtaaaatcacttcatacctggtagcgccgagcccgacattatgggggaagattgtagccttgtagacgttattgtgcccatgcacggcatcaataccgtagatcatcggaatacctagtcgggtcgaaagggcacccttttgcatttcattcaccattgaagcccaagcctgagctgatgcctgaggagcaggcacactgcctccaccactcagtacactacctgcatcacagcacaccaatgtcaaaacacaaaacatatagtatccagcatttcatcgttcacattacttgagcatgagtagtaaaccatgacacacctatgaagtacttggcaatctgctccgccgtggcattctccctctcgatttgggtcatctggccaatcttctcagcgagagtcatccggccgagcagatccttgacacgaacagagacgggctgcttcggatccttatacttgacatactgagcgctccccaacgtagcaaaacataacatgaggagaataacactgaacttgtgcaaactccccatcttggctcagtgtgagtgtctatctccaaccagagctgccaatatatagacctgtgagagaagcatatctatgagtgtaagcttttcaggctagtatgagggtaactacataggagcatagtagtgcacgtctcttgcttgaacaacaacatcttcaaacattagaatagtcaagactcaagagtctcttaggttgcaatcaaaacagaaacaagggaacagcatactcaaaacatggtcggtttttcaaacttgtttatccaatcgcatcaagttgctgaaaaccaacatgacttacaggggaaacaatcatgtacctaacctgattaattgaatcagccagccagcacataacaagagtttgaataagagcagataacgcagcatgcataaaacaaacgacaaaatcatgcacacacatacatacagcacagcaagactgcacatgtgtttacctgatatactcaacaatctccactaaaaagggataagcaaagcttaatccaaatgcacacgaatgcagaaacagtgatgtctcttcctgcaaaagatgagagttttttttttctgcaagctagcagcagcagcactgcagagaggttctttccctctcctctgccttgcttacgcttgctgcctgagaaaggtgaccatgtcctgaaagcaaagcaaaagacctattctctcttatagactaatgagagcactagtaggctaagcggctaacgaagctacgaactttgatctcccccgcgatacccgcgccgacatgaggatcgcattgcaacgaaaaaagaaagcgaaagaaatcagcaactttgattagtgccccagtggtcagtggacctgacgctaagccccggccactatcaacgcctagctaataccagcagtattctactagtacaaaccaaatcaatatcgaacagggaagccaaagccagccaagccaatcaagaacggcgacctccacatcgcccgcaagagggatgatatgcatccatccatccaatctggtgcaatgtcgctgtggataagatcagccaagagactaatctttgattattgctgttgaaattctcttctcacacgccggccacaaaactccacaaactgcttctacaggccgcgtgagagctgcagtcactgcacgctccacgcggccgcttgtgtgaggtcgctcgcggctcgaccgcgagagattcgttcccccattttatttttgcatcgtctcatcaccggcgagctgtgccgcggcggcgagtctttttgtcaagctcctccgggtgaaagggacatgagagctataaacgaatcgtttgtctaatcatgcgacggcggcttcgacacgggagggagcttgtgtgcactctgctttgccgggtcagaggctgcagattgagacagcttaacctcctccatataggagattagctcaattaaattaggagaaaattttggactcgcacgagcaggctcactaacacaggtcactaaccacctctagtaatacaaaatacagtatagtgcaagcatctccacattatgtatatcacatatataatatattctttttaatattagagcctgaaataattttgctccgttgtctgaaaaaagaaacagcacaagcatcttaacccataaaaaaaaaatcttctcttctttttctctctatctcaaagagagccaaggcagattagtgagtgagtccaaccagaattgcttaattagtgtgtcacaaatggggagggaaaagaaaatcatgcgaggttggcgtgcgggcaatcgatcgaaccagcggagcaacgagccaaaagaggaggaggtggtggtgagctggtggtcactctccactactccacaaacgcccaagccccatgtatttgttatgtattgtggcgtatctatccatctagcaagctagcttgctagcgatcgccatggatgggaactaatcaccaatccaccgtcgtcgtcggccactataccagtacgacgacgcgattgggcgatggctagagcgcacgaggcgctcgccaccacgcggagacaacgcgagggtagctcgcagatcaccgtcttctcaggcgagattttttttttgtttttttttggacgcgatagattcgcggtggcgtggcgcgcgtgttccggcgcaccgccgacacagaagttgccggagaggaagaggtcaaggagacacggtggaggcgagggggcgggtaccttgtgctcaccggaataccggccggagatccggcgatggcgacgtgcggcggcggcggacggggttggcgcggcggggcaggggaggcagacgacaataacgcgaggctttattgacaaccaactgcttgctctcagatttttttttcacttgcaactttttttcctgcgctttttctctctctctctctctctctttttatctccgagaatctacgcgacggcgacggtaattttgaccgtgcggatgtcgggccatgccacggtgtcaaaaaggccaactctcactgtccagtggggcccacatgcagctgtttcggttcctgcccacatgtcagttgcattcgtcatcgtctttttgtttaattttttttagttcctagtggacgtgggatctctgctcgggagttgtgacaggcaacctttttgttgctttccccggcataagtctcgccagtggactatactgtatttttaaccgtattcaactatttatcctctaactaaagaacagtgtttgtaccctgatcaagtggcaggtccgtgtaacgcgacactgtttacgcttttaattaatggtttgcacctaacgtagagacgttgggggcagtacactccgtagaagtagaaaaaagttcaatttgagccgtttcctttcaaatcaaatgtcccattttttgaacttatccaggaccgaccgttccaacggaaaaaaaaatggaaagaagacagacaaggtagtagatcaatgaggtgttactccaaggttttaatgtcgtcattaacttcggcgtcaacacacgttcgttgctacttctggcatcgcttgcctttttcgactgctctagtactagaaagaattcatgtgctggggtgttattacagctgctttgatccagtattcattctatcaagaaaagtactcacttatacgaatgaatatggataagtaaggatgtaatatctagataagcaccagcctatattcattcttaaaaagttgatttttattttaggatgaataaagctttcatagccaaatgatgatgcaagggaaaagaaatcaaaatcttgcagccttctcttagaaaaacgaaaacagatggaaagttcaaagtgagacagtagacagagcgatgcatgcatgtgatgttctctcatcttttccccacaaggggagtgatcttaggtttgttcaggaaagcttaaaattctgtgagagatagttgattagtagacagtttttgataaactggagaagccgagttttacagcttcttacctatagtttatttgttgaattctacaactacaacttctcataattcgaatgaaaagttaaattgctgaggaagcttctgaatccaaaagaagctacaggtgtcagaaacttctctatgtatgacttttattcttctgcttcttctatatcatccatggagtcatggaccatcatcacctttccttatccttccagccaggcatgctaagaaaaaggacttctctactattcgcatctcccctattaaatcccaatcacacaaatgcaaatacagaaatcgtcaaagcatcgtgcagtttcttttcactcttattttagtgtgcctgcagatcagatacagccggcgacgcatgggagtagatagtgttccttccaagaaaaaaaatcaatttataaaaataaatttgtacatatgtttgatcagattcaaaattagttttgtggatagtagatacactctccgtttaaaaataaatttaattatatatataaatatgacctcagtctatatttatattcatatataagttacttttatatataaatatgatcttagtctatatttatattcatatataaaagtaaatttattttgaaatggagactatagatatactctctccatttagaaaaataaagcaaacttctaactataactataaatctagatactccgtgttccggtttgtaagagcaagtttaatagtatagcccactattatcttcaattcatctatagtcaatctaacagccaattcatataatagttgcttactatactattaatatatggtcccacatgtcatacgcacattgcgtcttggagtccgtgctgcagctggctacagatatgtagcccgctactcttctctctcattgtttatctcattaaaatatgattgtagctggctaatagcctgctattgtacctgctctaatgagaaagaataatactacctccatcccaaaataagtgcagccgtggatatccgtgctcaacgtttaaacgtccatcttatttaaaaattttgtaaaaaaataaaaatatttagtcacacataaattattattcatgttttattatctaatagcaataaaaatattaataaaaaaaataaataaaataaacagtcaaacattgaacgtaaatagtacaaaactgtaattattttggaacggagggggttggcgccacacaggcacagcacgtatacgctgtcccggcactgctctgctcgtccgtccgcgccctttgtcgtcaggctcgttctcgtggctgcgtcgttgacaaaatttccttcagatcgcgtcagggtttgggctaccactaattgaaagatccagatcgcgtcttagattaacaaatgttccacggatcacgggatcgatccaagcagagtaggagtaagttaaaccagagagcagagtaaattaaaccagagtggctcagctcgtcagagaataatggcaggacaacgaggcgtctactacatgctcgtcagagaagttaggataaagcatgatgggatcacgcgttgttcacgctcatgcagcaacagtagtagtactacgatccaaccaaccagacgctgtctaaaaagaaatctgtcacacacgataggaatatcagcgaggacgtggatcagtacatactccctccgtagcgggacatttaacgtactcctacttgaaattttcaagatatagcaactaataatttgtcattcgctgcctatgacatactccctctgtcccagaatatatgaagttttagggttgaacacggttattaagaaagtaggtagaagtgagtgatggagggttgtaattggatgaatagtggaggtaggtggaaaaaataaatggtggagggttgtgattggttgggaagagaatgttggtggagaaattgttactcccttcgtttcagtttataagattttttagcattgtccacattcatattaatgttaatgaatttaaacactatatatatctagattcattaacatctatatgaatgtgggcaatgctagaaaatcttataatctaaaacagaggaagtatattttaagacaaatcctgagggcttaatattattatattttgggatggagaaactatgtattaagtgttaaattctctagaacaactcgtaagggtgacaaatagtagttaattattttcatagtagcgcattactccaccattagcatttactagagtgtcacattactgtcagtacatttggtaggtgaattaagcggagtactaaagtgtaacagctgcacatgcagtgaaggcccccggacagctatggcaggtgaggaaaatgcagggcgccacggaacagcgcacagcaaaggttgggcagttttaatggccaacctttcctcgcacttcgctgtagcagcactagtactcctacgtactagacccgttatcgctggcccattggtgagttgctaaatcacaagagagccttttcctcctttttttttttcagttggaaagatctgcaaaaaacaggaggctcacagcgaatccaaatccaattccacgatcacaattcacaacgtctccgttgcggctgcggctgctgctgctgtcgtggattaatgcccgtcattagggcggggacatgcagtgcctttgcgtgtcggtgccattagagcaggtttacgaagggtttaagctaaccgaacagcgtgggttctaccaattgtttccacgaattagtgccgtgttactactaaccatccttgtgcttaaactgcatctatgctgcagcaatataaagggagacaatgcacgcacgacgctgcattatgggttaggactcaagtcggcagcagcagcagcactggtgcactatactagtagtgcaggattgttaattagctacatggaattgactcgggtagatcggccgaccaatcaccggatccgtgaaagccgcgcattaagctttgtcacgcactggagtgaccattgcagccttcccatgcatctgaatgctgcctgaaactactacggtcactgatgactgaaagattgcagtctgtcttcactgtgtgctgctgctatacgtaggagtagagtacacctttccactttccagcatgaatgggcatattggcatcgtcgatttgtgccgccacagctggggggtgtgggccactgggccggggcgatggtagccgccgcggaatgggatggtgaggatgagaaggttccaggttgcaaaggccctaaactttagcgtgcacgcgttggtccatctccggctggtgccacacatgtaaaggggacgggccaaccagacgcgtcgcagccgagggcaccagcacacgcccgcgtgccgccgaaatcacacgtaataatgcggcgacgtgacaccaaaaacggcctgggtcgtgcgccattgttgcgcgtgggcgtgcgtgctgccgctcacggcgagtccgtgaatcgttttttcacgtgaaacgagcgaattcaagaagggctcgttcttttcacaggattttcaaaacgtaggaatactacagaaatatatgtgcaaacctatagattaaaaaacacatgaattttttctatgttgttgagcaagccaaccaaaaaaatacaaatattaggttggagtgaattattttttcctatgcttttcctttaaaaatggaggaatggaaaactttcctatagttttcctatggtacattcctatgaaacgaatggtagtttaaaacccattcctatttctatgctttttctttacaattcctttaaaatgaataagcccgaagttgttgtccctgaaatagctgaagccttggcgattagacgtgcgctgatcctggcacggggaggagggataccagcaggttatcatggcctcggactgcctctcattcatccaacgcttccagtctccaacgagatcgttctgctgctggttgcgtggtgagcgacatcaagaaagtcaagagttcattccttgcatgttccttcatacatgtgaaccgtttatccaatgtaggacacacactttggctcgtcgttctgagcacttactatgtactttttatcatatgtttgaccgttcgtcttattcaaaaaatttaaataattattaattcttttcctatcatttgattcattggtaaatacatttttatgtgggcatataattttacatatctcacacaagtttttaataagacgaacggttaaatatgtgctaaaaagttaacggtgtcaaacatttcgaaacggagggagtaatatctttcgctctgtgaccccggagtatatccgggagatgctctgtcattatgcaacttaatgaatagagtgtcgccattctctctctctctctaaaaaaaacgaaggccagcgagtgagcgagttcgggaggaccatctggggaatggaggagaagagacggtgatggccgtcccaaagcaggttcttcctgcacgaaaggccacgtcgttttgcttattaggggaataagccaaacaacaaatttataaaccaaaaaaataatttataaatatattttttatatacgtgttcttagtgatataaaagcaaatgctgaaaaacaaacttcaatgaaaaaaaacctcaaaatcaactctagatttaaagttaaaaatttaaattttggttgataagatgaggcggaatactactactacacggcaaaaaactaagaagtagacgaagcaagccttcgcgtcgccctctccccgggtgacacgggtggtgactaggccgtcgttgcccgcctctccctccctccgcttcgctctcaccacgcaggggcaaggggggcgctgctcggcatttgggacggcgcccagattgttataaaaccagccccgaaattgacatcggtagctaaacgcggaagaaaacgctataggagatctaaaacgatgacggcaccaagacacgatatttggtaacagagttcagccgtagcctacatcttcggggcactgattacgggcactcctccccgatccagcatatacaacgtattagagttacaacgactcacggctggtcgacgccggcagccgctccctctcgctatgctaagtcgctatgcggttacaacagacatgcccctatttatgagagatcctaggatagagtccgactcatactctagtcctaatacctattacaactccaagtcttaaactgtaaccgactatgtacacatattcgacacaaactctaacacagatccgtgtcatttggccggatctggtgggggagatgacggcggcggggttgtgtggaggggcggtggcgtttggtgggggtggcggcggcgcgtggaggtgatggcagcggtgaagtgactgccagatccgatcctggatctgggatctggcggggaagtggcaagggactacttctcgcgacggtcggcggcgcctggtgcggcggcgggcgaggtccgaccccgcgacggccggacgatgacaggcagcggacggcgccgttacggatggacacaccaatcttaaccgttgctgatggctcctcaccttaacttgaatgagctagtcgataaagttactactactcgtatactctctccctttgttccccatgttataagtcattttgagtatattctgagtttttttttcaaattaactaagtttgtaaaaactgtagcgacaattttaacaccaaaacaaatatattccgtggtaatttaaaattatagatgttgctatttctttctataaatttgatcaaataaaaaatgatttaagacaaaccaaaaacatgtagtactaaaacggaggggggaagaagagaaaaggactaggaaagacaagagtcactgcgaaggtgcaacatacaatgcatcgactcaagcaaataggaggaaaagggaaaataaaagccatatatcacatttgctatatccttttatacgaattgggaggttactattaactttttatatctttggtttgctgtaattattttgctttatgagcataggaattatcatgctgatcagagcaccttgcacaaaagattgatcgagctatgccgtaactcaatattatatcaccacttccaatgttttcatttcgtaaaaaagtgtgaaagtagctactatatgagaaaataaaactttataacaatgtgctattatatcgagctagctagtttaatcccatacaaagcaataatcggaggccaccaaaacgtaactgttgtatcgcatatttgtacaatttattaataatttataaagatttgaggattttcgaaccagactatactattggaggggcgcagtgataataaaacatagtagtacatctaatactctcatagtgtataagctacaacttcaattttagggctggacagaaacatatattatacataaagaaagaaagaattgagtagcaaggtgcgtaccggccggtcttggcatataataataaaaagtaaatcagcgataattggcggtgaatcgtcgacgaaaccaaggagctcgcgccggacgaaattcagcacacggcggtgggcgaacgccacgctgtcgtgtagaggcggcgggccgtaaatatttatgccgtgaccggatccacatagccaccatgttgatctcattaccagccggtaacggatcctttctgttttttttaactaagtcatcgggaggagagttttctcaactaaatatattacgtcaaatgatattacacaggatatgctatctgtaacggatcctatctttaattagtaatcgaatggaatacttgcccaacatgtaagttataagatattttaataagatgtataataattatgcatcgtcggacgctgatgtcttcgatgcactcagactctacgttctttttttctcactagctcgtgaaggctctaaagagtccaatttagaataaatctagtaagaaaaaaagctccctccgttcttttttctttagaataaatctattttgtttcttatctcttgctcccgattgtatcagaacatcccttaaccttaaaaccggatataacgtctcctcaaactttaaaaccgatgtaaaccgagtttaaaacgctctgcagacctcaatcttccatctattatatcatctatctattatcttattaaagtaataaaaaagaaagcctccacgttttctctcacggcctagaaattttcatattaatcagagaaaaagaaaagtagagtccatataggaatacaatttaaaaatagctgaaatttggaatttaaaataagaaatattgaaagaggagactagagtccatacaagtatacaatttagaattaactgaaattcggaattaaaaaaataggaaaactataagtagaagttagagtccatataaaaatgtaatttagaaataactaaaattcaaaatgaaaaaaaaacaagattgggagaaaagtttagagtccatatataaatatgatttataaataactaaaagtagagtccatatagaaatacaatttaaaaacagctaaattcagaattaaaaataaggaatattgaaagaggagactagagtccactcaagtatacaatttagaattaattaaaattcggaattaaaaaataggaaaactaaaagtagaagttagagtccatatagaaatataatttagaaataactaaaattgaaaatgaaaaaaaaccaagattgggagagaagtctagagtccatatataaatacaatttatcaataactaaaattcggaatttaaaataagaaatattagaaaaaaaagtctagagtccatatagtaatacaatttataaataacttaaattcgaaattaaaaaaaaacaaaatattgaaaaatgaattcagagtccatatagaaatacaattagaaataacagattgggaattagaaaagtagaaatattgggaaaaaaagtctacggtccagacaggaatttagaactagctgaatgtcgaatctaaaaaaaagaaaactaaaagtagagtttagactccatatagaagttgaatttataattacaaaaattaaaaattgaaaaaataagaaagatttgggagaagagtctagcgtccatatagtggagccatcgtttcgcttattcgcggaataagcgaaacgacacatttacaaatgaaaagtaatttgtgaataaaacttttatatacctgttcttagcgatctaaaagtaaaggctgaaaataaacttcaatgaaaaaaacctcaaaataggttaaaattcaaattttggctaataagcataagcgaaaagatgagaccctagaaatacaatttataaataactgaaattcgaaattaacaaataaggaatattgggaaaaaagagtccatataggaatacaatttataaattactgaaattaaaaaaaaagaaatattggaaaaaatgtctacagtcaatataggaatacaatttaccaataattgaaattcaaaatttttttaaaaaaaatattgaaagaagagtttagagtccatatataaatactatttataaataactaaaattcaaagctaagaaaaatgaatattggaagagtagtctagaatccatataggaatagaacttatgaataaaggaaattcgaaatttagaaaataaggaatattgaaatatgagtcttgagtccatatacaaatacaatttataaataattatcacgtatatacaatacattaaaaatatcacacgtttgttagttcaaccaagaatttaaaattatgttaccattttaatatattttaataataaaatgtgaaaatatttaagctattatatgagaaaaaatataaagatgctagccgcgcaatctgcgcgggccaccatgctagttattattattaagacagctttgaaaggagtcaccacgttcgctgtgggagctagaaattcccacgttaatcggagaaaaagaaaataagagtctaactagagatacaatttaaaaataactaaaattcggaattaaaaataagcactattgaaagaagagtccatataagaacccaatacgagattaattaatatttgaaataaaaaaataaaataaaatctgaaattagcaaaaaggaaaaaaagaaaataagagttcgagtataaatacaatttattttgctagtttttgattggcccacttggcacctcattctttaaagaaaaatcataaatttatactagagaaaaaacacctaacaatcatatgtgaggaaaaatctagagaaaaatatcacatatagattctagaggcttccaaaactatcttccctttccagccacatgaacttctactcctttgctttctataaatataccacgcctacacgacactactcctataactctaaaatatatagaaacccaaaattattaagcaaaaaataaatctataacaacaaatttacattcatttcccttctttaaatatcctacgcctactcgatactactcatataactatagaatatatagtaaacccaaaattattaagcaaaaatttggaataaatcttgagaaaaaaaagcttactccgttcttttttttagaataaatctattttgtttcttatgtaagctcctggttgtatcacaacatcccttaaccttaaccttagaaccgatataagtctcctcaatatttaaaaccgatgtaaaccgagtttaaaaagctctgcagacctcaatcttctatctattatatcagctttgaaaggaggtaccacgttcactgtaggagctagaaattaccacattaattggagaaaaataaaatgagagtccaactagagatacaatttaaaaataactgaaattcgaaattaaaaataagcaatattgaaagaagagtccctataagaacccaatacgagattaactaataatcaaaataaaaaataaaataaaatccaaaattagaaaataaaataaaataaaaattcgagtataaatacaatttagaaaaagtagtactgctcatgtgccacgctactttactaaccgtgaatttttctcaacttttattttttcactggatgaccatcgaaacttctagttaaccacgaccctcttttgtctgaaaaaacagaagaaacatattagtatcaagatctatccaataaaggtccacgcaaaaaaataaaaggaaagaatgatatgccaagtgggggttgtcgcaaatgcttgactctcactgcctgagcacctttatagccgtcgccggcgtcgctactcacaggaggactagtgggaccgctgccagcgcctcctcccgccggaccgccgtctccgctgcccgtgcctcctcccgcaatcagcagccaccgccaccgctcacatgaggacaagtgggaccgccggaccgctgcccgtgcctcctctgctgccgatgtaaccagcgtatcctccaaaattcatccagggtaagggtcggcgacaacgaaagtcttgtcggtggtgtcgttgacgtgttctccaaaattcatccagcgggtcagaatatctcataagtgagtgatttttgcaaggtgtggatgacggggtgggggttagcgacgacggaagtcttgtcggtggtgtcgttgacgtgttttccgaaattcatccagtgggtcagaatgtctcataagtaagtggtttttccaattacatctttgccctttacattgcgtatctttttcttttagagcttggttagtttttgaaatgatatgtcaaacaatagacaaaatccaagaaaatattagatactaactgattgaaacatagaattgaaacaacgtttgcatccagcgggccctttacattgtgtatcttttgctttaagagctcgattagtttttcaaatgatctgtcaaaaaatatacaaaatccaagaaaatattagatgaactgattgaaacatagaacaaaaatggaattgaaacagtgtttgcatccagcgggtcataatgtctcatgtgttagtgatttttccaatcatatcttcgtcttttatattgcgtatctttttttttaagagctcggttagttttttaaatgatttgtcaaacaactgacaaaatccaaaaaaatattagatgaaacatgattggaattgaaacatattttgtagcaagcacacaaacacgacgcacaccaactaaatcggaacagcgtctgcaacggttgcaacaagcacacaaacactacccgcacacgcacaccaactaaatccaactagagtgaaaagcgtttgcaacaagcacacgaacacgatgcacaccaactaaatcggaacagcgtctgcaatggttgcaacaagcacacaaacacttcccgcacacgcaagggagatggattctaatagctcgattgaacatccatccgtttattgcatgtcaagtagatggttacgaaaaattttcaaaaaaattgacaagatagattaatatgtaatatatcactccacaaacaaacaagttcaaattcaacttctacaagttgtaacaaaaataacaaatttaattgtaaaaatacatatagtaatttgagttttgtttgttatttttgttacaagttgtagaagttgaattttaacttccatgtttgtggttgtaatatatctatcttagttcatattttttcaatttttttataactatttagatgacatgcaataaatgggtggacgtccactcgagcaagagaagcgatgagcagcagaacgttgaggagaaacacacgcacacatcatcatgagactacgatgagcagcacaaacacacgcaccgacgcacgtatgaacgcaaacaacgcacgcacgaacgcacacaacgcgcgaacacaagcacgctacgataagttgagaagaaacacacgcacgctacgataaggagaaacacacgcacacatcatcatgagactacgatgagcaacacaaacacacgcaccgacgcacgtatgaacgcaaacaacgcacgcacgaacgcacacaacacgcgcgaacgcaagcaagaagaagatgaacacaacgcagatgaatgaacacaatgcagatgaacaacacaacgcacaaaaagaacacaacacatataaacgcacactagcagatgagtaagggaagcgagaagcagagcgagcgcacacgacttaccctctcgattttgcgagaacattctccacaaccgacgccgtggcccgtgccgacacgaccactgtggcccgcgccgccgccattggaggagagggaaggaaagggagggggggtttatagttggaggaggaaatatttaagatgcgtagcgaataatgtagaaaaaaaatggtacgagaatcactcaccaataaaatcctactaatatttatttttaaaataccataccctcacactcattttacttttaaccgaacaatataatagtccatcagatgcaatgtttaacccctaactccggctctggctacacattgagataaaatgttttgacctctaactttggctatggcttggcttggtggttagtccgaacccaaatgggaacagcgggttgtaatgcttgtcgccgaaattcatcggcagctggtccaccgatttgaaccaagtacgtggcagcttgccggtgaagccgtgatccccgaacagcacgtcggcgacgccgtggccctccgtgccggggagccaggcggcgacgaacgcgtccatggcgccgatgtacggctccaccacgagcggacgcccggagacgagcaccaccacgcacttgacgagcccgcacacgtccttgatcaccttcggccccggcgacgggatggtcaggttcaggttgtccccctccgtctccgcgtacgggtccttccccaccaccaccaccgcgtagtcgtactccttggcgctctcggcgatcgagctcttgtccgggtgctccgtgtagtcgatcaccgtgctctcgtccaccgccgccttgatcgcctccaggatcgtcgtccctgcatcacgattcacattagtggcaaacgcgacggcgagtgtcgatcgagatcggaatcgtgcttgatttaccggcggtgacgttgttgccgccctggccttgccaggacacggtccagccgccgcactggaagccgaggttgtgggcgtggctgccggcgacgaggatcttgtcggccttcttggacagcggcagcacgggcttctccccgtgcttgccgttcttgagcaggacgagcgacctgcgcacggcctcgcgcgcgatctgccggtgctccttgtcgccgagctcgccggcgaggcgcgggtccgggagcgggttctcgaagaggcccatggcgaacttgacgcggaggatgcggctcacggcgtcgttgatcctgtccagcttgatcgacccgttcgacacctgcgtcgtcaggtcggcgacgaactccgggtagtcgtacgggatcatcaccatgtcaatgcccgcgtggatcgtctcctggatcgagtggtagtagtgcttgtgcggcggcgtcgtgatcctgtccaccgcttgccagtccgtgatcacaaatccctgcacattttttaaaagttcagttgaattttgaggagaatttgagaggttttagcattggttaccctgaatttcaacttgttcttgaggatgtcggtgatgaggaagcggttctcatgcatcttgacgccgttccagctggagtaggagatcatgacggaggcgacgcccttgatgacggcgtcgtcgtagggcggcatgtggatgcgcatcaggtcgtggaagctgagcaccgtgttgttctcgttgatgccgtcccgcgtcccgccgtcgccgacgaagtgcttggcgcagccggccacgttcatcccccccgccacgaacggcgtccccttggggtacctcgccggcgcgtcgccctgcagcccgggcaccattgccgacgtcatcagctgcaccagcttcgtgtcctcgctgtagctctcgtagcaccgtccccatctcgggtcgcggcaaacctgcacacacacatgcgatcgatcggtcgaacaccttgaacattacgtaaattttcactggcaacgatgtgttcgtccggtttgggcggcttacggcgacgcatggggcgaaggtgtaggggatgccggtggcgcgggcctcgtgggcggtggactggccgatccgcttgacgagcttggggtcgcgggtggcgccgaggccgacgttgtgggggaagatggtggcgttgtggacgttgttgtggccgtgcacggcgtcgatgccgtagatgatcgggatgccgaggcgcgtcttgagcgccgccttctgcatcttggccaccatctgctgccactccttcgccgtcgccttctccgacggcacgctcccgccgccgctcagcacgctcccttgcaaacacaaaacaaaacacaatgtcagtgtacaacgatcgaacgcgcgcgacgtcggcggcggccggcggcgagaggggcttaccgacgaagtacttctcgataacggcggaggtcgcgttggcgcgctcgatctgcgacatctggccgatcttctccgcgagcgtcatccggctgaggaggtcgtcgacgcgctcgccgatcggcttctttgggtccttgtacttcacgtactcctcccccgccgtcgccgccgccaccgccgacaggagaacggcggcgacgaggagacacaccggcgccgccggcgaacgccacatcgtcgtcggtgcagcacgcattgccaagaaacgcaacgtacgtgttgataagcaaggagggaggtgatgctaattactttttcaccgtgagttcgaagtaaatttatagcgcattgcaggggcggataaatctcgcattccttggggttaggctgttattacggttgcatctacggtttgttagggtggttagatcgatcttatctctgttcgatcgtcgttggcgtaagagggagataaattaaacccgcacgcccgcggtgattttttctgtttttgagtttgaccgtggacgtcaggaacgcgatcgaacggctggtgattgttcggtgggtgaatgaacggctgttgattgagaaatcagggcgacgtgtaatgtgatccactgaactgcttgccatcctaagaaagaaccggatcggaacgcattaactctttgtaatgttacttcatatgtttatcattattacatctctcaaaaatcaccctttttcttttctctaatactataccggaacgctttatctataatgatgtgtttgaataatggattaggagagctgggattgagaaatagaaatgagtggaggaatatgatgaaatgagtgagtagaataaatggctagcttattcgttttagaggatttgtaaagggaaattacaggaatattcaatcctttggaatgagcactatactatcattcgttttaaaggaatgcatgaaaggaaaaattcctatccctccacttttagggggaaaacaaaggaaaaaaataatccactctaacccaatgtttttaatccttttggactgtttgcaacccaaccatataaaaatttcctatgttttctaatccataggtttgcacatgcattcctatattacacgttttctgtattcctacggtttgaaaatcctacaaaccgaataagcccaagattgaaacttaccttttgaggggttgaaaatcatatcccaaacccattatccaaatatggcctaagtgtttttttaactctttgaaatgttatcccaaaaaacttttaaatgatgttatactggctgtttatcattatatctcaaaactcatatcatttttcttttcaaatgtacgcagcatgtaagcgcgcacgctaaaaatgcacgcatgcacctgcttttatcccatctaaaaaagacgtgatactttcgttaattcctaagaggaaggatttaaaggagactgaggaaaaataattttacaccataaatatgggggaaataattccacaacagcccttcaaatcctccttatttctcttgcgggtgggattaatcgaacaagttttagtatgttaccaatccactattagagatttttttaaacgtatgtagttgataaaacatataattgcatatatatatatatatatatatatatatatatatatatatatatatatagtatgattgtttgggtagaccgctggaaaaacataaaattttaagaagagaaagaccaaggaaacttttcattaggtttaatccatgttaaatttgctctaacctgtatggattaagatattccaagaaaaaaaatttctcttttggaacaaatgatattttgaggaattttgaaggattgtgatcatagggattgagccaccaaaaatcctttgaaactccttttgggttatctcatttcattgtaatttcgaggatttttaacatgaagtctaatctcatggagatcacacttgtgtgttagctctctccaaattcctttgatatttccctttgaagcaaccagacaacatgttctcgaggattcattggaccatgacattccaatcgctcgtttttcatattttcgtgttctagaattctgcgatccaaagagcctttataggattcaataatgtcaaatcctttgttccaaacggcatttaggagaaaaaaaactatagcattgaaatcctagtaaatattcatatgattttccatcaaatcaaaggaggccatatgggtcaaatctacggaactttatgaaaatttccaggttcattcttatgaaactcatgttgtaaacctattgtgtagtacagtagtatgtgccaaatctgtggagttttatgaaaaaaaaatgggctcctctggaacacaaaaaatttataaaatggtcatagaatttaggatgtattcctatttcaaactaaaatattttgaaggcatgtattcctagctttagaaatccatatatacggattattcatattgttcttatttagaaaaataatatatataataatattttaaaccaatgctatgcaacttgcaaattctagattagcatgatataagatgtggagttatgccaaattctacataaatccttcaaattctttcattccaaagaggcttagcacgttgttttcctacatattataaattattgtgggcacgctttccaagctccgtaactttttggaaagaaaattctattcataagttgcgtaggatatttgtttatacccttaaatattgtcataaaataaataatatatccaccatttatccattcagcccgtttaattacttgagcagtcgaaaactttctccagctaatcggagcactaactaatcaatctccagcaattaatcttgcacaagtccaagcaaagctagtacaaaattaaagaacatgttaagcgtgcttatcttagttcataggagtaattaggagtactgcactcccacacgatgatccatgtttacttgcgcgcattataattcattggcagttagcaaatagggaattctacgtaactgtagaattaaatttgaaaatatacctttttttcactattttatgtttatatacatgcatgaaaaatattttcacaaatataccttctccgcatattaggaatgcgggactgagacggtgccgctctgtgccgctcttccattctacgggaccggcggtccctcgctagagggcggtcccgcatcacggcgctgcgtgaccggcacggtccagcgtgaccggctcggtcccgcgcatcagtgccgcgcaaccgccctgcctccgcgcatcggcgccgcgcaaccgccctcgacacgctagacagtgcagctaggttgtgtcttgattaattctagacataattgagaccaaaattaacaatatgactaaccagctagcttgtactttctcttagaggaattaggttggaaatgatcgatggatggagctgaggagatcaggatggaataattagtaagctaagctagtgcctggagtatgtattgtggggtttgactggatcaactgcgtgtgtgcgtgcttgacaggtgatgcttgcatggagcgcatgcacgggacggttcgggaagcacggtcccgcgccatggcgccgcgcgaccggctcggtcctgcgcatcagagccccgcatgcgcccgccctccaccacactgccgctctcctgtgttgcgggagcgagcggtgccgcacagccatcctgcgtgaccgtcggtcccgcggaatggaagcgcggcaccgttttggtgccgcgtccagtcgtgcggagagatatatttgtgcaaatattttctatgcagatatataaacgcaaaatattgaaaaaatatatgttttcaaatttaattcccgtaactgtatgcccttactatagcatttcccttagcaaatactccctccgttttaggttatagcacgttttgactttagacaaaattaaactactttaaatttaactaagtttaatatattatctaaacatgaccaaagtcaaaacaccttatatccatatcatctcgtcggctttggacgccacgggattggccgtcatggggaagccgccgtggttgctgccgccgccgtgcacggagtactgctcgtacgtctcgccgtcgccccacaccgcgtacgcgtcctcgccgtgtatggcgtcgccgccgccggcgagctgcggcacggccaccctgacggccaggcacacggcgctcgtcacggcgacgttgagcgccaccacgaacgcgatcccggccagctgcacgccgacctgccggagccccgagccggcgcggccgtccctgacagcgtacgcgaggccgacgtagcgcgggtcgtcgccgaagaagagcctggcgaagcgcggctcggcgaggagcaggagccccgtcaggacgccgctgaggctgccggcgacgccgtgggtgtggagcacggcgagcgtgtcgtcgacgcgcgccaggaggcggctccgcttgtgcagcaccttcatggtgaaccacggccggagagccgcccatcaccatcgcccggcaccagcctggccgccggggtgacgcagacgaggccggtgatcatgccctgcacggcgctgatgacggagaggcggccgaagacgaagctgtcgaggaggagccacaccaggaggctcgtcgccgtgcagaggtgcgtgttcacgacggtgaccgacgcgtcgacgttggcggcgtacggcgcgccgccgttgaaccccgtccaccccatccacagcagcagccccgctccggcgagcgtgagcagaacgttgttcggcgggaacgcctccctgtccttctccgtcctcggaccgacctgtccatgatgcatggctccatcaccatcacactcaagccaagcatggcggcgatcgaacagttagtcgtggtacgcgccggcgaagccccggcgagagaggaagcccgcctggtcgaggccggagaggtcagggcggccgacgaacgggtgcgagctcgtcgccgaacgacatgcggaaggcccaggcgcaccagcagacgatcgagcaccgcggcgaaggcgtacgaggctgtttggtttgttcacaaagtttgccaaaggttgccacctctcatgttagacaagtttaaccaaattagtctattgtttggttcatagccacacttgtggcaagattccttcttatctattaggtctcacatgtcatcaactcaataaagtgtggtacaatccaattttgctagctaaggtgtggctcatttttttaagccacaacttaagacaagtgtggcacaaaaatatggtgaatggtggcaaacttagtatagcatctaaacagcctagagcgccatgaacgccgagttgacggcccacttcttcaccgcgccgcagtcgccgtacaggatcaccagcctcggcacgctctgcagccccaccagcgtcgccgccgctagcggccacgcgttgtcccccttctccacccactccggcgccgcctccgccgccattcgcggccacgaccgaggtgaggcgagggaaatggatttggaaatggcgcgaagtagaggcggagagcgagttatatatatatatatatatatatatatatatatatatatatatatatatatatatatatatatatatatatatagagagagagagagagagagagagagagagagagagagagagagaaggtctgaggtgggggaatcccggaagccgggcagattcctgagaggctgagaatagatgctttggaccacctccagtccagattctgttctacggattgcgaaattgcggcaggatatacgcatatgcgtcatgtttgatttctgaatcgaagtaaatttacataatttttgcaggatttagttcagttcctaaaagaatcatatgaatttcctcctttcttttctttttgcattgatagatcggatgcccaaataagtcaaagaaaaaactaaaatttaatttttcaaacttaatattgagattaattttaagatattacaatgtagttcctttttcagcattgattttgtaagtgacaagaacacgtaaaaaaattccctaataagacgggaataggagcatacgatgggactttcaaacaggcaaagtggcaaacggctcatttttcaagtcccagtgcaagatttaagtaagcaacatttagatgcgtgccaaatgtagtcataaatatttaagggcccctgaaatgaaaaaacataggatttttgataggaatgtaagttaggaatgtaagtgtaaaacagaggaattaccgtttgattggaaattggaccgtaggattttgataggaatgtaagtgtaaaacagaggattgcaaaacacaggaaaaacaaaggaatgaccgtttgattggaccgcagacaaaacacaggaattagaggagagataaagactcaaaggaaagtttctacctcatgttagaattcctccaaaatttgcatggcattaggcattccataggaattttataggattccataaaattcattcctttaatttaaagggctatatagaaaaaattcctatagaaataaaatcctctaaaattcctatgaatttcctttaaatcaaggggcgcctaagtatccactacagaagtaaccagtcgctgttgtgagtaaagaattcaagcaatgccaacacataccaacgaacaacactcactaccaatggatgagcattccaattaccgacagttaaattgctaagaacaaacatggcacaagcatagacattcaataaccaataatccataccgagtcaacaacatatggcccagaatatcactatcacctataatcaatttaacatcgacactacaaagaaaagaatggcgactctaaagttccaaaaacatgagatcctctatgtaccaaatctgacatggctcactggaaaaacctccccgaagaaaaaatgggaacagtgaaatacacagttacaagccacactgtcgatacactctgagtgaaggtgattgcacgatgctttatgatcgacttttctcccaggaagaagagcttccaaaaccaggaccacagcagctcaagcaacaacagcaggaccctgttgcagcataatggagaaataatggaattttaagtatgagaactcagaagcaaagtacacacacataacattgtagcccagcaagctacataaatagcccttccaatttgaattactatttcctctggtgagaaaaggctatgcatatcaattggcttggagcgaactttgcaagaagctattttgttcctggtgggattatgtgcctttgttctgccttcagcgatgctacttaggtttggccaaaaagttaacaaaatcatcacctagcagcacactatatgtcaacagtaagttcttagttaagattccatgctaacagtcaacctgttccagcattacccacccttgtttgcccctatttattcttctttgttctctccttctctgggttgagatattataacagatgattcttctattaagatcgtgaacttgtgatacatatcaagtctgagtaaaatatatccaggaaaatatgatgttaagttaatcgttcaggataatataataacacagcccctaacagaaagaaatggtgtcatgtgagagtttattaatgtgattgtgtagatgcaaagagatcctttgcacacactgaagcagcacggtaacagtcaaacctaaattatcaggcatgcctgatgcctataaatgacaatgcaaccgaaggtctgtttcatggtaatttattaattttgactaaatgaaagaggaaaatggaactgtagctcgagagttgctaaaagtatttatcagctgtagcctacatagagagtcttgattcatttactcagtagcaaccgatagttaagtttattattgacttactttcgctgttagattggacacagctatttggaacttctctcttgttcttgagccagcaacatgaccagccttagcaaccttgctgaaggcaccatttagccagcttgttccagcagacacatacctacaagtaggggaagatggaaaaaaatcagtaaagtgtttggagattcatgtatataaaagatcttatatattcctcctaaaagaatttaggcattataaaggtaatagatttcatcaaaattaaaagctactcaaccattacaaaaaaaaaatgttcattggttattggtacaacgtcaaacaaatttgttggctgaacataagcaaaagcatggataagaagagacctgttggttttcacagcagagccagtgtcatttagcttgcgctctgcagccagcaaagcagccattgttttgtcagaaacatgtagcctttggtctacagatttcactttctcatttacaactgttatcccgctgtttatcttctctgaaattccaacacgcttatcaaaggaattgatcttggccgatgcatttgccctcaattgatgtttctcatcgaatgctttagctttgttcacagcatcttgtcgcattgctgaaccccttgcaatcacagttgtcatgacatcatgagccttgctgacataaacacggccagtagtggggctggcattggcctatgtggtacaatgagatacttttgatcagcaccgatcataatacactaaataaatgtataagaaaataagcgtaggttcccaattgtcatgccaggggaagatgtcacacatgctgttgcacttgattgattcatccctaccacccacctactacaagttatgggatgctcctttcgttaaactttatcagtgcgcacttcccctggttcatgggaacttcatagtatgctacaggtctataccggggaaaataaaatagagtacactggaaatgaaggacacctcggtaggttggtccaaatctgcattaggagccgtacttgtcacctcaccgaccacctcactgaccacaagttgctgcatgattttcaaaacagatgtctctatgaaaaagacgaatcaaaggatttagtactgacatttgggtaacataaattagttggatggtgcacctggtcagtaacagggatgtagatgtagtcttcagcaggggttatgttgacaacccgatccacaattgttgctccctgaaaaagggaacttagaagataataagccataatccatactgaaaggggaagcttatcaaacatctatttcttttcagtgctgcaagacctaggtagcgtaatgagatttaaactgaatataccctaattagaagattcactggattgttatctgtgcactgtgtttcattatgacaatctcagttgaaattgatgcacatttatcagatttgcacacatgctgcacataaagaaatataactgggagcagatttcttaaatggcaaaacagaataacaaagtcaaatgatcacagtagtaacaccatataatatgctgctcacttccatgccaatcaaagcaggcattaatataaatctattttgtttttgtttattatagtccatggtcaatggcttctaagattttaccgacaacggaagaaagcaccgcctttcaatcatttgcttgccagtgcatgaaaccataaagcacacggttatgtgtaatcataggaagaatataaagcattcaagattcaatgtttttttgcatcaaaaatgccttcgattcacataatgatcctcacttacttttaggtcatccatctaatatgaaagagctccacaaggaacacaactgaatatttagtacataaacatttatgtgctctctaatatgtacatgcatgccaacaagttctataggaagtgtgacatattataataacgacaaaataccgtttatataatacatattttcctttttatcgctacacgctacaatattgatagcaaccgacacaaaatttggcttcttcagcgcctaaacaagccataataggcttgtagctacacataccaactacactattcacaatggcagtatgctaaaatactaaatcattcattaggcacaccaattgtgtaaccaccacaaccaatagcgaaaagtcccatccacaaacatagccaatcaatgcacagagccataccgacagcagcagcgcgatctctagggccttgggatccttgaacgtgacgtaggccgtcctccccgtcgccaccccatcgctgcaagcccaaaatcacaatgcggatttcagagaacacgaaaaagaaatataccacttctgattgctaaagcaatgcagaggcgcaaccattagcaatccgaacaaagaaatcgaagggcaaagcggcgcctcaccatctgatgtcgacgtgctcgatttcgccggagaaggagaagaactcccgcacctcccgctcccctgccagatctgagatgttccgcacccgcaccgtcctcaccgccctcctctcgccctgcaagcagcgaaccccctcacacgatcactcctcttcctaccgccgccgccgccgccgcggcgcaagaaaagaaaaaaccaagaaccgctcacctccatggttgctgatggcgcgacaccgaccgcgaagagcagacgagccaagaatcccggcgcgagcagcagaagcagggtgggggggaaggcttggtgagtggctgcgctggcgatccgggtagggtttggtgctcgagaggcgatccgcgttggctggttgggttggttggttggctggccgccgcggctgcgaaaaacttttctacgttttctttttctttctcgagctgttcgcttcgctgatcgccgagaaagttatttacgcgacacgaaccaaactccacctcggaggccgtaatacccgttctgcccacggccatatcacccacatggatggtacgaggggtaaaatagtattttcgcagggtcggggtgttacttgtgagacatgctggctgctgagtttgcttcgcggcggcgccatctctcctgacctgtaaacaagaccagtcttgcttactagtataattaaattaattaatattttttcgggtgattactgtattaagtgacctaataatgacacggcagcggctgggcccacactccagtcaccgtcagtgtggggtagtgagtggtataaaaccggtgtttaattttggcgcggggccgtggggttaatctaatctgatgggcgaggtgggccccccagggcgatgtgatatggtctcgtgcaaatggaacggtcgttggttgggcccacggccagctcggtcgggggtcaagtggcacatccgtcgccgtctgcttcccaccacggaatgatgacaagagctctgtattctttgcatgtgagagcaagtttaatagtttagccaactattaactccaattcatctatagccaatttaatagctcattcatacaatagttatatactacatttttaatatctggttccacctattatacatacactgcgtcttgaagtccatgctacagctggctacaaatctgtagcccgctgcccttctctctcctcatttatctgcttaaaatatatttgcagttagcttatagcatgctattgtacctgctctgacgtgagccatcttgccatctctctcgctggcgagcaggccctactaaaattcatattttctccgtctcagccagcatactgcgacatgtttccttcgctctaaaataaattaacctttaatatcctatatgagtttggttttctagacagggagtatgataatatttaatcatcttagaacagtaaatctaaacctaacctattaagttgtagtattttaagacgaagttttctccttgaatttctttgaaaaaaatatattcctcctcgaattatggtttgtggatattcttcagtcttcacaggaaaacgcgtggctaattacgtgttgaaagataattcatgaaattttatcccgaaaacgggtgctctccatttgcttatagatccttgtcaactaaaaataagtaaggtcgtgttctgcctattcctgtgtaaaacggcgaattcattcttgtgaaatttctttgaacgtctgatgaaattgtttattacgataagtgtgtcattatgtcactcgtataagtagtttatcacgatgaagtggaaattgaaaaacaagaagcaacgagtttagcatagtgcaataaatgccatggttagtaccatctcactatagacacaggatccgtattgtaagcactttactgcaacgcttcaatacgagccatatggcagcatactgccgggatatttattccattatgcagcatacgggtttagtaattgattgtactgtagaaattaatgttgttactacaacataggatcctacctatatgatgtttttttttcctatctacaagtttgttttttttcctatctacaggtttggttcttagtgtctgtttaattcgtgaaaagaaaatttttgggtgtcacatcggacgtttgatcggatgtcggaagaggttttcggacacgaatgaaaaaattagtttcatacctcgcctggaaaccgcgagacgaatcttttgaggttaattaatctgtcattagcacatgctggttactgtagcacttatagctaatcatggattaattaggcttaaaaaattcgtctcgcaatttcttccttaactgtgtattattttttaatttatctatatttaatacttcatgcatttatctaaagattcgatgtgatgtttttggaaaaagtttttgggaattaaacagggtcttatgccggagggagctacagttagacccagtttaaaacgtagggaaaagaaaaagacctagcactacatttaacatggacatatacttctatagttttagtttttggagtatctaaagttagacctgatttaaacgtagaaatttcacatgaatattccaatgctcacagaaaagaattataaacttatcaaggaaaggagcaataatataatccctatattccgttttgtggtgtaagtcatttttggtttgttataattcaaactttggaaaaataaaacaacattcctaacgcaatacaaatatcttatagcaggatttaatataattaatttagtgttatagatattgttacatttttcttataaaaacaccaagtttaacttataataaatccaaaacttattaccactccattagtggagcgatcagtactatacttgggtatcagcccatcaagcacctcaggtccagtctcacagtaagccgagccttggagaaccgaaggcaacggcccaacaagtctgccacgtggcccacgacggaagaagcccacgtcgaacaaaaccatttcagcccaaatctgaccggaagcagaggagcgcccaccgccgccgccgccgccgcctcctcgcctctccccctctcccgacgccggcgtccactctccctcccctcccctccccacctcctaacacatgcccgcgccgcagcagcagcagcagtggtagagcccagcctgcctaccctaccaaccgacgggcagtagcatgcgcggcggcttgcgccgcgggctgggcatcctcctcctcccgctctccagctcgcccagccgggcgccgcggccgccggtcccgctcgctgctctgctcgtctaccaccgccgcctcgatgtcttcgcccgccggtccttctgcagctccggcgggggctacgccgtggagcagttctccgacgacgagtacgaccacgagtacgaggatcaccgggtaccacctccgcgcaggcgccgagctagctttttcttccctttttgttcttctccagtttcgccatgctgagctatcgagtggtgaactggtgacccgcagccgtcgtcgtcggtggcgaacatcgacgagtggaggtggaagctgagcatgctgcagcgcaacgcggaggagcaggagatcatctccagagaccggagggatcgccgggactacgaccagatcgccaacctcgccaagaggatgggcctctacaggtcttccaccgtaattttgctatctccggttcataattcccaaatgtagatgtcgaaacattgaaatttgtggtttggtgttttctctgtggaacggcagtgagatgtatgggaaggtcattgttgcgagcaaggtcccgctgccgaattacaggccggacctggacgacaagcggccacaaagagaggtgagcccatgcattccactggcaagatcaaacatctttcccttatgcaaattgacggtgtttaaatactgcgaatgcctttgttatgcatggaaatacgcaggtggtgattccattaagcttacagaggagggttgaaggacttgtgcaggagcaccttgatcgtgcactcttgccggataaatgtggaactggaaatggttctgagatggctgagaaagctgagaatgtgaacctggatgagcagcaggattcccttctcgatcgatcggtcatggagaagatccttcagaggaagagcatacggatgcgcaattttcagagaagttggcaggtatgtcactcttgatatgactacgtaactttgaattcaatctggatacaggtttggattatttgaaaatgtttagatggtttatagatctgtacctcaacaatgggtacagaatttagggagctctctatctggataatttacaaatgcctggatacacatagattagagattccttctacagcatttagtgtaaaatttgccttatatctcatttcaacaattccattgtggttgatcatccatctatctgtaacaataggaatcacctgaaggagttaagatgctagaattccggaaatcacttcctgcatacaaggaaaaggaaaggcttctagcagccattgcacgcaatcaggtatatatactgtataattcacaacatatgtttatgagccatagaatctgtgtatactgcatacatgtttggcaattcatttgtctctttcaatttttctgaacattcttatgcaattctaggttatagtgatatctggagagacagggtgtggcaaaacaacccagttgcctcaatttgtattagagtcagagatagaatctggccgtggggccttttgtaatataatctgcacacaacctcggagaatttctgcaatggcagttgcagagagagtatccactgagagaggagagaatcttggtgaatcggtaagataaagctttcttttttcgtctcatatggtaccatgtcccatctctaatatgattaaggacaaaatgtctttactagattcttctattgtatttttttgtatacaatgctagtttttttaataggttggctacaaagttcgattggagggaatcaaaggaaaagacacacatttgcttttctgcacaagtggtatattactacgacgattgctcagtgacagaaacctgaatggagtaactcatgtatttgttgatgaaatacatgaaagaggcatgaatgaaggttggaagattgcattgtttcctttgaatttgctgagatcgtctttattaaactcctgataaagttgcattactttgttggtttctcagatttcttattgattgtcctaaaagacctattatcacgacgccgtgatttgaggttgatcttgatgagtgctactctaaatgcggaactgttctcaagttattttggaggagcaccaactatccatattcctgtgagttaatatcttctcatataaaaaaatatattacatctgacatctgtcttattcttctcatgaatgctgcttctatcagggattcacatatccagtgagggcacattttctggaagatatattagagaggactggctataagttgacctcaagcaatcaacttgacgattatggacaagataaagtctggaaaactcagaggcaactattacctagaaaaaggaaaaatcaaatcacaacgcttgttgaggtacattttcaatatatatatatatatatatatatatatatagagcgcgcactttcccaacattcttctgatattattattgtactatacaggatgcccttaaaacttctagctttgagacctatggatcgaggacacgcgattctctgtcaaattggaatcctgattgcatagggtttaaccttatagaagctgttctttgccacatatgtcgtaaagagcggtctggtgcagttctagttttcatgaccggatgggatgatatcagttgcttgaaggatcaactaaaggcacaccctttgttgggcgaccctaacagagttttactgcttgcatgccatggttccatggctacagctgaacaggtagttgcttctgatttgcccctatcttattgagattgcttgtgtgatacgagttaaaccactggattggagatatgagtattacataaacatattttatatataatgtatgcatctggactgttagtctattgatacttatttctgttagcatcttttgtgcatcgtataattcatgctattgacatctatgaatgtattatgatattcgcagaggttaatctttgagaagccacctcctaatgttcggaagatagtgcttgccactaacatggcagaagcaagtattacaataaatgatattgtttttgtcgtggattgtggaaaggcaaaggaaacgacatacgatgcactaaataacactccctgcttgcttccctcatggatttcaaaggcttctgctcgtcaggtaaaatgcccaactttgattttttttttgcttctcgtctttcagcagcagcagcataaaatggcatgtgcctgtacctactttcattattatttgttttcttgaactctctcgattttaaccttctgtatggtctagggggtaaatgagccaaaaaatagtttagggggttaggtgatccattgaactagttcgggggagtagaatggacttttttcaatgtaatataattgaacgtttgtcctgtttgagtctatagtattatattagtacttttgactcttactttgcagcttagcagctttttttatcattttctcgtggagggcatgccttagatttgtggttgggaaatacctatatttctgaacaagcacgtccatgtgtctcttttgcttatgagcttggctagtcgacctatcttttattttttctgcttcaataggcagcagaaatgtactcaatattaaaaatcagaaactttgtaacaagtgatcaaacttgaagataactccttaattcagatacactatactattgttttcctctaccatatccttctttgccatatgtctgatagtctccccattatcttcgtgcagaggaggggcagagctggtcgtgtgcaacctggagaatgctatcacctctaccctagatgtgtgtatgatgcatttgcagattaccagcttcctgagctccttagaactccattgaattcactatgtttgcagataaaaagtttgcaagttggcagcattggggagtttctatcagctgccttacagcccccggcaccactagctgtatgtcttattgtcttgggtggctacgggctagcaaaagggttcttgttttcaatcatctccgcttttttttttggctgatcaattgataaatatacaggtccaaaatgcagtggaattcctgaaaatgattggagcattagatgaaaatgagaacctaactgatctaggtacatctatcctacactttggttctttgctaacactgcaaaacatattattactgaaacctatttaatattccctaatccaactttgtaggaagatacctttccatgcttcctgttgatccaaagttggggaagatgcttataatgggtgcagttttccgctgcattgatcctatacttaccgtggttgctggattgagtgcccgggatcctttcctgctgccacaggacaagagagatgtatgccttgattttccactaattactattattaattgggagacactattcttgctttcatagaaaatttataaaaaaagggaagaattgggcctcaggctttgtgtattcattatggcaagaaggatgtgtttgattttttgtcctctatttgttagttggcaggaaccgccaaatcaagattctcagcaaaagattatagtgatcatatggccctagtccgggcttatgaaggatggaaggatgcagagagagaagggtctgcttatgaatactgctggagaaatttcctttctgctcaaacacttcaagccattcactctcttcggaagcaattcagctatatattaaaggatgctggtttggtagactctgatgcaaatacaaataatagtttgagccataatcaatcattggtccgtggtatcatatgttctggacttttcccaggcataacatcagttgtggtaaagatctgtcagactactttgtaaagttccattctatttgaaaacacaaaacttgtcagttaatttttgagctttcctttcagcatagagaaaactctatgtcgttcaagaccatggatgatggccaagttcttctttatgctgtaagttcatactggaacgtcttgaagttttcatgtgcaacaccctgcttactagcttatcacttgacctttcatgggagatagcccatctagggtgccatgtatagtgccttacatttcacagataccaaaattgtgctgatttatttgcattttacgctattccagaattcagtgaatgctaagtaccagaccatcccttatccatggctggtctttggtgagaaggtgaaggtaaatgctgtcttcatccgtgactcaaccggagtatcagattccatcctgatcttatttggtggtgctgttacaaaaggaagcatggtatataaatattaaatcttgttcaagtgctttatgacatttttgcatttctattttccctacctatataccttctaacctgtccatcataggctgggcacctgaagatgctcgatggttacatcgatttgtttatggatcctagcctgtgtgaatgctacttgcaacttaaagaagagcttgataaacttgtacagaagaaggtaagccatgcaatattctattgatttcgttccactagatatttctgttgccgagtcagcgtttaataagtatttgacaggcattgccaatgctgttatgacttatgaggcatgtataactaacattgcatatgctgctatagtgcgccaaatgttatttctcttaaatctgtccaccttctgtggaagctaggaacaaaggagaaaattcacatgcaatggacagagagacaaccttttgttgtttattgccagtcacttgaaatgatatttgatattgaaacatggcctgtggtacatcatcggttagggcaaaaaagattgaaactaactgtgcagtgtttttttttcttgatttcagtcaaattcttccgcatctattatatatcagtcatgtgtaataactctacgatgttttcaatctgaactccagcttgaagaccccagcttcgacatccacaaggaaggaaagtacatcttatatgccgcacaagagctcgctgcaggcgacctatgcgaaggaaggtttgtgtttggccgcgagacgagcagagcaaggctcagcagcagcgacgacaccaaaggcaacattatcaaggacggaatgaaccccaagagcctgctccagaccctgctgatgagggccggccacacccctcccaagtacaagacaaagcacctcaagaccaacgagttcagggccatagtggagttcaaagggatgcagtttgccgggaaacccaagaggaacaagcagctcgccgagagggacaccaccattgaagcgctgggatggctgacacagacctcagggacaaagcttcaggatgatggcgatgattcccctcttgacctgacggataacatgctgaagttgctcagtagaccgaggcggcggtccagaaacaattccaggaaatgattttcctgtcaaggacatctagtacttaggttcataagaagcccatgatagttttgttatggtgccatttttttgttggcctattggttggatgcattcgagcttggtttcaccggattcatcgccccttttggaattttgctccgtgtcgagcgtttagatgctcaaattagtgtgaccattattggttgcatcccttgaacatggttatgtaatttgttagtttgtacagcttattatgtatacaacggcatgatgtatgatcgagaagtgaggaaaaatggaaggtactggattttgcctgtactaattccgcattcactggcaatgtcgtgcatccgtaatccgttcgtgtcaaaactgaagcggctgccgccggcgaccacttaggtttgtttgaattgtaatcaaattttatcctatcaatattttgcaagtgttaaaaccttggcaaattttgatactttctagattgatagcgtagaatgtgtattatcatagacataaattggtaacaaaacaaacattcaaactctactattgaaacttaaaaaaaactaggactcactccgtttcacaatgtaagtcattctagcatttttcatatttatattgatgttaatgaatctagacatatatatatatatatatatatatatatagaaaatactaaaatgacttaaattctgaaacggagaaagtaggacaaaaattggttttcgagggaagaacaaaagttggtttcaatccaacccgtctccgcttgatcaggtgcgtcacccgtggcgccagcgtcaaggctgtggaccacaaaatgaaagagaaacccaaaccataattgccccttcaccacttgattaatttatcctctcctcgcgtcgctgtcgcgtctcccagttgttgggggagtgatagtctgaggagaagaatatcatgacacaactagccaaccaaccaaccaaccatccttttgcttttgcatctcacacttgtgtatacaaatgaaggaagacgaattacattccatctcctccccttccatttcataatccacccccaaaatagcaaacaaaaaaatatcttatcaataattaaatccctttttttatctgatccaaaacttttttttaaattctagaagctactagaaaaagtcatggggcgagagctgactgtgccgtgggctccaggccaatccaggcccaggaggcccagcaatttcttcccctctctctccttcaaagcaggagaaaagaagaaaaattgattgctctctcgttccgttccggaggagagagagagagagagagagaggagagcggcggcgatggcgtcgtcgtcgtcgtcggcgtcgagcaggttctcgccggcgctgcaggcgtcggatctcaacgacttcatcgccccctcgcaggactgcatcatctccctcaacaagggcccctccgcccgccgccttccggtgagactcctaccccgcgctcgctgattccctttctgccctaggctggggctggattggagctatgcccggcggcgctgctccggtgttggttggcttgccggtcgcgtggttggtcgctggccgtggaaccgtgcgtcgtaccaaaaaaagtgtgtgtagttttgtgtagccatatgggtgatgcgtggtaatcttagcagcgtactagttcgtctcaccatgcgatgcgggatgattctgtatcgatattggaagattttcgagtgctgtactgctgatgtctagcctgtaggcatcgattgatagagcgtgcagagtagagaggaggaggaaaaggaggcggaattgattttgtccttctgctgttaggttgtttgtgaacgagacgaggggacaaaatggtcttggctaaagacgagccaccattatcgaacactctgaattcttcggagttcgggggtgggatttatggtatcagatgctttttttgctgcatactgtctttcctgctgttcgttttagtcgagagaaatcaaattaaagcctgcagtgagtgaacaacctctccagaggtgttgaagaaaactttttgattagtaatagagaaacatatgaaaccaaaacagaagtccagtatcaggtgttggttgcaaacatgaaagcaacgttcaatcatatatgatttctaactggcacctagttccctaattgtttgttgaatggcagaataaactcaataccagactttgcacctttggtatttacatctctgcacacatttgtacaagtagcttcaaaattagtataactggatgattcgcttcccatccgcataccattcctcatatcttggcacttctgttaacagatcaaacaaaaggaaattgcagtgagcacaaatcctccagaggaagcagtcaagatttcactgaaggactgtttggcttgcaggttttctttactaccttgcactgttcattcaatcagcagcttgtccaaatccaaataatgctgactgtttcattttaatcccatagtggttgcataacatcagcagaaacagttatgcttgagaagcaaagcttgggtgacttcattactcgcatcaactctgacaaagctgtcatagtatcggtctctccacagtcaagagcatcgctagctgcattctttggtctttctcaatcacaggtgattaaatatttttttcagttatctgcttccctgtcaaatctgtccttataaaatgttttgtccgaaatgctagtttatttgaacataaccacgactagagatgcataaaggagtgcatttttatcatgaacgtggtaacaaaagcaggagcttaatacctttatgctcaggttttcagaaaactcactgcgctgttcaagtcgatgggcgtaaaggcagtttacgacacaagttccagtcgagatctgtccctaattgaagcatgcagtgaatttgttactcgttatcatcaaaaccagttatctagtggcaaagaagctggaaaaaatcttcccatgctttcatctgcatgcccaggtaaaattgtttgcagggtactatgtaatttaggtatcatgaattctgtacttccacataatgcttgtactctggtaaaaaatatttgatgtttagaataagattcactcaaacttttaaaattttgaccatcaataatttctcatcgaatgcttagtttaaaaacaaaacaaatgatatacatagatttacctcgaaaagtactatcataatatcataaacttattagattttataaactaattctaatataaaattgattgttggaattttaagttgggcaggatcttgtcctaaatgtccctttttttttttaccgtagggggtagcttattagttgcatcttattttataaacaagagtaagattagtgcacaaatatattcaaacctcttcaacttgcaggttggatatgctatgcagaaaagactctcggttcatttatcttgccttacatctcagctgtgaagagcccccaacaggccattggtgctgctatcaagcatcatatggttggaaaacttggtctgaagtgagcactttgccatagttgatgtaaaggtgttaccttcatattttatatactatagacccttaaatatttggacttacagttgtacatgaatgaatttgttgtgtaggccacatgatgtttatcatgttactgtgatgccctgttatgataaaaaactagaagctgttagggatgattttgttttctcagtggaagataaagatgttacagaggtagattccgtattaaccactggtgaagtgttagatttgatacaggtaactgatttttttcccatgtcctgtcttttgatatgcatttaaaaaactatgagaagcttataccattttcatgcttgtgcagtccagatctgttgatttcaagaccctagaggagtctcccatggacagattgtgagtccctagtgtgcctttagcccctttgggtgaagtcctaatagaattcaagttggaaagtaaaatcagtcattatctgttcaaccgatatttcagatttacaaattttgcattgaatttaatcactccttcaataaaaagtcaatagaataattcatgttgctttggataacatgctgtggtatatcacagttgttttatctgtcatatctggaaactcacatatacttacgttcattgttgatccagattaaccaatgttgatgatgacggtcaactatatggggtttctggtggctcagggggttatgcagaaacagtctttcgacatgcggcacatgttctcttcgatagaaaaattgaaggatcagttgatttcagaatcttacgaaattcagattttcgtgaggttacactggaggtgaattcatcctgcatcatgttggcctgctttcaattctctcttaagcatgattcaagtggccttagattaattttgtataacgtgtgttgtgttaatgcacaggtggagggcaaacctgttcttaagtttgcactttgttatggattcagaaatctgcagaacattattaggaagattaagatgggaaaatgcgaatatcactttattgaagttatggcatgtccttcaggtactcccatttatgatacagtgtggcttgcccgctttaagtaaatggttctgagccataggatcttgattctatgaccttaattgttcgcttgcaggctgcctgaatgggggaggtcaaataaaacctgccaaaggccagtctgcgaaggatcttatccaactactagaggatgtgtacatccaagatgtaagctagcgaaatctctcgctaaatttcatgctgtttgtttggaacttgcttttctatgctatgttatgttgtctcagcattggttggattcttccatgtcaatgtggagtagacctgaagcttcttacttgatgtatcctagtaaaaaaaaacagagagaataatctgacctcacagttcatttatggtgatccatcatgttgctgttaacatgccaatcaagtataactgtgtggtagtatgcaattcatatttaccgatcatcacatgtgcatatgaaatgctagctgtgatgcttctaggatctaattactactgtgcaaatatgttatgtttgctgtatgccagaatttccactaactgtaaagcttatggccttatgtaccaggtatcggtatccaaccccttcgagaaccctattgcgaaaagattatatgatgaatggcttgggcaacctggttcagaaaacgcaaagaagtatctacacacgaagtatcacccagtggtgaaaagcgtggcatcgcagttgcagaattggtgataacacagtggtggaaagcatttcccagtgtgggcagttgcttgtgccatcttggtgccctgcccacactaagcaaacactgaacacacagaaaagaaatacacgtcatcaaagattttgcatgcgggcaaatgaattttgttagattgtaggttttaccagcttttcttggtaatgtttgtatactacctcctcactgggaaacacagatgagattgtaacatgtaaaaacgaagtgaaccaaatagtagttgatctactcagctgataattccattgcaatttttcaaacagggcctattcgttagcatttatcttatgattccttaatttgttttatgtacaacagtgatctttttctcttcttctatgacgtgcgtgaaacagacgtttgtcttcttcattgaccttgatacagctttgccccgttgacatttgatggtgaagacatcaaagtgaactttgcaaagttgattaaaaattaaggagaagaccaactccgaggtgtgtttggaatccgcaccttcctggcccgtggttttgcatttggaatctctatataactctggagattctttggggaaacaatattttttagatgaagggaaaaacaaaatactccaatttggcagactgacattgcacagaaacaaagagaaggcctgcagctgaccgccgtacgaggctcaaaacagcaaactttatccttatcaagaaggccaaaatcactcaaaaataaacgatacaatttgtgctgcattttcatcagcaaatcagtagtaaattctacagaggttgaggttcagatgcaggctggaacatgtcggggagcgtctcgagcaggtaggtgaacagcccgcccagcaagaagatgaacacgaacgcgagcacgatcttggtgatgtacgctgccatcgtctcctggtcgcgaggattcttcgccgactgcttcgtgtcatctcgtctctgcatggcaaccgaaaattttattcagagaggaaatcgttgctcattttgttcttgatttccgagaagaaaagaggaggaaaaaaattttctgaacttcttgcataccgtgtcggacgccggcgtctggtagtaacccggcgcgtcctgctcggtgatggtctgcagcttccatccgtcgccgtaatcggcgagcggcgcggcggggccgaagctgacgggctcctcgccgtccttcacggcctcgacgtgcagcgccgccggtgcgccgggggcgagcttgcggttcacggcgtgcagcgcgtaccgcgccgtcgtcccgaacgcgaaccgccgcacctcgccggagctcctgcacttcacctccaagaactgcgagcacacacacacaccacccacattgagccaatttccttctcctcgttctcaagattgaggacactctaccgtagaaaaaaagtaagcaggtttaccggcggtggaggagggtcgccggcgccggcgccggaggctgccttctccggctcgtcgggcttccgctccatcgcgccgccgccttccgatttcgcgatggtcgcggcaaggcggaggaggagttgtggccgactgactttggcccgtgcgcgtggagcagcagcgaggaaaaaagcacgaaagaatccgctaccgggttgactttttcctatccgtttctggtccgggccgaatcgctcagagatttcggctcaataccacgcgggatccaccgtgatttcggcccaagattacgcggaatccaccgtgatttcggcccaagatcacgcggaatccaccatttcgcgagcacacgcgatgcgcacgcgcgaggcggagaccaaaccaaacaccaccgtcgcggcgcgtgcgtctcaccagtcgcgcgagcgagccgcgtgacgcggtggtggtgggcaccagcgatgggcaagggcggcggctgcatcccgagcaagaggcaccgcgccgccgcggcggcggcagcgccagcgtcgcactcgcaccagcgcgagaggacctcgatcccggcgccggcggcggcgccgcggccggtgcgcatctacgtcgtgttctactccatgtacgggcacgtccggctcctggcgcggccggtggcgcgcggggtgggctccgtcccgggcgcgcgggcgatcctcttccgcgtcccggagacgctgccccccgccgtgctcgcgcggatggaggccgacgacggcggcggcggcggcgacggcgaggacgtcatccccgtcgtggaccccgacgggctccccgacgccgacgggttcctcttcggcttccctgccaggttcggcgccatgcctgcgcagatgcaggccttcttcgactccaccgtgccgctctgccgccaccagcgcctcgccggcaagccagccggcctcttcgtcagcaccggcacccaggccggcggccaagaaaccaccgcgtaagtatccgccgccgccgccgcgagatcgcatccctctcgcatcagatcatctcactctgctccgtgaatctctctggctgcatgcatggatgaagctggacggcgatcacgcagctggcgcaccacgggatgctgttcgtgccgatcgggtacaccttcggggaggggatgttggagatgggcgagctccgcggcgggtcgccgtacggcgcgggcgtcttctccggcgacggctccaggccgccgtccgagctcgagctggccctcgccgagcaccacggcaagtacatggccacacttgtcaagaaaatggtgcacggtgcctcgtgatccgaatgctctaccaaatatggaatctctcgatcgagaatccttgcaattagactgagatttcaagccgatatcctccagaaattcagtggcattgtgcgaattgtgacctgactatcttgcattgccctgcctgttctagcatgatcagacccaaatgtgatattgggattatggaacagaaaaggatgcagacggtatgcataatctaggtttgtctaaaagaattacagaggtcatcaataaagacatcaataactgagaacgatagtgagaattaggcagaggtgacaatatatcacatactaatgtatagcaactcaaaactatgatctccaactccaagtcaaagaggactaacatttctaaagcagtaatatttccagttttggatgtgataaatgtaaacttgcaactacaccaagaacaaggggaaaaaataactcaggttcatcactctcatttcatcattgtgcactcctaaagagtttttaaaaaatcgcagattctagttgtacaaagaatatgtccaggaaaaaggtcaggggtgtctacatttctgcagccccaacaaatctaacattgcccaaccaaccccatacaacaaatgtctgccctacttttctttccccgaggaactattcctaatatatctaaagaaacactcgtttcccatgaaacatatctaatctgaaaacagtcttacacaatgcagcttgtaaaattaatagcatctcacttagcaggggtagcatttgttttattttgcatagtacttgcttgggggtcttcagttgtcttggatgaagcaccgtcaatggcaatgttccccaagttcacagccattgcatctctctcttcattctcaatcctctgtttctctgaaacaccatcatcggacgaattctgtgtcaggtctgatggccgtttaggctgccggcgaaggggcccgacatcaagccatggatgttgaagcagttgagcggctgaaggacgcttttcaggaacaaaatcaagtattggaacaagaaactctgccatgccatttgcatctatatcactgaattcatatttctcaaccaaaaccttgttgagcggccaaaaccgcaagcgccgaatgtgcctcaaatccccataacgattgaagaactcacgtgaatatcgaccacccaaggcaatctaggaaacaatgtctttgtattttatctataattcagaacaatttacatgaaagcttacgaagatggaaaatttgttacctttcgaggcatcattcctaatagctccatcatcagcgcgaggtgatcctgcttcaagcaagaattgatcagaataaacttccaatggaaagggatggcattctgtactatagggaagacaactagatttcatatctatcattatggttttgctacttgcccatatctatttcacacagcatctccaaacaatggcaggtgtttaagaattataaaaagattactcagagaacttttcaattagtaatattgctaaatgaaaagtttgaataaattcagcagttgatttcccacaaatatgaagtggtcaatcaactaggacaactgaataaaaggtttgagcttataatgcaacttgacaaaaaaaagcaattggcatcatgcattcatgtagtcaatgatatgttccaataccatataccacaaacttgaaatgtatttatcaatcacattcagaattcattcaatcaagataaccatatgacatacctgaaaagaactagcttagaccagtccttaacattacctttcatctgttgccgatcatttttagaagaaaactgtggcttttatcacattggtatgacttagtttcattctctctttttttctctcttatagactacaagttatagcttctgtagaacacgtgatgtagacgagtacgttcacagattttcaaaatgataaaatcacaattataatagtaaagtatgtatgccagagaccatgccaaactgccaataaccgaaacttcgtttatttcttgaacaaagcgagtttctaatgcataggtgcatgttattcatggttaaaaggaaagtgtcagactcgaatagccaagtacactacaaattgaataaacacatggcatagcaaagttttctcctgtcatcttatgtgctacagtacttcttccacgagtaaggaggaagagagggtgcgtcgtgtaattgtgtatggtggtggtggttggtttggtttggaggccttgtcaggtctcataactaagcatgaaaagaaaatatactatgtgttcaaaattattgtgaaacagtaagcaaacatgaacaagaaatgagctgtatcaggccggtaccccacaatgttttatgtatatcaaccttaccattgtccaaacatgatcgccttcaaaacgaaatgttcttatttacaatatttaaaatttgattatcattttttttctggaataattggttagattcctaccgaatcccacaaatctgagtcagaagatgcatcgaaatgctcaagctttattaagaaataatttctccaaaacaatctttgtagctttcattttatttgcttttggttatgagatcatggcacaattagatgttgacaaatatcaaatttcagagtgatgttccttttaagtattgtcacaaaagaaaacctaggtacatgccaaactggagttttgggctgtagccagtagatgtcatttggcttgatcactcaaatttctattgtgatagactcctatttttttaagctaaagtgttgacaggtgatagtttgagttaagttttgtatagatatgaaatgtcttggaaagaaataaatagacatacctcatccctgtcataactgtcaccactgtgcggatcaaatagcacatctcctgtggcaagctcaaagcatatgcatgcaaaggaccacaagtcagcagatgtagaatacttggatcccagtatcacctcagggcatctgtattgccttgtttggatatcacttgtaaactgtttgtatgtccaacatgcatttccgaagtctaccagtttgcacttcaggtcagcctccaatgccatttttttcctggtccctttgctaccccgtctactcccttcaccttcttctttcttgtctccatcctgattcggactaccctcgtttgccgtactcaaatttcccctatcatctgacccatccgtctccccagatgcaacagtcccacttccttctgaagttgcagcggctgcacgcttggctttcctccgaatcttcttcttttggttcctggtgagaccaccattcactgatggtgcatgtgcctttggaggaggatcatcagttcttgcagaaggtgccaccagcggcacacctgatttccgggggtccttcgagggatcaatagtggattcaagcaatatattctcaggcttaaggtcagtgtgaatgattgaaagtgtgcggtggagatagtcaaggccaatgagcacatgtcggcatatctccttaaccatgggaagtggaattccatggtaatccgtgtactttatcagggtcagcaaattatcaccaagaaactcaaacaccatgcacacatggttcccattaggccccgagtgcttgaagtggtcaagaagcttaacgacgcaccgagagtcatcaggatcaccatcggcaatctgcttcaagatcttgatctcatccatggccgcctctgtgtagtgctgtgcactcttctgcaccttcagcgccacatatctctgcatatatataaccaacaaattcagaaacacaaagggtatataagaacagatacatttcgtgtatgatgatggtgggattaacgaataaaacagtactcattaacaacgaaattagccattatgataccaccaaagcaataaaacgaacaggttgcgggtacaaacgaaaccgcccgcaatacaccagatgattaaaacgcatccaggtcgagatttcccacaaatcatcacgaatctaggaagggaa

SEQ ID NO: 9843 - DNA, 10477 bp, Oryza sativa
gggggggggcgaggagaggggattgggtggagggttcaattcaatttcgtcaattcgtttgcgcggcgcccgctgcggcccgtgcggtgtaggcggcggcggcggagcgctcgcgggggagcggcgttgtggctggggagatggtgaagaagaaaggcaagtatagccccggcgcgagcggcagcggcagcggcagcggcggcggcaatgcgggaggaggccccaggccgggcggcagggagacggtggtgtggtccgagaagatgaacgagtatctcatcgacgcgttgctgcaccagcaggcgatcgggaacaggggcgaggggaggtttcactccgcggccttcgatagcatcatctccggggtcgccgagaggttcggggtggccatcgacaggtcaaacatcaagaaccgtctcaagtccatcaaggagaacttccatgaatgcgagaacctcttccagaaccagagtggctttaagtggagcgcgatgaacaagaagttttatgctgacccaactgtttggagggagtacatcgaggtctgtttattttttgttgtcaatcaatcagcattgctgaaatttctcaagctgttttgaactctttgctttgatcttgtagaggaaaccggaagccaggaaatggatcaacaagcccattgatcattacgataggttactagagctattcggtaaggatagagaaagatgtctagcttctggcagcccaaagagtccaccggcaaaaaaggcgcgaagagacccaccaaaggagaaacctcaacggacaccaacaaatggtttggtgtcacccattgtcaaaagtttgaaagacatggaatctcaacggacaccaacaaatgttttggtgtcacccattattatcaaaagttcgaaagaaatggtgaatgaaaacgaggtatctatctctgaaactgaataaatatgagacatataattaattattttgctgacatgatttgttttcatttcgttgaatgagggtttagcattagtaaaattggtagggtgattggttgaatccttatttttccacctctaactatttgttatgctttcttatgcaagtgtttgtttcgtcaccaaaattgtggcatgcagtgtttctttagccctataaacctacatgtgataaacacagtattttactagcttggtcagaattattccgtggactatttggtcgcagctgcaagctacacttggcccaacagtaatctatgcaaagtagtctatgataaaatagggtaaccagatccttttgttcagtaggtgcatatgcatttttttaaaaaaaaatgcaaataagataaattgtaccttgagctttttgttattacctgcgtgctgcatgttctcataccgctgtacaatttctgtttgttattttgtgcatctgctgtcatcaaattgtctatcatttcattcatgcaaggttgtatgtaatccattgcatctcgccaaaacttcactgtacacaattgcttctctgcattgagataatccattgttctaactgttcttttggtctctttcacttgaccaaatcaaagaatgaatgcaagtctgcgcaatagtctctgagttcagtacatgagtaaaatttcggctatatgttcttgactgatgagattcctgtttctttcaggtccctagcgaggcggtaacagaaattaacatagctgaggagcaggatctatcagaaaagttcacaagtgagaatggtgctatgccagttgaaggtaattcatgtggtacaggtatgccctatgctcccgaaaactggccatgtcctggagatcaatggagctggaaagtgggaaacagggcttctgcaactggccactggcttgataggtaatgctgttttctaggcctaaatagcttccatctgaagttttttacttttgctataaggagaagaaaataaacacaggacactgattcttaattagaatcagaccaagtttggtaggtgaattcttctagtgtgttggaaggctcgtatgctattattcattattatttttagaactgggccagtagctctatcattccattaaggagaagggacactcatgctagtggtaggacttgaactgggtcgatggcaaggttaaacagcctcccaccaacaggccgctggccttccccaccaaaattgtttgagttatctatggttgttcggtctagaaaatgaattttagcagtactattaacttgtgttatggatacatctgtgaacaggtaccttacaccgccctcacgttttcgtgatgctactggtaaaaagacatcattcacaagtagactaaaggttgaagaatttatcaagacagagtttccagatatggatccgaacacattcttttctatgtttatttggaagatccctgctaaaggacactgtatccaaagaggttaaacctttctgttgccttttatgttcttttagttgctgtttccatgtaagattgtcttttacagtatttcctagcggtgctgtacaaccaccggaccagagactgggctctgacatcagctcactggcagttgtggtgactattggattctgtgcggtttagaatactatagcagaccattacagacgctgtagtgactagcggcttggactacatataataccaggtgcttatttgtagagatattcaccaagtagccagtgccatacaccattcatttcattgtgtgtattgggcgcttcttatgtaggattagaccttctttttggaaaaacattcatttcatataggagactatatttttttgtgacttactatttgattctcttgaagtaattaatatacaacattacttactaaaaatgcctacctgcctgaggacctttctgtgttcctttcctctatctaatagtgaccttctcgtgtaatcaaaatctgatttttgtatggcttacctttttcactgttattttgtataaacttccatattttgaatcttttatgttttaagtagctaacatatcactggaactctaccctatgtatccccgatccacatttttagactttcttttgacacagtctgtgccatcgattccttatcgttataaacactttgattggttttgtactttgatgcaccttcttcaataactttattcagctctaccacttagcatacctcctaactaacaggataatctagtgtagaaatgtgaaaacatcacaggttacctgccatgttacactggaaataaaaatggaaaaagtatacattggaaataataaagtcgataggcaacagtgcttctcagaatgcaatagattctcagtgtactaaccacacttttgatttttcttgtgcctatgcaccatcaatgtcgatatctgttatcatgtgataaatctcctgttacagtgcctctatagtgtagccaataaactatgttctcaatattgtttagccagaatgatatcctatctatttacaaaatacttttgttcatgtgtaatctgggaagtgcttcaagacttggttgttatttttggtggatgcgctttgaacattttaatgtttatcctgtgtataacacacatattttatccataaattagcgacaacgggccctgggctgctcgggcttcagccaggcctggtcctgaaagacccttgtaaccctttatagaaagtaaaatttacaggtatagagggcccataccaggatggtttgtttgcccagcctgggtaaagcccatttctggctccgccactgtatatataggttgttctacacagcttacctcttgcactctctgctcctaaaccctagccgccaatctgatccttgcttctgcctctacctcatcgtggtgccgatggatccatttgcgcgaaccaactcattgaggcggatccatgaacgctatctccttcccccttcggagagtaacactgacgctggtttttacgtctatattctggagtcaagttacagtaagctccattcttttctatcaagtggtgttttccattgattcaagtggtgtttttccccaaatcgtaacaccgataaaggaaaatagatcatttgcctcattcggaattcatatgtagcatataaactgattttgtcttacttttattcatatctaacctggtattgatgtgaggtttgatccaataccttggttgtaacatgtagccaaagggatttttttcttcacttgagatgtgtgttctttcctttgtgtgttaacgggttagaaaatgcatcctatatactgcctttgcatgttttctgctactttgttgattttcccttgtatttttgctgttctttaacaccaaaaatgtcttcaggaggtggagaagtgaggagggtcttttgtccttatgcaaggcaagctgatccagctggaccatgcaaggccaggaataacttgtgtaaacttgagagagagggattcattgaatcatctccggcacaggattgtgacctctgctgcaaaatgcctgatttctgccgagagtgctgctgtgttttctgccgcagggttgttgactattcctttggaggttatagctacattaagtgtgaggcagtcctagaagagaacaaaatatgtgggcatattgggcaccttgattgtgctctccgtacttttatggctggaacagttggaggatgtattgacttggacatgcagtattgttgcagacgttgtgataacaaaacgaacttgatgctgcacgtagaaaaattcttggaaatatgccaatctcttcaatcaagggatgacattgaacctatcctgaatactggcttatgcctagtgcgtggttcaagacaaacaagagcaaaaagcttggagagcattatgagatcagcaatggcaaaggtatggtcagttttatttttttagccacttgtggaaacttccattttggtcaccatttatcttctttttgatctcttataagtagtttgtggctatgcactgatggtttacaactatatgcagctaaagtgtggggttgatcttgctgaagtttggaaaatggaagataatggtatcaactcaactccaagtgcaggtaacttaattttgaatgcaactgatcatagagaactatattaggcaaatatattgctctagatatccagaggacaatccattgctcaaacagcgcccagcctagctgcaatggcccagatatttggtgccctcttatgttattagacagaacggaaactctatagattatgctgatatttggatcatactagtcaaaaccatctgcgatttgttccatacagaccatttattttgaaaaatgtaagtgatgttttggtagtttttgtaacatgtggagtctagctcccctgtcatgcccatggcttcattgctatagatatactgctgctaatcatgttgtctgtaattttgcacaattaaaaccatagaggactgacaacaatttggatctcagatttacttctgttgttgctttatgtattgctttgctgctataattgtgcataattgagttccatatgtctcatgcagaagtttcccctgctaccggtggtgtaacagtgcttgggatccagcaagctccagaagaggatgctcctccagggtttccatattatgttgatttggctgacaatgatttgcagagggctgttgaaaatcttccagcttacattaccgaggatcaacacacactgtctgtcaggttcgaagattcgatagatcatgctcttaaagaactgaagagatctcaggaagcagagtacaagctggcagagcagaagctttattcccagaaggatcatgtcctgagtctttatcgtcagcttgattctgaaagatccgtccttgcagaccctatgcccttagctgatgatgatggttcactatatagtacactaatcaccaatgttatgaagcgtgtggatcaagtgaagagtgaagaggagaagctcaaggtcatgctgggaatcgctgatggatttgggaaaacgccatcaggagtcattcaggagcatttcgggctacctgctgatactgccaactgagagtgcctgctttgttgtactgtcgtatgagtttgttaccaacccatctggtttggactaaaccagtaataccgtgaaactcgcggtaatccgtggacatgcctttaggaaccttcgctctccctaataccagttttaccgtttagcagtaccagttttaccgtacttaaagtgatcgttctactgtcagcgtcgtttatccttgtgttcttctgtcgtgtaagtaaatttacattacaggttgcttctgctgcagctgctgtgatcccagagcaatgttggagaggtaagcatttacagattttgactagaatgagcagcagcgcagcacggaggcaattttcctttcagtaattactgcttgtcagttgtaagattaggcgatattcctgttggaatcgcaatactgaagaattcatggagctgaaggaaccccggcgattgatgaaatctgcggtggctgagtaatctgatgaaatagtagatcagctggtgacatcaggtctcgctcgaagcagcagcctgcagcctgaggattgatttgttggttgcggctattaatatactccctccgtaccataatataagggtttttaagtttttgcttgcactgtttgaccacttgtcttattaaaaaaattattcaaatataaaaaacgaaaagttgtacttaaagtactttggataataaagtaagtcaaaaaaaataaataataattctaaattttttttaaataagacgagcggtcaaacagtgtaagtaaaaacttaaaatcacttatattatgggacggagggagtatcacttgatttaggactcctggtcatctggaatctcgatgctgtcagacgaatcttcagcatcatcgtgctgagtcattggctcattgcacctgactccattgttgcgctcgttgagttcagctccatatttgttctctcctgaattgtttcaaggaattgtgaatggattttccccacctttgccagccctcttctcaaacgtgttaaggttggaaaatgtgatagatgtagagatggatgtttgagcagacggcacagtttcattcatgtttcatgaccgaaatttagagttccccaaaccaatcttttttgttcttggttgaaattcgttgaatttatttctcttgaaattcacgaaatctaccatctcgctaaggctgacattttaacaccaaaacaaaggaaccctgggcatgagacgaatgatgggtctgggcgtctggccacacagaggggaggatgaagaacagtactatgtttatgtggcaaggattcgagtttgaaccgtacgtattttctcagaatacactaccaatcgagtttgataacactactgtacgtatgtaccatcgatcaactccctccgtcccaaaataaacataaccatgagttttcgtgttcaactttaatcattcgtctattttttaaaaaaaaataagtcacatataaaatattattcatgtttgataatataataacaataaaatattaattataattttttttaataagacggaaaatcaaagttggacacagaaactcatctctgcgtttattttggaatggagggagtaataatcaagatatgatcttgataatcagaataattcggcagttcttaccccgttcatctgactaaacatcacatcaatacaaccaaaagaacggatacacagtgtgttccaccatcaatctcacaggagatgagacgaacaaagcaaaagctaataaaaaccatcctaaacaccacccttcttcaagccagagtctttgaagtcaggtcgggttcgcctgaatcccgccggcgccgccgtggaaccgtcgcctggccagcctctggcgagcccgcctcgccaccgccgagcacctggacgccaccagctccgccgcggcggggatcagccgcgtcccctcgaacaccacgctcctctggtactccaccacccacgtctcggcctccagcctcaccgccggcgagctccgcccaccgtagctccacgagctgccgttgctcgccctcaccgtcggccacaccctcccgtcggaccactgcaaaaatggcaacaacgacgcggggctcagctagctagctgcaaatgcaagattggttttctgggagtttgtatcggttatgccctgtttacatctcgtcctaaaatttttcaccatatcacaattcacatcgaatttttcaccatatcacaattcatatcaattcatatcgaatgtttgaatatatgtattaagtattaaatatatgctaaaaaaaactaatagcacagattgtgactattttgcgagacgaatcttttaagcctaattgctccatgattgataatgtggtgctacagtaaacatttgctaataacgaattagttaggcttaataaattcgtctcgtggtttactgatggatttttttttagagaagggtattttctacccggcctccatatctaaccggatatatacggccattgagatagggaagttagccccgcaaacaatccaatctgaaattcactccatagaagatttaaactcaggacttttgggtactactcaggtcactgtaaccactatattacatgtcatttcgtaattagtttttttaattagtttttcgtaattacttatggattctgtaattagtatttttattagtaccgaacacctcatgcagtatcctatataatatctgatatgacacgctaaaactttagatcctagtaacacccccttagtttacctcggtgatcttgccggagaggatggtgaggtgccgtgccgggagcgcgcgggggaggaggccggaggtgcggagtgggctcccccacacggtcacctcctccgccgccgacttgtacacggcgcagcgccagtagaacacgcgctgatcattctgcgcgagatcgagatggaaatctctttaacccaaatcaagaattcaacattctcgcaggaaccaaaaagggaaaaaatgttaatacctgctcgaattgccagacggaatcgtgcgagctgcagttggagatccccttctcgccgccgacgagctgcccgagcatccgctccagggcgcggagcttgtggctcaggccgcccggcgcgaggcgcgcctccgtggccagccgtgccacggcctccggcgagagcttggggccgaagcccctcgccgcgatctccgggacgaggccggagtccacccagaggaggaggaggaacccaagaaccgtggccgtgtagagggcccagtcatgcgatcccccgggggtcttcctcccggcgccgccaccgccgccgccggccgcctcctgctgctgccggggcctcctcgacttcgcggtggaccgcatcggcggcgtccacggctccgtgacggaggagccgtgcggcgtcgtgtcggcgccgccgaagagcgggcgcggagcgggcttcctgtccctggccgccgcggcgaaccacctccgcgcggaggcggcctccggcgggaggaggtccctggtggcgttgatgctggcgaggcacatctcgcacgcgcagttggcgtccttgcggcatcccgggtagtagcaccctcctcctcccgcaaccccatcccacggcacgactatggtgggcggcggcgtccgcgccgccgccgccgacacgctggggttggagttcgaggagcaggaggacgcggtggtggagcagcgcgtggcggtggtcggtggcgtggtggcggcgctcggcgctctcctcgccgccatctccctctcgtccatggcttggctggatggtttctcggagctgtgagttaatgcgaggcggcggcttggagaagaagaagaagaagagacgagttgaaaaattttgaaatcgcgtggtggcacaacggcgagcaacggtcgactcctggtcgtggggtgggagatctggtgattgcagtgtggctgacgtgtggggcccacggatgatccgtgggggctttctgactttggagttcggctttccggtaaatgaacctacagtactgaagtgttaatgggccacaccagacaccagtttaggcccccgttcgtttctacacggaataagttcatctaagatctcttaatttatcaacgaatccgattttcgtcattcaaccggaaaaccagatacaacgggtccctcaactatcaaaaccagtgcagatgagctccctcggtggttttgagggtagttttggctgacgtggcgctacgtagcaaatttgacttggtcttcatctgatgtggcattgacgtggcgcatacgtggcaatttgatcccgaaaaataataaactttgtgggacccacatgtcagtctcacacataaatgaagaatggtggggcccac

SEQ ID NO: 9844 - DNA, 28549 bp, Oryza sativa
cccccccccccccccccgggcttgacaagttcagcaaaaccgtagagaaagtgggctacacctagcttagcctatccaatatccgattcaaaaagagcttggattgctaccttttctatctctgtataaagtcaattagtcccagtgttgggaagagcccactgtcaaaagatcgttttgctaggatgcttgcttgaatctagttacttccaaaaaaaggcatttggaactctatacggtatggctacaaaccgaatgaagaagtcgtaatcaggatttgatctatctggatcagcacattttattacaacttctttaggagtatgacatagcccccctccctcccagatctggccgaaggagggaggggggaggctggccacagcgaatacggcacggggcagcggcggcggccacgacgacgggtcggggcggcggcggcagccacgacgacgggtcggggcggcggcgacgacaacgcgcggggccgcggcggcggctcccctcccccctcccagatccggccggaggagggaggggggaggccggtggcggtgactacggcgcggggcggcggcggcgacgacgacggcgcggggcgcggctcccctcctttcccctccaaaatccggccgaaggagggtggcggcagcgaggcgcgtggcggcgtcggcgagccgccgccgtgattttttttgttcgtttcatggatttttgcaggagggctgttgtcccgactgtgaaaatcgttgattttcaccgttgttgtgctacaagtggtccaacccttcgcttgcaaaattcacttttgtctgtctgcgaaaatactttttctagtagtgaatgttgttctttggatggatatcaccaaggacatattactcgaaaatggaaaggcatttgggcaattgggcttgggatagtcagtgagtgctggcctgctgggtagatcaggggctaagggcatctgcctcaggttattggacgttgttccaagttccaacaacgaccaaagcacgatgttgttattaacagcatccacatctggatgccctgcaacatatacatagcacccatcccatttttccaaattacttcctccataagaaagtatatgatgtacttttataaaaataaaaagtataaatcttgaccaacaattaatatgattacaaacacacttaccaacagttaatcagactattcacatatctctggatgccctcactctgcctcccaccccacctgccatcgaatgctccccctcaagttgcatcgccccacacaaccactcaagccaagtttagttccaatttttttctttaaatttctaacttttccatcacatcaaaacttttctatacataaaaacttttaacttttccgtcacattgtcctaattttaaccaagctttcaattttagcgtgaaccagtccattgatagctccctcctcttggactacctccacaaaacaataaaggccgtggctgccaacatactggcctcgcgccaccccaagtaacattgcttgccttcctcggctcaaatgaggcgagcagaggagaggagcactgctggggtgatagttttgacgatggaatagcaacggtgatatgcgcaggacgcatctcatggtgcggctcacaatggtaggccactcccaatgcagggaacaacggaaaagtggagaacggtgtggcgaagctcgagatccggcattggaaagtacctttacccagtctttttacagcacagctctagcaagcaatggcgtgtatgtcaaccatggaccaaaagtccctgaagtagtcggggatttcgaagccgttggtagagaagagcgcaacggcgagcccgccactgctgtgaaacaacaacttcggagacgtcgggacaagaatcaggcagcagtgcagcaccagggcatcgactggcttggtgttcaggcgatcaaaccgtcgagcacctggcgtgcgtcggtgcgtggcgaaacaacgcctctctccgcggccgctccggcgccatctcgagcgcgcacaaagagtacagctcaggaggcggtaagatccaggttaggagacgcagtgacgtgtatagcaacagctcaggaggcaggcgggagatcgggagcacggaatatagttgaacgacggcgcagagagcgcgcgcaagcgcgaagggccgtgcgatggatttgcattgcacgtgaaccacaaccctgttctggcccaactatattaggcctgcttgttagccacaataccgatccggcccatcgagccgagcagacacagaagttgaatttctacaccgatgtatgcaagtgattgaaattgttgtataaaaaaagtatataatatgagaatatagattctgatgatataatacatcacacaaatatatagtctaaatttaatctacacaggaaaaaataaaaataacaaaatttatctatgttgtatacgtactattaactgtctgattttattatattactttagccttgcatgtttgtttatagacttatctcatttcaattgatactactagtattattttttattttttttccataactattctaagtcgtatgaaaataacggatgcacaccttacccctcgtaccataccacggtccaagtaaaaacatttttttttcaaaatgtagacccaggcaatagagatgaacgaactcctcacaagttcacaacgaggtaacatcctgcataccaaagctaaagctgacaacaacatcactgagatcaggcatagtttcaagccaacaacacacatcaatcccggaagaaaatcaggtaacggatcggatcgacacagctgcaactcctgcacggatggtgttcgacagttcgaggatcgagacggccagccgtcccggccggcgaggtgctagctttgctctagcagtttcgctcacgcgctgccgcgggagaagccgaagcaggagcaaccctgggaggcgtgctccgggacgggggtcatgccgcccttgccgcgcgaggtgtcgatcttctccagcagcgccaccacctccgacatctccggcctgttgtccgggttcgcgtcccagcacctcgccatgatgtccgccatcgccttcgggcagcacctcggtatgtccggcctgatcccctgtcacccatgatccattgatcgacaagaagcaaaatcaatcaatcgacaagaatcttggggaggcgatttatcatggcgagatgtgtctatctaccagcttgtcgacgtggtaggagatgtcagcgaggctgtagttggggtaggccatggcgcagcagtaggtctcccagaggaggacgccgaagctgtagacgtcgcacttgtggtcgtaggcgcggccctggagcacctcgggcgccatgtacccgatggtgcccgtctgcccggtcatgtcgtcgccgtcggcgccggcctccacgcgcgccacgccgaagtcggcgatcttgagcgtcttcttcctgtcgagcagcatgttctccgccttgacgtcgcggtgcacgatcttctccccgtgcaggtagcgcagccccctcgccatgtccagcgccagctgcaccaccttcttgtacggcagcttcttgtcccggtgcttgtacagcagcgtcttcagcgtcccgccgtgctggtactccaccaccaccacgcaacgctgccccccgccgccgccggcgctgccgccgccgacgctgctggaccgcgactccgccttcgccgacgggatcttcagatgcgacgtccccatcgacgcgcccacgaactgcacgcatgtacacagacagatcgatcgatcagacaccgtacacgacggattcaacggcgtggattgattgctgctcaccttggtgacgttggggtgatcaagcttctgccagacggcgacttccttctcgaaggcttcccggtgcttcgccgtcgactcctgcccctcctgcccccagtccagcaccttcactgcattgaacacacattgagcaacaaatgtaaatattagtgcatactccctccgtttcaggttataagacgttttgattttgatcaaagtcaaactgttttaagtttgattaaatttatatacaaatatagtaatgtttataatacaaaattagtttcattaaattaataattgaatatatatatatatatatatatatatatatatatatatatatatatatatatatatatatatatatatcttcataataaatttgtcttgggttaaaaatgatactacttttttctacaaactttatcaaactcttaaagtagtttgactttaaccaaaatcaaaacatcttataatctgaaacggatggagtattttttatattgatgtttgtcatctggatcagtgataacatctagcaacaaattgtttacaggcaataggtcaattaaattacaaacgaccttgtgtaaatctgtaatgtaataatgggtccgttctttgggggaaaatgatatctatttactactagctagaaaaatatgtacccaaaattttactccatcaaggaacttgaatgtatgctagatagaggtgtactcccttgcataaagggtcacatacggctgatgtatatatggtactaatgtttgagtaaaagttactaaataatcttctttgcaaatggatgttatgggaccatcaacacctagatattatttcccttcttccatttcagctaattgaataagctgtaattaaatggtacagtgtgattaagatttttgcctcaatcaagatttgccacttttatacaagggaccttgaaaactcacaaataaaaatacaataaccgcactacaattaatgtttcacaactattttgtagaagtaaatcttgccaaaattgcattctgaatgttccaaatgacaaaattttaaataaaaagtttcttaggtctatgttagctatcattctatctaatgttgaatacacacatatatattcctaactagggagtatttatccccgagaaacactagaactttatgccataaattgaggtcacgtggatccgaggaattcacccttccgtacataattaatgtactaccacacagcttaccataggttaagaatccccaccgaccgttaccacatagcttgcatcacactatatcattgttgtcttgccctccacaccaattcatatctctactgacacgcggcaccaaaaacatccttagcaaacgacatctcctatcttctccaccacccgcaacagcctctactgacgcacgcacggcatctccaacagcctctactgatgcacacgccaactcacgtgtttactatacctcgctagagccaaaaaggtggtcaacaggagttcctcatcaccaaccttccacccctaccaaccaacgtctactgttcctcttcggcggagcctacaccggcctcgcctccccccctcctcctccttgatccgcttccgtccaccttcacctcccatactaacttccggcggtgcactgaccaccatcaccatcaccatcgtcatcaaccccaccaccgccgctcatcgttctcctctgtttcggttctcgcagctggctggccgacgggaagcaaaacctaatgtccagtaatggtaaggaaaacaacaaaaactaaccatcactacaaaggaaaacacaaagggctattttacaaaatctcttggtgacaaacgagccctcactgctcagacgacgattcaccgtatcaaaaagtgctatggtgcggcgtacgggcgtacggctagcaaagcgcgacatgcacgttcatcacggtgacagtctacgagtctaatactagtaatagcatgtatagaaaagagttgatcgacgcaagagatctgaaggttgatttgattcgattttttaccggcgacgtcatggccgtcgtaggtgccgcggtagacgacgccgaaggtgccgtgggcgacctggttctggatgtcgagcttggcgaggtcgatctcccactccagcagcggcagcggcgacgccgccgacgacgagcggtgctgctcgagccacaccttggaccgcgtcttctcgaactgcacgtccaggttcttgaggtcgatcttgtccgcccgcacgtacatctcgttgtccgccgcccggacgaacacgtcggcgccggcgccggcgccgccggtggccgcggcgctgctgatgccgctgaagctgtggctgcggctgcacccggcgccaccgctgctcgtcatggacttcgttctttgtcgatctcgctcctcggcaaagaacacaacggacgatctgcctgtggttgtgtgtgtgtgaaatggaaaggactgggtttcttctccttatatggcctcttcttcctggatgcgccaaattaaattttgtttctaatgcaggagaagatggatatgaaatcgtttctgccctcttttctgcttcaattaaagcccccaaatcttccaaggaaaccaaccacgcatgcaacgtgcctacaaccagatatcgatggcgaacacacgcaatgcatccatccgaaaatttgagcgaagcgcccccccccccccccctaacaccctccctcttggaacgtaaagcgcaaaatcaaatggaaagaaacagaaaagaaaaacaaaatctcagtcagaaatcaaccccgcgccgaaagtgtcaaaaaggaagtaaacaagatctctcaaaacaaaatatcaattcggagggaggaatcaagaactgccttaataaacagttaaaaaaattaactaatcaaccaagaaggaggctaatgccggatggaattagccccttcttgatccaacgacccaaacctacgctaagatggagatatttcctcccatgaacacaatctctcctctctcttgagatctaaatcgatagattaaaatgcgttcgaattggggggtgaggctcggaatggatggacgctgttgacacggagagatgcgagggaagggatcggaggaagaaaatattagcgagagaatcaagggaaggagacccattcctggcctcggcctgacagccagccaacgatgcgttacgaaaggaaacgaaacggctcatctctgctgcaggttttcgtcagtaaatggaagacgctgtagaatgtagatgcgactcgcaattcccactgacaagtggggtccactttttgacccagctcggttattgggcctccgcgacccaacggaggacgggccggcccaccccaaaaacgtccccgctaactcacaaacacgaactccacgtggttcatttttaacttatgttcgtggtttttatcccgataaaaacgagacaaatatgttcttaggtgacgtccctcgtagagttcaaaatatcgaacaaaattttctaaatttcggtactatcgcacccccgatatgaatcatatgatatcatttcgttcaaaatttttattcttttttttattttctgtgaattcggtaatattgtgtttagatttgaccaaattttattcgaaaatttcggtaaatcggcatcctccgatgccaacgccgaatactaaagattgaacccactccctacccgcttttaccccgagaaaaacgagacgtggcttcaccgtgtgccacgacacaacagaacagaacagccttcacagccgcaacacgtgccaagcgtgcagtcaaacgaagcagagttaacatcccagcagagcagcaggcgcagagcaaatctatcatttcatcgaaggcaaattacaacacaaacaaaaatcatatcagcgattacttattttacaggttaattagtcaagcgggcacaagcaaagcacaacaacagaaatctctcatccaagaagctttagatacacaagcaatctacgaatcggatgccctgaagagggtgaggagggagaggaagaggttgatgacgtcgaggtagagcgcgacggcggcccagacatactcgtcgtaggagtacctcttgatgaggttatccgtgtcgtacacgatgtagccgcagaacacgagcgcggcgaggccaccgtagatcatcagcgagaccctcccgagcgggaagaagacctggatgagcgcgaacaccatgaggatcatgacggcggcgaagaggaacgggccgaggaagctgaagtcgtggccgcgccgcgccgcccagaacgtgtacgccgtcaggctcaccaccaccgcggccgtcaggatcgccgactcgaggatcacctcgcccttggtgaacgcgcaggtgaggcccacggcgaagctgatcgccgccgtgaagagggccagcaggaggaggttcaccgggtggcgctggtagtagtagtagagcgggcaaagcactgcatcatcatacaatcggaatcgatgaaatgggggatgaaattgatgagaatggaattggggattgattggattggattggattggagagcttaccgatgaaggggaggatgatgaggaagatgtagagggcgaagccggcgggggtggagacgaagaagagggcgacggggcggacgaagacgacgacggaggcgacggcgatggtgagcagcatctggatggagaggatggcgtacaccttccggacgaacgcccaccgcagctgcgggctctccagcatcatcgggtacagcggcctcgccatccccgcctccgcatctccccccgcccactcgggccccttcggcggcggccggaaatacatcctctctcgctcctcttcctcgcgccggtgaggtttcttggcttctccgatctgatcctcctctctgctctctgcgcttgcgcggtggcgatggctggagaggcggcggcggcgggggggagtttttaaggcggacgagcggtggagaggagggcgcgagagaggaagtgaaggttccggacggttcagcggttggggatccgacgtggcggcgccgtggctggtatgtggggcccaggcgggagatgacggttctagcgccgtttcgttccgtttctggtggcgtctggaggggggcgagagatttgtgcgttgcttttgcttagtgacggggggtatcagtagtatcgttcgtgttggttggttttccgtgtcaagccaagacacattttatatcttgctgctttggggattttgtaagggagaagcaaagcatgaatgttagataagctagcaccaacaggaatggcagatggttctgtttggtagtatcccgttgtgaatgttaaaccaaccataaaaatgtgttggtcatgatctctgcagcactactcttgatggttgacagctctatcatttgtgtttttacttattaaggccgttgtcaaaattttaaattttaagactttcttgatgttaaaatcgtagttaggagttttaaatagttgagaacattgaggttttacagtgggaagtcttaaaataagcgttccgtgggactgtgtttctagcttcctgcttttctagagaacattgagttgcaacaggaattggatggtgtggttaatttgaattgaggtcagttcagtttgatcaagacatggatggtgggtgctgtaaggtcctgagaaatctggtcattgtttttctttttcgaaaaagagaaatctggtcattccgtcattgtatttgtaccgtaaaatattaccactaaaatcttgacttatacagcgagaatactcactcccgggcaaccaacgtgaggcgtcattatcgggcgctccccccggacgccacgtgccccctagcccaccatgtgtcatgctcccacctgtcatgtgtctcaaaaaaaagttttatctagtatactcacaatgtttcactatgcatagatctaatgttacagtgaattgaaaacattcttttgcaacaaatcaaccacatattttagaaaccctctattaaggaattcgtttcattttttgttacaccaaaaatgtttcacctagtgtacttacaatgtttatctaatattgcactaaacgaaacattttttcccaacaaatcatccacatattttagaaaccatctattaagggaatacgttttaattttttgttccaccaaaaatatttcacctagtgtggatcaaatgttgcagtgaactgaaacattctttcgctatttgctgaaacgttgtttttttatataaggtgaaacaacgtccgatttaaacgattgaaatattttcgatctacttagtggaacaattccgatatacctgatagaacatcgtgcaacatttaaaaataatttaataataagctaaaaaaatttcatcggaatatatccatgtatggtcttattttgaagatttaattacaatgaatttaatggtccaatcggatcatgatttggataaataatttaagagaaaaaatagtttaaagtgtttttgcacgcatcgtctgattttaaccccctctcatcgaacggagcgagagtcgcttcccttatacaacgatgagacagccagatatatttctcactcggaacccttctaatccgtttggttgggggagcttttagaggaccgaaagtttagaggatgggggtattacctattctgtttgattggagacatgagatttttctttatgaggctggaaaattgagggataaattcctacttttcaataacttgtaggagtggtatttggaagagaattcctccttgagaaaaaaaaagtgccgtcctgaaaataagcctgtcaaaaagggcgaaaaaaccgttagaaaaaactaaacagtctaaaaaaccggtatataccacgcaagataaaaaaaactacgcaatgcgggaaaaaaaaccagtccgattgcacgcaacgcaagaagaagcccatccgattctacgaataaacttaaaaaaaacacgtaaaaaatcgtttcacgaaatgtaaaaaagagtgattctcgggaaaaaaaccaccatcaaaaaaagttcacgaaaaaaactattttgcagcgttaaaaagaagtctgattctagaggaaaaaaatatcgtcccaaaaaaaacaggtttggcaccacaaaacattatatatatctctatttctttcaaaagcgaaacctgtttttttattcattaatatcttcttcggatcggtttctcgacgacgtactttttggatttttcatacatgcgtcaacgtatttttcgagtactgcgggtatcctcggggcatcaccaaatcagtttagatcaactgcgagtattttgtatgttggtagagatcacgtctattggcaaagatcaaccgcattggtgccgatcaaatacgacaccaacgacgcatcaaatactaacacggaacagaaagcagcagactgccggcacaaggatctctgttattacagtattactgatggactgattgttaagctccaaatagccacagacaacagaattttttttgaaacccgacagacaacagaatgcaacaggctgcgagacactggtctgaagaggcaaagcacttttaacttcagcttccttggcatccgccgaacgctccgcgacaacctttgacatcccaaacatctgagatgcgaaacatgaagcacaagaaatgcttcatcatcaaaatgtccaaaatgcagaaagagcaaagaagtgcagtatctgagtgtttgcacatctgaccttttggatggtgtttgaagcatgtcttgtgctcatccatggaggcatggatgaactcctcgatatggtctttcagatcttcgaggaaagtagcgccatcagtcctcttccggcaacaagtcatggatgggtttttgggaactgaataggcagaatcttgaggttgtgcattgctagattccatcttaagcctgaaaaagaaaagtcaaagggaagttgattagtatgagtctgaagaagacatcaacattgttagaataggtgcaaacacaagaacgcatatagtagtaagtatatagcagaaatgcagagtagcagcggcacaaaattaactgactgcacttcagttatcaaatcatagatgctactaccaaacagatttaaaggttcacatttatttttcaggtagaaacatcagtagctactactcagccaaccgtgtccaaactacgacggcctagaattacaaacaagatgacgcagcaaagaactactcactgatcgataagatctcacagctccaaaaattccaccatcgaatacctaagaggatttacacttgtctcaagttggttatgatcagatgcgagcccccttcactgagattcgactgccaccggagtcacctcccgcccttccctggagctgctgcatccttgaccatgggctcgaccttctttttgccaaacacctgaaacacatcacaggaaacctgcagattatccctcaagatccatcagaggaaacagcatgttataattagctatcaaattacaccataaagagaagattgaattaacttcaatctgaaagaacagagaacactaagtatagcaagaacagagaacaggagtactgccatccgttgcaactggcggacccagattgcaattagagtgtgttgctaacttgaattgcaaatgcttgtatacactactgcagttaactaattgtctatgtcaaatactcaggagatctcctcacaagctaatctataatttgccactaattcaacgtgactgctagcaacaaacagatctagatgtacgcacaggttaatagccaccaccaaatgactcgacaacaacaacaacaacaaaagcatcacaaatccacagggaaaaaaccgaatgcctctgctcctctactactcaaatagaacagcactgaaccccaccacaaacgacgattcaaatcgcgaacacaggaacccattcacgcaggccttcccataaacacaacgaaggcactaatcgaactcacattgctgcgttgttggtaaaacatcacacgcttgttaaacctcaagcactagtagagtttctacagaaacagagacttggcggtactaattgcaagcagaacagggtgcacgtagcgaagaaaactccaccaaatttgtagcaaaagagagatcctaatccttatgttcgcatgcgtagacaccgattcaatctaaaagaacatcacgatctaaggcgaattttttttaaaaaaaaaactaaatgcttctccgtttcaaataaatacaacactaaactcgcgaatgattcaaatagcgaaacactaacctattcgcgcagacttttccccctaaacaccgacaaggctttatgcaaaataggaactcgaaaaaaagatcaaatgcttgtcaaaataacaaccgctttggcactagaacctgcatgctaatcatccgttctcagaaaaacaaacggttgcagaagcgatcgatcacactacattccttccgattcaacactccaaccacgcgctacgaatagaacagcacagaacaaaacccccgagaggatgaactagtactacacacagcggccaattacactgagaaactcaaaagcaaaccgaaccgccaagaggaatcacggccaaaacaccaagaggatgaactgtacttactacacgcgcggccaaaatccagacatgaatccaagaggatgaactattaggccaaaacacagggaaactcagaagcgaaacgcgattcatcacaggtcggaaacccagcagcaaagttgtgcaggagggaggagagggggcgtgctcgggtgtaaactgggcttaccgagctgctcttctgtgagacgtagtcgccggcggcgcggaacttgtcctcgatgcagatccagtgctttctcggcggagttctccttgaactggctgtactagtccttgacgcgcgcgctccataaacgtcgccgcccgaacatcatccgctgttgccttgagaggtccggtaaatcaaccgtggtggtcgtcttctgaaaaacctcggcgatgaggactaatccctctgaattccttcctattcaacacggggaccgcgaagaaacgaatcctcctcctgcgcaaaaaagaacacacacacagttaacgacgaatcggagagaaggagcgagagagatgaacagaatggctcaccgctatgtcgaatccgacattgttgggggtggggggggggggggcagggagaagttcgaatctgtgggtggatgtggccgatcgagagagagagagagggagagatggagaggagaaggtgtgctctaatttatggaccacgttgcagtgcggtacacgttactgtggcggcgccgtgtgagtgtgagcaaatggtgcaacgacgggtggtgctagttgtgtactcaagcgatgtcgaaatgtacaactgcgggtggcggtgaacacacccgtggacctgtgcgtgtgtccggcacgttcgtgcaaattaaggatgtgtttggatggttttgcctgcgtaggagatggccgcccggtttttataggtgtttggttgttgggctggtataggatatggccaccccctaaggaatattcgcagtagatgccgaacagatgcatccggccgaatcgggcgaacggggcgatccagggacgggcgagcgcacgtaaaaggaaaaagtggcatgcgctcacctccttccccctcgttttctcttcctctcctcttcttttctttctttctcaccggtctgagtctctggagctctcaagtctgaaccctagcttttctcccttcctttccccttcatctcccctggtggcgcagccggaggcgccaacggcctcaagcgccggcgcgaagggctgcgtgggaggaggcacagggtcatgggaagaggcgcaggggcgcggcagacgcacgggtggaggcggtgggtgtcgttcagcggcggcggcggtaggcggcgtccagcggttcaggagcggcaaatggtatttgatgttcttcttgatggtcaaccaagcaatgcacagagacacaacagcaaaactcattggtttgtggatttagattcagattcgtcagttcagtttgttgaaacacaagtatagctgtgctgcttgtgcagtacctcaacaaccatcagaactttccgcaggatttttcattcaacttgaaaaccagtaaaatgattaagctatgagatgaaacaggtgctgataacgaaacttccaaaaataactagaaatggcacaaaatgtcattcacagataggagtgcattgcaatatcggatatgtagtacaagtgcttgtctttgaattgtccgatgaaaatctgctctataacattaataaaacttatttgcttacattatattgtaaaatcagagaaaaaaagatatttaggccatctacaaggagaaggaggtattctcaccatttcatccaaaaggtgatcacaacacccatccatcctaccaaacaaaaaattggctcaccatatccacctcttctccttccaaccaaacataaacttggctcatcctatccgtcgaaccaaacaaaaattggatggccatatccctgaaaatatggatggacatatcctatccatccttgaccaccatccaaacacaccctaaaggagccgatcgagcaagcgttctgacacaagggaggcgtagagcagcctagctaatgtgatccgagttgggtgcgattacatcaaaagttacgtgtcacatacaaaaaataatgggagtattaaaaaactaccataagatttttgagaaaaaactttcagatataactatagaataattgaagtgtaattacactttaattactatattatgagtggatgattttgtgtggatgtgacatccctactatgagtttgtattagttcccttttgcgattctagggttagggtctagggaaattgattttcagattttttttttgttatttttcaatttcgcagtcggatggcttaagtgtccgcatgcaaccgtctacgaaaatcgattttggccgcatgcaaaaaccgattttgtagtagtgtctcttatcaaacatttagtgtgatatgtaaaaatactagaacggtctcgcgcgctaagccgcgcgtgctcgaagcaggcgatttaatatagcgaaaacaaaaggaaatcagttcagtatagatattagtcctgtctatggcaagcagcaagcaatgcatgtttgaatactgaatcacgttatggaaccatgtttttattcgtgaatgtactttggtataatcagatgatgcaggtgtatggaaggggaagccgtttttctgttgtatgcttgtgacttgacctgagtgcactaagcttttgcgttgagtttttgcgttgagttatttttttaatacttgttcgaagtctgtatgcattctaaggacgtgaaattggattatttcaatggatatatgttcagatgctctcatatggacatcatcaaggtagccaacaaatcagcaatcagcaatgatatatttaatctcgccacacaacttgacaagctcatgtactcttagataaaacacggtaaacatataatactttcatatatttatcatttgagatgaccattaaacagtacggtatatacaggctcatatatttgtttgaggaatgtccgcagcgaccttttcaagatgagggaccatgactaacattatcttatatcatatttgctgggcctgtggaaaaacaaaacaagagccaaaaccaaactacagaccaataacaaaatgaattctatatctaaccactgtgagcatagtaacctcatattagtaccaaaaccttattatgcaaacacaatgatataagcaatatatatatatatatatagtaaatttgtttggtgctccatggtgcccgggcaccattgttgaaattgagtatatacccaattcaaatgagcatgaaactttttcaattatttaggtattaatattaactactttactaactagttgaaagcaagtttgaactgaatttgaacttgtttttgttagattttgattctaggtatatagcatccatacatataattagttaggtatgtaatcatggattgtgaaataaagttaaatttgagttgttttgttgataggtataggtatgaatcgaattcttataactaggtatatactcacaatttgaaaattttgaaaaatttgagtgattttgtgcatttgaaaccatggtgcccgggcaccatggtgccccatatgagtgtcctatatatatatatatatatatatatatatatatatattgagctcatctacaaacggtgttgtgcaatacaatgacctaagacgctaaggacatacaattgggttttaatatagcatatccagcaaataaaggtaagatgggtgtgtcatctttttcacttaatcttcatgtgtgaacaatgcgtagctttaacagagaaccattagaaaagatccatatgagtgcccaaaaataagtactgccagtaataggtcatgacagaagaaaaggaatcttgaatagatgcatagcatgtaagtatctaacattgtatgaaaatgctacctggcagatgcgctaaacttttattatgtaatctattataggcaattagctatattgcttccgagaacagaacgaaggtagtggcaccgtaaaatcacaggaaataataaattgaatagcatatcacctgctggagagaatgacaaaccctaagtacttgttgcttttttccatcacctgcacaagcaacacttgcatttaataaggagcaaagaacagtgaccacctcatggtagctcatagccacctactaacgtgagagcttattttaagaaaacgcaatactatggtcaccaacaaaaactattaaacccaaatcaaaagcagacataatatgtttaaataaaaagaaccaccttaggttcttcttgctaggttgttgccaactatcattttagtgggtttccttggtatctcatactgaatggataaattaacggatgctttgtgcggtctcctttccctgcatggacaaacgaagcaacatgatggaatcgctatggatgcagatgtgttattgaactagcaaccatcttaaacataaaagaggatagtaaaatagtaggtggagcttatgttaagaaggtgttactaatgctatgcatgtcagcccccaaaacaagcaggccaaaaaaaatcagaaatagcttctatgggttgagatgagaaggcagccacacaactcaggttctagcagaacacataaaaaaatagacgggattctcaagcatactcacgagagaatgaacaacagactggtttctcaagcatactcacgagagaatgaacaactctgaactaaaggggcaaaatgcaatcagggcaacaaactcaatggagaaaatcctagatcctttgcattctgagagttttttctggatgatctgtgaggttttccatgtggttctgatgcccaacgtgatcagcaaaaggcccttgatcattcctggcgtttgtttcctgctggaagaagtaggagaagaattagttggattcgatttcagcaatgtgagcagcagattgcttgctcccttttttcaaacaaaaattttactaagaaaaaaaaatcctatctttctgccatgggaggaggactccaaagaacataaattaccatcaaataagctggtagaaggattcattacctaaaagctcgccatatccagattcagcaaaacactgaacaagaactccaggtcagctcaatgattccccagaatttgggttttcgccaacaaatcaagaaccgcgtcttagctgaataggagccaatgcggttgccggcagcatgaccacatgtctgaagcgcacccccaacaatcaaagaaatgaagtctttattggaagcaagacataatgggaggagccatgtaagctatgcaacaggtccaacgagcaagttgcttcatgaccatgaagaaaaaccatgtaaatggaatctgcgggaataaaaacagaaggaactctgtagagctgacccacaacagaatagagttatcttttagaacattattcttttatttagaggcaacaacaaaaattatattgaactatctttctgaatttcgtcacacatcttaccatactcccccatattaagcatctaggatgctcatctagccaatataacaagataatagaatttgcccaaagcattgcatgtggttgttcttaaagaaagtaatagcattgcatagttgtttcactgggggaacaaaagctatcactgctgttgaacagccaagaagattgaatgtaaaaaggaaattttaccgccaacggttgaatatcaaataatcaggttcaattcatacaacaacccaaaggttatgcaagcagagcagtgacgggccaaaggttatgctgaatgacagcataaatcatttcattaagcgccacgttttcttaatactgtaacaatacttatttgtacagaaacatgtccggtggtcttttcacagcttcttactttaacagctattggctttgtttccccaaatctccaaaaatgtaaaatgtaaagtaacaaccatacatttgtaaggcctactgtggcaagcaaatataatcccatggcatgtaagtttctggacattgtatgtttagcaacctcataaaccagtgccgccacccctcaaaaaaaatttagtctagcagttgcaattctctctgctggaagtccagaacactgcaatctcgctctattcagcaagaaataaactcagagaaattggttgtgctgatcaatagcatgttctatacaaaacagttctcttgtttcatgttggacttcatagtgctcagaagtgagaacaatagaacataagaggcagctagctagcatcccatacctttgaggtagcaatctagctcaacataagagaccatatataatgcgtggtcctatgtaagaactatgtgctgcgctacttgatcccctaaaacctacttttattggtagcaaatactcaaatctggatactacacagagtaaattgtggttgaagtacaaaatttataggaaacccatacaacatccacataatttggtcgctagtcgcaataatccttcaccatgtcatccatagtcaactattgaaatttattttctttcgcatcgcactgtaataatccatacatatataaacatgtatcgtataaatcaagcaaatttgactgaaccaaatttagcggataaatgttgtgtatgatacctcataattgtcttgtccagctgcttttcgcaacaactttcgcagaggaaacactggaacctctttgtcaggttagtcccaaatgttattcaaaccgcttacatccctgcaatcctccaaccaaaatatatctttcttcgcctaatcaaccacacttcaatgtcatgttaacagtgcgaatgttgtattgcctccggccgcatcaccaccgagatcctcgtctccacccagaggcctcatcattgttcctgtacacaatcgtcggcagcgagatcagtgagagacagaggacggcgggaggaggataagggcgagggatagaggagttgagtaaggagtgacaaggggggacgctgacctttggtgtcgatgacggtgccgaggacgaggggactgtctggcgctgagacgaagaagaggacgaggtgcctccatatctagcggagtgggtgacacgggagctactgtacatcatcgccgtcatcgatgaagccagcagtgggggattttttgggaggaggatggggaggccaggacaaaggggaggacgttgccgctaccgctgagcaaggagagaccagatccagccatgacgatggccttcccctcctctctccctgaaaacaaacaaacaaaaatacactcaaaccaccagcaacagcagtgaaattaacctccgcgagacccctaatcgatctaccgaacaagccaaccgtgggttccgcctcggcatcgtcgtcgaactcgtcggcgttgaggccgcaccgctctagaaagcgagggcactccgtcgccgacgccgccgcgcccgaaggagccgcggaggacgccacggggagatggcgaacggggaggcggagggagggagacggccttagggtttggtggagaggggcgggagaaaggggggaggaagcaagcggtcagggagtcggggggagcgagcgggcgtgaggatgaggaaggggaagagacgagtgggcgacgtggagggctcggcgccaagcgatcccacgacgcggtaagcacgggcgttaggaaaaaacggatggatagatgtggcccatgcacaggatcgaatggtccacgggaaaggcatctaaaacccaaccatattcaatccatattagcgaggtgtctcaagcggattagtcaacaggagccaaatcgctttgggagcggcaaacgcaggcgctttaagatatctagtatgagtcatgtgctttgcaatgggtgaacttaattttaattgtgccggaaaaaaaccgttcattgcataatgaacattaaaaaataattgttttcattaacttagcacaaactaatcaaattgtaatatgcagtgcatcatagaaataacagtagtggcaacccatgggtgcaccaaaaactgcccaccccattggctcaatcaaaacctaaaaagcaccaatttcatgactccactacattactgcattatcactatataatcacttgtatatcagacatcacataagtgggacccatttataatatcagaattaaaaaatatacatgggacccatttgtcattaaaaagattgtaggacccactgacaggtggggcccacatgtcagtcaatcccttcacccatctctctccatctctcatcttgttcttactgggatgtctctgaagtgcacgtcccacaacacgtccatcatctcaacgtcagtgagcacggtggcgcggttgctgcggaaaccccaccctacacagctcacctcagccactctcttcccatcgatgctgacccgcacctccccctcgccaccgttgtcactgccgcgggtggcgtgcaccgccgcctcgtgctccaccccgccctcccggaacctacactgccggctgaggacaacggcgccgcgtggggctccgtcgctgtctccgaaccggcgagagaggtccaagtagaatgcaggcaatgaggggtagaaaggttatatggtgtgcgtggatgggtcaatagcgactaaggtggacagaaaacgatcgggaattgatggaagtgttcaaaatgtgaacgagtgaactttgagtactattaaagtaaaccgatatctttaagtgctataaaaaaacgtaaactttcgatgctatataaccaattttgcataaatttttagttaggttaagataagataagataattagattgagggagttaaatgcatatggactaggtacgttatgcatgagcctggactacgggcttcggcccatggttctatcgatagattgatcagataactcgttagagatagcatcggtttccaatatctcctagattcgtgccgcgatattattatttttttttctgaaccttccgcgcccttctggccgcgcgccacgcttcaattcgcctttcaagtctcacccgagaacctctccaccctccgccatcgtgccgctgctgcgtgatcagcgtatatatactgtgcgccgtcggaattaacttggtttcgtccttcgtcgaaatcaacttggtttggttagtttgcggtgctttaagcctaaccggtgcgtacgtatactgaagccattaaattttcgtttatttttcactgcacgtagatatatacgcgttgctaaagggcacaaattaagattaacttggttgcgttggattgattttgggaaaagctgatgcttacataagccaaataaaaatctggtatagccattcaactttcatatatatgtcgtatggcgattttaaaattttactcaattagttttctcttaattagtagtatacctacgttcttttaatatatatgatgccgtttactttttaaaatatgtttaaaaatttatcttatttaaaaattatggaattatcatttatttcgttatgatttaatttattattaaaagttattcaagcatgttatatatttttaacatttgtatataaaagttttaaacaagacaaataatcaaacctacgtcaaaagtcaaatgtatcgtatatttaaaaacacacggaatatcgaacatctatgtatatgcatgcaggcggtacatccacactagtaattcaacatgcctcgagatagaggagcgtcatcaaaaaccctcgccgagctcggatacgtggtcggcatggtcatcacgtgctacgtagagcgcgagttcattagggcaagacgtggaggccttctcgcataatacctgacaacattctatttgatgcccatgggattctacttctttgagttgaacagcatgttcttagtttgcgacttaataggagctccaggctggatcaggacccggggccgtttacgagtgctccttttattctgaagtgcacctacagtttgttaatcttattaataaatagatagtgcattttgtattttaatttattatattgtgtttaaatcttcccaacttccttgtcttttctttccgttttgtatttgcatgggttcatgaacccacaagctcatagaatataaatcaattgatgctctgaatttttttcaatatatggtgtatgtgtgttacacaatgaggaagagattgtagggagtcgtcacggccagttgctcgatcgggtgattaagccgatgatgtgggggctaaacggttaagaggaagaagccaaaggtggtgccgacattgaagacgtacagaggtcaacaatatggtgggcgacgcacacccaatctcttagggcttgtttaggttctaacttttttcttcaaacttttaacttttctgtcacatcgaatttttttttgcacacacaaatttcaaacttttccgtcacatcgttttaatttctttaaacttctaattttaacgtggaactaaaaacacccttagaagaaaaacaaacagtagagcagcaatactgtcgcaagcaaatagtagtgcaatacgtctcctagcatgcctcaatgttctatagaccaatgtccagaacaccacgaactctcaagtctcaactctatttatcaatggtccatattcatagcaccacaaattttggcatcttccttacttcctggaaatgtagcttatcttttcttttaaggtctttaaggttaaaggggcaactttattgattacggaaataaggattatattcttggtctaacaagtctatgatttttgcgggagcatacaatcttcacaccgcacaggacgtagagctcatagccatttcagctaaaactatgagcaactatgagctcatagtctatgattttggaggcaccggccgcatcatccctgcgcttcaagaatagtcgcagccaagatgatctcgatgaaccgtgcttatctctttaggtaaattttgatactccctccgtttcaaaatgtttgacaccgttgactttttagtacgtgtttgaccattcgtcttattaaaaaaaattaagtaattatttattcttttcatatcatttgatttattgttaaatatactttcatgtacatatatagttttacatatttcacaaatttttttgaataagatgaacggtcaaacatatgctaaaaagccaacgatgttaaacattttgaaacggatggagtacatgtcattacacatttataatattagaacatcatcgtttctatttgtgaaaccggctatgttccactgaaatttcctaaaatttgagccatgccattctcttcacttttttctatcatcttcccaaactccatccatcctcatcgggggaaccagcatcctgtggtggcagagcgtgtccgcggcggcggcggcaccaacatccggcaatgttgtcgagcacagttcgcaccatgtccttgatcaccacctccttgctgatccggtcgacggcgaggtgctcgcacgcggggcaaagagttgctcgcatattgatattgaggggatttagccagaaaaattaataatcctggtgaagattgagcaggattttgtggtttaattaattacttgcatattgcaatcctgccgaatctccgggacatgcgatgtgtgtcggcacacagctgcacggcgaggttttcgttggagaggccgagtgagtagaggaactcgacaaatgcttgcgcgtgacgtcgacggtggcagggagtttgaggcctggtacgtcgatgccgaacgaggcgaggaatgtggcaacgttggcacggagcagcggtgtggccacgctccatgtcaaggaggctggggacgcaggaagtaggggctattcagattatgatactttcaaccatattatttttttttaaagttgctaaaaaaatatatacgtttagtttgttatcacatttggtaaatacataaaaaattctgctaaaattttgacaatattatcaacttgataaaattttatcattaccaaaatttggtaaagtttattttagctacaatttaaataggtccgtagaggaaagaagaggccgcagaatgggatgtgaccgcgctccatgttcatcgagcagatggagaccgcccgcatgcagctccgccgccggcgacggctgctaggggacgggcagaatccggcgcatccagcacgcaccatgcggacgacgtctacgaccgctgcctggccctcctcgacttctcagatagccgccggcgcactactgcgttatactgctgcctttgcaggattttcgggagcaccagcgaaaacaaaatccgatcgattccagggaaaaactgacaaaaaaaaaccgcgtaaaaaaacgtttcacggaaagtaaaaaaaaagtgtctgattcccgaaaaaactgtcgtccaaagaaaatagttcgtgaaaaaaatattctgattccattgaaaaaacaccataaaaaacccggttcggcatcacacaaacgctttatatatctttatctctatcaaaagcgaaatatgttgttggttcgtcaatttattcttcggatcggtttctcggcgatgtaccttttggatttttcatgcacgcatcgacgtactttccgaatcccgcgggtgtcctccacgcatcactaaatcagtttgggccaggtttttccgcacgtatatatccagttcacgatcccaattagatttatctgtgtagatgcatttcgagatattttttttgtctgttggtagagatcacatccatcgccaacaagatcaaccacgttggtacggatcaaatacggcgcccacggcccacgaaattttccttgagccgagtatgtgccaaataaaaggagcaagcaaaacctcattgggacctaaacacctctcgtcgcctagctccttgttgccaccaagcggccaaagccaatcaccatgagcccatgatgtgctctcgacgatcatccatgtgaaactctcaaggcgagagaaagttttcatacatgtatccatgagatttagattggttcgaccaactacatggtcaaacccgactagctctttgcatcgtcaaaatagtgttaagtctaaggaaagatccaacatatgagagaggtccataaataaattaagaaaaatcaatagctctaactctcgttttggatcaattatcgatattgatttgactatggataaaaattaagaaaaatcaatagctctgtcattgcttttggggtgtaaattattctattgtgcagtgcacttatagtctaacataataaaactatttaattgatactttgacaggttatggacaggtaacatatttatttttatgtttttacatgttaattgaatataaatttttagttgaaaattaagatgtttctgacttcttttcaggtttaattgtaggctattaactatcgataaaattgagattggcagctttaaagccaaggatatatttttcatagattgatcgtagagaaaattgcattggtggtatacaaacttattaggatgatgcgatttagtacataaacttgtaaaatacctgtttcagtacacgaacttgtctagttcgtgagaacgaggaccaaaatatcattgcttggtttttttcaccttttttctactatcactgtatcgtattctattttttattagagaggtgtatatctaatagtaaccttctcaaatatacataatattctaatcagcccctgaatcaataagattagccatgaagtgtccttttcgccttcctccgcacgcatcagttaagttcatgcaccaaaatgagcattttacaagttcgtgcactagattgcactcacctgacaagttcgtgtaccggcgatgcaatttactcttgatcgtatgtattctttttatgtttccctttgcggtttatgtttatcttatattttggtaagctcttttacttcctaatcaatgacttggtgttaatagctatctataaatagtcaaatactaattagttagagcgattgccttcatctatatagtaaaatatagtaaagtaatgcaccacgctcacgctcaatatgcatggttccagctccgccactaatgcccatgacgccatcttaataaattcttaacttcacctcaagcttttacttgcaccgtgcgtactgcgtccgtgccactgtttgaaattcttcttgaggttaagaaggacctgttttagacttcctataaggagagcagaagttctggaacaaaacaaaagaaaaggtaatttcgaattggtaccaaaaattacattaccaattttttttagtaagttaaacagtaagagttcctttgaaacacctcactgaaaaaaaagtacggatagaaaaaggaaacacacgatttttatctattccataataatttcaaagataaggatagggtttcctataaattttcccctataataaattgaaagtatctcaaattctttttttttttacaaatcaatgggtgttaaatgtggtaggcttggatgaaggttaaacaggcgtaattggtagtgcctacgtttaatttggtcatattctagaagttcagtaccaattcaaacaataaccagataacattaccaaacaattgatgaggtagagaaccaaacttaatcgatctcaactaggagagttacttctctatctctacttctctactattataaaaattgaatatgtttttgccggtattttggtacgtcatccgtgtatgaatcggtttttaagttcgtttgcttttggagatacatatatgtatttgatttggtttttaagatcgttcacttttggtaatacagaaggaatcatataagaattctgtttaaaaaaactcgtatagtaacttgagacgattagacgtctaactgcagctcatgagggtaccgagctcgaattcgccctata

SEQ ID NO: 9845 - DNA, 11932 bp, Oryza sativa
  unsure (1)..(11932): unsure at all n locations
gtgagtaaatgctagtaggaatgaataaactagaatttgattaatcggattaaaatccttttttaatagagcaacatgtgagtaaatgctagtaggaatgaataaactagaatttgattaattggataaaatccttttttaatagagcaacatctatttcccataacattatttcataaaaagcatattggtcatagtaaggataaacaagtgcgatgaagttacactcaaaactaaagatccattcggcgcatttcattatatgattatcccacactaatatgatgtatctcttagtttttgtctatctctaaatctacccataagtcatagcaagaagtatcaatggctccgtcgaaattggaattcagcaatgatgaaagagggtagcacacgagacctaaaagtaaatagatgcggagacaaggatttagatggatttagacaggttcagaccatctcaataagaggtacgtaagaccctactcttgtttggagattgtatctactgggtgtagtattgatctgacgatctaattgtggttatatgtgttcttgctcttgaaggactctcccagctcgtcttatataggttgggggaaggattacagaggagcctgccttttatataggctgggggaagaattacaaaggagaaacctagccggatacaacattagtttcctaatctattatatgatagtactcggtcggagctctatacctgccttaacatacaaggcaacataacaactgagcaactgagttctactctattatataatatatgaatccggtccacctactatctctagtcgaatatagaaaccgtgtggatgtccaatacacatattctctacagcctcatcgatgtttttagttttagtatatacgacattacggtgagtaataataagacttgcaaccttcaagttaaaagatgtaagataggagtgaattagcccagggcatggccttcaaatcgcaaccttatgaaacccctttcctaacccaaaataactctcggccttagctcctaccgtcactcccacgtgtgccgagcttgcgcagccaacgcatccaggacctgacacgtgcgtagttccacgtgtccttcttctccatgtcacgccggctgccaccaccacggtataaaatcttgcggcattgcacggcgcgcgctgcggcgagagccatggcgcaagttcaagcccgacgaccaagaggaggagaatgccaaggtcatcaggtagtacagcctgatggcggcgacggcgacgccgagcggcggctcatcgccccggcggacgcctcggggcaggccgcgcactgcggcggccccgtcgtggaggtcgacgacgcgtacgacagcaaggtcaagatcggcgaggcgctggaggcggcggcgagggcggtcggggaccagcccgtgcgcgggtccgacgcggcggcgataagctccgcggaggcgagcgcgggcgcgggcgtcgtccccggcggcgtcgccgagcaggcgcaggcggcggcggacgccaacgccggtgccgcgccgcccgcggaggacacggcgatcaccatcggcgacgtcctcgcggtacgtctcgtgcagcatcgatcaacccgccgcgccttctatttgcacctgatgatctcactcggccatggcatctgtgcctcgtttctagtggaacgcgacggcgatgctgccgacggagaaggcggtgacggcggaggacgcggcggcggcggcgggagcggaggtggagaaggaccccggcgaggggaccaggccctacggtgtgagcgcggcgctcgccgcggcggcgaagcacaaccgggaggacgccgagtgccagtcgaagaggagcgcgcagccacgggcagccgacgaatgtacacccgctctggccgagcagttcgaccaaatctagcgaatttagcatgcgtttgattatgtattagcgcgcggtttgccgaacgctaagcgaatttagcgagtgcttgaatccaataaaataattaataatatgcgtttgatcaagtattactaacacgcaagaattattagacttttttatcgtaaataaatggagaattacagggctgctaataaatcgtcttggctactcgagccatgttgcctgttgcgagagcgagaccagtgtgaccgatcggcacgacgtgccacgctcgaaacaaaggcggttgggagcgccgaactcggcatggcagcacacggtggtggcatgtcgtgtcgaccgctcccgatcccaatccgctgcgaacatgtctcgcgcgcgccttccaaaaaatctgtttcatggcacgttgcacgtagaaaatgggaaagtggttttatcccttaagatatctcctcattttatgcttacggatacctccttattctttacatatattatctaaatacttcaccttttcatattataaatcttataacttttctttgtcaaactattaaactttaactttaattatgtttgatcaagtttatagtaaaaatatacaaatatttttaatacaatacaaacatattatcaaaatatatttaatgataaatttattgagatttagtgttataaattttgctaatttttctatgaatttgattaaaacttatcaaaatatatttaatgttaaatttattgagattcagtgttataaattttgctaatttttctatgaatttgatttaaactaaagaactttgaataattgacctctaatataaaatggttagagtattatcttaaacagttatcaattttttaaaaagaataataagaaagattaatataaaatatatctatcatatatatgcaacttcaaattaaacttctaaaattataagaaaagtacgtcagtattatttgatattatatatttataaatgttccttctaaaaaagatttttttccttcaaaaataatatatatttataaaatgatatatgttatattaattattttttaaaaaatatatctatttaagcggtatgtaaaagacgaggcaaaagatgaaaaacccatctccatctctttcagctagctaacgcagcagcacaacgctcactgtgcatgcagtccgtgaagtggctcaagcactcgaatctaccagctagaatcaaaacacgccgcatctgccatacccataccctctcggctctcgctggttacccctttcgaccgccaccggcgcgctctggtgtaaaccccccacgacgccacgtactctcggtctctcgccccgcgccctcacgttgtcacgtacaaatactctcgtcgcgccgcgcgccacctcgccgccgaggcacgacgcgcacttgcgccacgagaacgtgccacgtcacgtgtgttcttttgacgcaagcatgagccaggggcagccgaggaggccgccgcccgacggcagcggggcccggccggtgatgtacggcgacgtgttcgacgtctccggcgagctggccgggcagcccgtggcgcccagggacgccgcgaagctgcagtcggccgaggaggccgtgctcggcgaggcgcagaagggcgggcccgccgccgccatgcagtccgccgcggcgatcaacgcgcgggcggggcacgtcgggcgcgcgcaggtcaccggcgccatcgccgacgagggcgtcgccgtcgccgtcgccgagaccgagctccccgggcgccgcgtcgtcaccgagtccgtcgccgggcaggtggtggcgcggctcgccaccccgccgcgggtggtggccacccagccgtccggctctctggacaaggacgccgtgacgatcggccgcgctctggagtggcggccgcgaccgccgcggcggcgggtaagccggtggaccagagcgacgcggcggcaatccaggccgccgagatgctcgccacggggcgcaccgtcaccgtccccggaggcgtcgccgccgcggcgcaggctgcggcggaccacaacgccgcgcccgcggcacgcgacgaggacaggatcaagctccgggacgtcctcacggtgccatccgccgcgctctgcgatgccaagtccgctttcttttgaccgtacagcagctatagctaaccttggatggtgtgtgtgtgtgtgtgcacgcagggggcgaggggcaagctgccggcggacaaggcggcgacgagggaggacgcggagagggtgccgtcggccgaggtgcggaacaggccggacatggcgacgacgccgggcggcgtggcggacgcggtgaccgcggcggcgcggctcaaccaggagcgcccgacccgtagcttttagcgagcatatgtgtttacggtgctaagtatgtttttcttttcgtttgttttattttttagcaaaaatgtgcgtgctaatatgttctatatactatgaataaaactgttatgtgtagcattctcctccgtataagagagtcgtcgcatgtgttaccgtaatccagagtgctaatagtttacaacgagcatatttgacatcaatcactactcactaatgatcgatcttctagacgaagcagcaatataatacatatatactccctccatccctaaatatattatataaatataaatataatagtactatataagagattttgtaagagattttggatgaatggtttgtattttagtactacaaactcctatataaacttctgtatagattcataatactaagatacgttcattcatccaaaatctcttaagatacgtcaattcatccaaaaattcatccaaaatctcttgagatacgtccatttatccaaaatctcttatagatatacgtcacattcatctaaaatctcttatggtttggttcatctaaaatctcttatagtttgggactgagggaacagtcattaacaaatatttatattcccagtcattaacaaatatttatatattaaaaaacccttatattttgagacgagggtgtagtcattaacaaatgtttatatattaaaaaaggagggattactagttacataatcctgacaatctattaagcgatatgtactgccaataagtgcagatataatcactccttagtgtatattcaccatatgctgtgaaaattgaactcattgaccaacaagatctcgccgctgcaagtattacaaaagaacgattcattgaactttgcatttaactttctaacaacagttgtgcactgccttcttttcaacttgaaacggagccagtgagacacatctacaagggggtcggtggtggagaatgcactttgagttgcaaacttgcaagagattttactctttcaatttgatgactctctaagacatacgcgactagtagcttgttgcagcatctaaacatctgtcagaattatcgatgatacaatcatgacatacgcgaggaagaagaacatgacaatctggatgaagaacttgggattgtccctcaagctcggagcggccactgatctactgcttgagaatacaagaataaattcagttatgtacagtcggtgatgagctaggtgtggtacaaaatgatgcattgcagcatatcttaccttgcaatgcgttgtgaaagccgatgaaagggtaggctctgtatgaagaccacgcctggtcctgtgagagatgctgtaagctggttacccccctgcatagccgatggttcatcagtgtaaggaaattagttattttcaacaagaaactttagttgataggcagtaggggggacggatgtactcacactgaagactactcttctcggttggttaggggttttcaactgaaagttgatggtggttgtcatagccacaatacaagcagcgtcaactgtaatcacctcacgaggggcaagaattttctgcatgactagcaaaagtgaagagcaaaatctgccagagttaggggctttgttggccagggttaaaaaataacttgcttatgtcaaaacaaaaacgatatgagttcaaaaggttccatgctaatttgaaacaaatcggagatttcatacttcactatctaacttatgacagaatatgtaaatatatagtgaattggatagtgccgcaggtattgccaatgttgacaacattaaaatcatgccagcataaactgtggcaccatattatgttcctttagcactagatagtatatatcctcaatgcatcctaaaaattttacagaacatcagaaccatagctcctaattatagtatgaacaataatatattctagtatttactccatagatcagaacagtattgcagtttcaaattccaaaatcaatctccagtccatgaaactgacacaaagggtgaaatgaattatacctgatccaccaccaacaaggaaagccatcccttgacccctaagcttctgtttgaggatcacctgtagagggaatgcacatctttcaattcccaacaaaaagttaacaagtactagcttgcaaagaactaacaggtcccacatgatctccaaagtacctaaataattagttaattaccctacctctgcaccaatttcaatgtttcgcggcctctgctcaactgtacttgtgactgacacatcattaactgagcagagaaaagcatctgcctgaaaggacaataaggtaatatgaggtttctgtgattgttttcagccaaacaactaacttcgcacataacttacctggcaaagaagttctccaccaaagtttgctagatccatctgtaatataataaacattttccatttatgactaagaaagcaggttggtcaataatataagtaccactttccataaaatttaatagagtaaattatatgaacactgaaccaggtattcattttcacggaaggcaatggtttgctggaataatatgataatatcacatctagtcatccagaacctacatctcatgcagcttactagattaactcatacatgttattatcatgctagtatgcacattacacctcattattaattgctacaggaccaaattctaatgtatgcacaatgaactgttgacctttttatctataggtaaaacatatggttcagattggaaacaactgagtgctggggagtgcatttgaaattttgaacaaaagaatgaagcaagtcctccaacagtctaaattctgaatcataattatagaagaatgatggaaatttgtcagtttgtcactaataagatatgtaatcttgctaattgtaagaggacaacagtgatgattacccatgagcgatatgctcatatgcagttctgtacagtaagtaaagtaatggtgcagagagtcaaagctaagctacaagtaggtgaaagatgatactagggatttgaatgacataatgactctattttcaaaaaagatactaacaggcagtattctcccaggaaatggtgcagaaatcccaacatatccatcatcagagccagggttgaagaaaacactgctgcttatgcttttcccaaaaatccactgccacacacctccatcattttcaggcaagtagttgttgtccgtttgaatattaccagacatgtagcacattgtacctgaagaatacaacaatgatgaaagctacacactaacaaactctaagaacatcacaggattcacagaagccatatgacaagcactagcagtaacaactgcatacatgtttttttcgagggagtagggcaggagctctgccattcatctaaagaagacaatttgaaatgtttacaacaacagttttggatttactattacaataaccgcataaatgtatgtttggctccgttgcctatctatgagcatgtaaatccttatccaaatttaggtactcctgggtaggtaaaggaacccacatagccccttaatttactaggaatttcaggacaagttacagtaaattgcactacaaaaccatgatagtaatgaaactactcatgtatattagatttatctggttttatcataacatacaactaaaagtatggtggtaatctatagttctgcaactgatcccaattattacaaagttaaccttaaaaacaacaggtaattcagcatctgaaacaaagagtattcataaatcgggcaagctgcagatatttcagctgcaaaagagaagttcaatcaagttactggagagtacctggtttcacggtcaacttttcctgtgacttaaccatcacctaaaatatcatttcgacacaacaattccgaatgagcagggttcgattcctcttaaggatcgaagattaagagctagcaaacaagaataaccaggagctacctgcaggacctgcacatcgccgccggatatctggaacgccgtcacagatccttcctggctctggaaccaacacacacgattcaaaccaggttagatcagaggggattccaatcagcaaccaaacgctacggatcgggcggatccagcccgacgagctcgaatctagccctaacatccacgccgggataagaccagaccgtgtgtgcgaagggaaaaattgaaggatcagatcgtgcagcggaggagccccacctggtagacgtagggctggaaaggcgtggagaagaagggcgcggccatggcggggggtcggagccttccggaagcttctagaagcgatcagtgagagccgactcggagcgtcgtcgtcgggttcgagggaggcggagttgccattcgacgacctctcggggtccttccggttcagggcttaatttctcgagtttttatctcctcttccttttgcagtcatacgacgtgggattatctgggccgtcgatcgagttctggacggtgggtgatgcaggggaggtgcttgcgtggctggtctcgtggaagccctgtgcacgtatgcgtccgtgtaatgttggccggtatggcctggcacgacttggcaggttaatgctcaggtgaatttttgggattgttggctttttttttttacacttacccaccactgcacacgaatttattcccgtttaaatgaatcttttattttcgtcataagttggtactcgtagttgagttctactgtaaatgaaaaagatacgatggtttttgttaacaccaaaaatttaacaccttgacacgaaataggaaatcattgtcagagtttgaaaagtacgtttctttcacatgaccagtctgaccgacgacttgtgactagtcagaccggctaagtccgagtctgagtctcgagtttcattgtttggtaatctattttttcgagtcctaattgatctctaccctaagttagacgtggaggaggtcttatagaaagcaagataaacctctttataagggtcaagaccagttcgattgaccacacaatctgtttctagcacaattagccaattgaatcactttttcaatgtcgcatatactttctgcctaattctagcctagttttgtccatttttgtcggtttgaactaactgtcatctatcctcgctgtaagagtgcaaatacccttttgtaaacttttcatttgcccatgagacgggtgtttatccctgtttcatctaaatcggctccactggccgatttaattttacaaaactcatcttgatttaggctgtgttctttgctcaatgttccacccctcttcctcgtgttccgcgcgcatgcttttcaaactgctaaacagtgcatttttgcaaaaagtttctatacgaaagttgcttaaaaaaatcatattgatccatttttttaaaaaaattaactaatacttaattaattacgcgctaatggaccgctccgttttccgtgcaaaggaaaggagttcccaatccactgaaaagaacgcagccttagctttgtttagatcgaggtggttggcgactccgtgtcaccatatgacgtttaggtgtttcgatcgtattttgtgacttgttcaaaaaagttgccaacaactttgaatcctaaaaatatggtaacacacatcgagtgaggtatagccttgaatctaatgtctaaatacaagatgcaacgtgtgagatatgcacttctttctaatgatagaaatccaactaaattgtatcgaacgggtgcaagtgcacaagattaagagacaagctaatagggttgctcatgtgttagcacaaatggcaacgagtactaggtcgtgtggggaatggaggctgtgcgcccccgcatcaatcctagacttgttaaatcaagaatgtaaccctctatttagtcattaataaagttctctcttgactaaaaaaaactacataaaacccaacggggttagacattataaaatccacttatatataagaacgctataccattactcatccaatcgctttatggcaaatatgcttcaagcttctgtcggttagcaagttccacttcatctaagatataattaaaattcaagacaacaaatggggttgatacctatcatgccttgccacactcggttagaagggctgaattttaaagtgtattgtcagactgttggtaacttgatcatactttttcctaaattgctttaatttgggatgttttatcttctcgttatatttttctgttgttagtagagaggtgcaaccccttaattttatacatatataacacacgtcttatatgaatctcggtaaaaataatgatggaagatgaaccttagcatcccatatcattaatgtcctcctcacctgagatcatgaaacatgaaccacccctattcgatttattcaaataactgaaatatgcataactctcaagaaacatgaaccgcccctattgagtttattcaaataactgaaatatacataacgcttaacacatatgacagtttaattaatataatgtaaccgctgatgtgataaagtggcaatactatggagaagttatatggcaataatagaccatgtaaatgattgtgctttattcttagtttattaccatattatacaaaagttcaatgaaataaaaacaattgtctttaatatgtccggctatacttaaaaataatttatgtcgtttttcagaaagtagtaaaactacattttgatctcacctttagcgggaaaacttgttgctaataccggacagaaggattggaaaaagaaagatgtaattacctaaacacaaataaacaaggtattgtgatttgttatgttaaaagatgaagagttatgataactatattttgtcgtatgcgagggttttataacatacgtcatgccatgttgactcattggaatccgaaacttatagcaacatcaaatgtgaaatgatccattagattgtttggaccttttgtttatttattattaccattaccattattattattttttagaaaataatatagatatgtgataaggtctatatcttttcagacttacctaatccaccatagactgccacatcataaattctacgtgtcgtcctccgattcaacctccacgacacccaaaaaccctctccatgtacaacgtggcggtcgcgccgtgccagctggaccgcgatgtggcagaccaagtccagccaaggcccaaccggcccatatcccagcattaactcgtgtccagttttagccaaactcaccgtctacgtacgtacgttacgtatacacatactccatacatacgcccaccgtatatgatattggtagagtagagatcagtagacctgaccaccagcctcccccacccccacccaacggagagagaatacggctactcccattctctctctctcgcgtcgcgttcgttggctcgttcgttcccctcctcctcctcctccacgctgctccacctctcgctacgcttcttcgctggtaagatcgcaccaacccaatcctgaatccttcctcctcatcccccctcgtctcgccgattgctgatctcggatccgttcgttaggtaaaccctagatggcttgatcgcgcaatcgctcggagcaaaggcggnggggggggggggggggggg

SEQ ID NO: 9846 - DNA, 42922 bp, Oryza sativa
gggcccatctcccccagttctcctctccgatttctcgccgcccttcacgtggctcacccccctccctctcacggcccaactgtcagcctcacatgccaaccacgcggcggggtggccaaccagcatcctccaggtatacaaaaagaaggggtcaatcgggtggggccatctgggcccgcgcggttgggcgaaaagcgggggagcccgcagctgcagctgcaactggcaaaaagaaaaaaaagataagctgggatgggtgtgagtgggaaggggaagaagcttccagaactctcgccccgggccttcccgaacgttcgccgccacgtcaccgcactaggcagcacaccatcccggggggaaggaatgaaggctccgcttccagaactgtctggaaacttccgcccccacatcccaacccacccgacccgacgggtatatatataggccggggtgggggcgcgaatgctggtcctggtttcgacgagctccatcatccaagtacgaaggggataaagggactcatcactccacccagctggagagaaaaaaaatctcagctgtacttgctcgtgttctttcctctcccttttcttctccgccatcattttctctgtactttggggtgtacttcatccttctgtattttcggttctttttgctctgatttgtcatcttttttttgcgagcgagctcgttcgctcgccaacgaacactcctgctgtagctgttcttggcgttaatgaaagccctgcattctcgcatttgcaatcgccatttattcagctgtgatctttgtagagtgttgtgttgattaagaatcgcatgatttgggttccattggtttgtttttgcaagagtttttgtgtttttctctgatcccctttcagctgattgaatgatcatcttctcccctaattctccatctgtctttggtggtgattgatcacttaaactctacacaatttgatattttttgcaaacttttcagaggcaagatcgttccagattgaattcgttcggtggagggcgatatattttttttcggcaaggatcgccattctcaccggtcgttcaaattcttctcctgcgttaagtggctgtgtgtgctctgttcgtcatcttcctctgctactcaattgcattggttggttggttagacatgaatccattgcgcgtcatcgtgaaagaggaggagctcgacttcgccgccgcggcggcggcggcggcggcgggtgagggctcgccgtcgtcgtgggcggtcggcgtgatggacctgcctcgtccaatggagggcctcggcgaggccgggccgccgccgttcttgtgcaagacgtacgaggtcgtggacgaccccggcacggacaccgtcatctcgtgggggttcgccggcaacagcttcgtcgtctgggacgccaatgcgttcgccgccgtgctcctcccgcgctacttcaagcacagcaacttctccagcttcgtccgccagctcaacacctacgtaagtccatcaatggcggaatgcgatgcgcggttcgtgttttggcgtgatcaatggcggggttcttgattttcttttcaggggttcaggaaggtcgatccggatagatgggagttcgcgaacgaggggttcttgcgggggaagaaggagctcctgaagacgatcaagcgacgccggccgccgccgtcgagccccccgtcgtcttcgtcgtcgtcgtcgtcgtcgcagcaccagcagcagccggcggcggcgtgcctggaggtggggcagttcgggcgcgacggcgtggtgaaccggctgcagcgcgacaagagcgtcctgatcgcggaggtggtgaagctgcggcaggagcagcagacgacgcgcgcgcagatgcaggcgatggaggagcgcatctcggcggcggagcagaagcagcagcagatgacggtgttcctggcgcgcgccatgaagaacccgggcttcctccagatgctcgtcgaccggcaggccggccagcacggcgcccggaacagggtgctcgaggacgccctctccaagaagcgccgccgcccatcgagtaccttctcacccgcaacggcgagacctgcgccgccggcgagtcggcagctatgctggcggcggacggcgtggcggaacccgacggcgacaccaccccgcgccgcgacggcggcggcggcggcggcggcgacaccgagagcttctggatgcagctgctcagcctcggcctggaggagaagcagcgagaggacggcgtcgccggcggcgtccaggagagtaacagcggcggcgctgacgtggacaacgacgaggaggatgacgacgatgacgtggacgtgctcgtgcagagcatatatcacctcagccccaagtgaaaggtcgagaaggttccacggcgaaaacgaagggtacgtttcgtttcgtagggtgacgtaatcgcaacagtagcgagtagtaggaatgtaggggtagcactgcacttgtctttctttccatttttttatagtttcggacatcttgtcgccgccctgcaagttgccaaaaaaagcagccaagccccactgccacaggcgacggaaggttcaagaagtcgagaagcttctcccgcgggggaagcttctagaggtgtccagtaagacagcacagtagctgcgggtgttcaagaagctgggaagcttctagatgtcctctaggacggtggcttcgaatgttcttcttctggaatttgcacctagtatcagctaattatgtgcgctgtattttgcccatgctactgccatatgcaactggtgcctcttatcccccaacagctactgctgcccttttaaaatttgaaagttacggagtaatttcagctgatttttaagtttcttcattagtagtttactttctgtattggttgtcaaatcttaaataaagttctacttataaatatcttggctatactagttcattttccccttgtcttttgtcatggaaggctgcctgttttgtcgtgtggtgacagttctgaacttttcatctatactggagtgctacgtggagtatatacatacaaagtgctccattttgtttgagccgtgccgtgagcgcgtgtccttgaccagggaaaaaaaatgttttgctttcaggttgcagaggacaagaggatgtcggtgccaaagatattttcaaacatactaaccgaaaagggcaccaaaatatcatcatctgaagatcttaacagtatcaagaaagtggttcccagctcatcaaatctaggagtactacgtggtaggagtatcaggctccacctgtacctggtgtcttaattaaggaaaaaagaacagagaaacgctcggagagatgattcagaagcttgacagcgagtatttcaggagtacgggtgtcgcttgctgcgagatttcacaacaggagactgtctgtcacggcgttgctgtaccacctctttaaaatggatcgtgggacaggacagttgacacgtagagtaacactcgtactacccgtttccgctaaatgtcaaaatcttgtacggagtactatctggattaaaattaaagtttatctatgaaaagaaaagatcatctcaaagcatagaaccactacaggtgtacagtacaaaagaaattttactgggcctctcacacataaaaaggagaaggaacaagtccaattaccgtcccttatctttacttcacgtttaattgacatccctaaattacaattggcttgttcggcagaactagccgttgcagcgctgcagcgcaactacagcagccaatcagcaactactcctataggtttgcaacaggacaagcatattaccgcattgctacaatggccatccgctgcaatgcttcagccgttcgactatgactatgctgtacagacgtaaaagcgcaggttggcttgccgaacaggcaaatcttcacccttcatcttagcaaagccgtctaagttaggtccatagcagtatgaagggctggttttgacttatgtggtattctagtcaggaaaagttaataaaaaacgtgtggccccacatgtcagcatccacatgtcgttcgtggggtggtggcgagcgagctcgtccgggcaccgtgtgaggaaggtagaggcgagagagggaggcggaggcggctgacgagcttgtccgaggagaggagagaggcaagtgggcggctagaagaggaggggggtgaccgggtaaggggtcatcgagctcgcattcctcacggcggtgtgcaagctcaacctcggtgacattgggagcctatgcgagagaccgtcttggatggtgcggaggtggaagcggcctcggcctccgcgagaaggtggagacaaaggcgactgtgggtgggcctgccgcgccaccagccaccgccaccacagatagccgcgatgccgaagaagatggtcgtcaactcccatgccaaggcaacccgcgagcgtcactatattgtggaggccgagagatgtcgggactgcctggagagcgccaaggaggagtattgggcgcgaggccgagagctccaagtcccgcgttccgcgccacaaggaggaggatgccgaggagcacatcaaggctgccgcctgcaatgccggcaagcccctccaagatcaagcttgcccagcctccatgcgagggaggcggagatgggaaatatgggggagggcggggacggctccaagcactggggtagggacgattataccatgcgaactcgtcgcgcgtcctccatgtcaacgtagtcgtggttgcctggccttgagcttgaggaaaccgagagcaggccatgcttaggcattgccgctgtcgttgttgactcgtctattgcgtttccccctcccatagctcccaccatcagtcgcgagcatggccgccggcagctcctcgaggcagatggccgtggatctcctgcaaccgctctcctcaatgtcgtctcccctaagctatggcagtcgcgcttgttgtctcccaaagctacgacggttgttctcctcgacaccggctcactctctgtctcccttgccctgtgctcgccgccacctttacggcggctctagaacatgagaaaggaacgagaggggagaagagaaagaggcacttgcacgtgtgtcccacatggtatttttattttcttttgctgactatgacgccacgtcagcgaaaccatctatccatattactagaggacctgagttaaacggttttgtcaagatggaggttgaagatttcgggtattacggttcaattttgctacatatttatcgacaaattttctcccaaaaatttgacagatgtaattacagtacaatcgtactgtaattacactgtaacttgtatataattatactgtaactataatgtaacttatctgtaactttcaaaaatctctccgtaacatgttatttcggtaaaatggaggtcgtgggaatcctttcacatatgtgtagggatgaaaatggttcggatagtttccgtccgtcctgaccaattttcggattcggaaaaattcggtcggaactatccggaatttctcggattcagaaacgaatttggattttttttctcggatacgaaaatgaatacagtaagggtgatatccgacgaaatcggaaaacggtcggaaactacccgggatttttcatccgatatccagtagtttacatgcgagcaaaagggaaatttttcagcaaaaaaaaacccgaaaccctagccggccgcgccagctttgcgccacccaccgccagccgccgaatggccggcgctagatccatgccactgcagccgcccgccgctggccgttgtggggccgaccgccgaacacctccctagggcggcggatccggcccctcacgagggcgccgccgccggatccgccgccctcgccgcctgccgctgccgcccaccgacgccatcgccggctcgccgcccaccgaagccgtcgtggcaatcgagcccgctgccgccgcccgccgcgcgagcccgcccgtcgccgctcgtcgcgtgtcgcgccgctctcggccggccgccgcccgctcggccccgcgtagtgagatagaaagagtaaaaagtgtgtgtctgtgagagagagacgagagaaagagtcaagagaagataaggttgggaaaaaatggtagattttttttcaatgtaaaaatcgattttttttacatgtggctctttaaaacgaattttaaggaactaaatcaactcatataaaaaagttgtcaaaaacaaagttgtataacttattgagatttaccatttttcttttggtcatttccccatccgagttttattgaactatataaattttgaattttaaaatataaaaatttaaataattttttgggtagtaaatgatttcaaatgaaaaaattgtcaaaaacaaagttgtataacacatcaatatctacaacttttgttttggtcatttttctatatgactttgtttgaaccgtttgaatttaaatttcaaaatatgacaacttcaaacaacattttgaaatactaaatgatttcaactgaaaaagttatcaacaacaaagtttcataactcatcaagatctataaattttatttgggtcattttttcatccgacaaagtgatagtaactttgttcacaaaatttacatctatctcatctggttctatagactataagagagatatgtaaactttgtgaacaatgttactatcactttctcggatgaagaaatgaccaaaataaaagttctatgtcttgatgagatctacaattcaaaatataaatgtagttttatgttcatgacttttttagctgaaattaattacagcttcaaaatataatttgaagtttttgaaattcaaatttttaattgataaaacaaagtcacacgaaaaaaaagtccaaaataatagcggtaagaatacaataacatgatagagcatgattttggaaacatttaggaaaaagaatcatccaatttggagttcatatgagtgagataaactagttttaaagtttatttttgcatacggcttcttaagacacccttatggaaaaattgatttttccatgcgggtccttaagtggtccacatacaaacaaatgaaaaaaattcaattattaaaaataaccactcaaatttttaaaaactttcatgttcaacccaaaatttaaaatattcaaccaattttcaaaaatttcaatgtgcatgcgaaaatttcagtgatgcacattaatttatttgttttatgataacataaatttgtatggaaagtaaacacaacattttctatctcccccttgcccttataaatagagataaaatttgaaaatggtgatgttttgtttttgaaaactaatggctacagctcttccttgatttaagaagcttattttgaggggtcttaatattttgataattattcgttagcgtattcgtttcaattcgtattcgctccatacctgtattcgataatattcgattccgttttcgtatccaggttttcgattccgagaaaaaaatatgaaaacaaatatgatagagcttgtttccgaccgtattcgattcgttttcattcctacatatgtgtgtactgcgattttttttcttcctcaccagaacaaatcttgtaatagatctaatgattcaaaattgcgtgaaacttacatacaagttacactgtagtacatgcaagttacagtgtaattacatgcaagttatagtgtaattacactatgattgtattataattatatctgtcaaatttttaggagaaaatttgtctgacaaatgtataggtggtcccttgcggttttaggggtgtgaattaaactcaacgtaaagacgagagacgtcaagtggacttatttccaaaggagaaatttcatacgggacgtgtttctcggcccagcccaaatatctagagtacgtcttctactcatgattacgtaaataatgagagacgctatttactccgctagatcagccaccttctcctcgccacgtacgacacaagcagccactcgcgcgcacatggccacgtcacgcaaaacccgcagaattacgcgattcgctgagcccttttctgcaaaaacacgcagcctccctcttctccccaatctagcccgtgacctcctcgccggggctacttctccatcgccatcgacctcgacctcgccgcctcctcctcctcctcctccccgtgcgaactccgggctcgtgccgagggggtggacgcgccggtggtgagagcggacgcggtgcggtgggccatggcggtggggtggcggccggcgatgctggtggtggtggtggcggtggcggcgtggcgcggggaggcgctgtcggtgacggtgaccgacacggagtgcatccacgagttcgtgccctacgagggggacaccgtgtcggggaacttcgtcgtcgtcgaccacgacatcttctggagctccgaccaccccggcatcgacctcacggtgcccgcccccgatcctcctcgtcttcgttgtgcttttgattttcgatgcaaggatctataactagatgggtttatgggtttgttttttcgtgatctggggcacgctggattggggatcaggtggaatcgtggtcctctttttgcgatctgcgatttcgcggtgcaaaagtttggggaaatttggtgatatgaagatatttcatgaataggtttcgatttgattttagtttatgaactaaattaacttggcgcggtggctgttcttagtcaattcgttggagcgtggtgcaaacttacgaacttttcgatgatgtttcgatggattggcatgctggtctgtagattttgctgcgtgacagggtcataggttcaactacgtgatagtgtgtttggtggctttccactgatctgcttataaaagtcactacttttagtttgggtggttagttttggccagtggcaaggtgttccagatgattttaccttgtcctgtagaaaatttaagcaaggttcttctctattttcttgatcgggtgtagagtcctgtctcttatgttttggtgatcttgttttaaagttcacactttaggcgttttggggaggctgaacatttttcacctccattgatgccagaatcgaattgttcgctgtgaatgcccctttagtttcttattaataccctgatatagaaaggtagatgaacttgatatttcttcccaataactgtagtttaattgaattatggctatctataaatcctcatcagaattcatttataagcaaactttggagaatacttgtgatgcagtgtttcttggagccacttcatttgaaagaaaagataatgtgccaatttttgcaaatgtgttcaaagcgcattctgcactggagtgtgttctgatcatcacacataactaagtatcattgtgttgcactatagcgttattccactaataaccttgtctcacttcctttcgtgatattttgtgctctcgtggaatgtaggtaacttcaccaggtggcaacactgtgtatacattgaaggggaagtctggtgacaaatttgaatttaaagctccaaggggtggaatgtacaagttctgcttccataatccatatggagcacctgaaaccgtttctttctacattcatgttgggcacatacccaacgagcacaatctggcaaaagatggttagtgttctggtcttttaccttgaccttttcgcttgtcacagtctcatatctgcttatcacgtcaatttatttgttttgagcattgaatcacaatcagtttaatatgcgatcataggtttatatttggtatgttcattttatatttgcgtacataagctatatttggttgcttttgcagagcacttggaccctatcaatgtgaaaatagcggagctgaaggaagcattagaatctgtcactgctgagcagaaataccttaaagcccgtgaagctcgtcaccgacacagtaagcttaacaatccttttgcaaatggtcactgaagctttggcagtttcctataatcctgcgtgtgatatgagaatgcataaatttgtatgaattttctgttggtccactcaccaccctttccacatgaagcaagaaaaaactgatccgttattacattttaaacactacaacattatcaccatcagaaagaagagcaaatagggatagaatggctaatatatgtgactggaaattggatattatttaatttggtttgtgtttaacgactttagcctgtccctttcttagagcacaataaagccacagtttgagtgagacaaatttctgtctggtctcccacttttgggctgttcttccattctgtctttgttcatctctgagctacctaactttcctcctttgttcttccatactactttctcaaattctgatcatcaattcttagctatacattttttagggcaaatcttgatattggtaagtgttaagttagaacctagtcaggtgggtcgatgtgttctcagtcaggaaaaggaacttgtcacctgttgctccaaaaagggagaatatcctctttaactaatatatgttcacatttatggtaattgatgtttcacttagcttctttgtaggggaatatatctaaagttgttttctctttggcttaacatatattcccctttatggtaattgatgtgctatatatagctttttcttgctcttgtagcatgacgtttttatgtattctatttttcttatcattatgtgatcgtggagagcttattttgtgttaataaatccagcaaatgagagcacaagaaggcgtgtcatgttctacacaatagcggagtacctagctttcatgggtgcaagcgctttgcaagttgtttacatccgtcgcctattcagcaaaaacgtggcatacaacagggtgtagaacagagtctacttcaaggcagcagaaaatggttggagcaggaaaaaaatatttccaacatattgtgttagcttttgcagccattttttttgggtttagtctaaaacgtggcacttttaaatttattgccttgtactttagaacttcagtgagatatgaagcacatttgttgctgaacaagtgaacacagatccgtaactaatcttcaaagggttgatgtctcaaagcaccacttgtgttattgtgttaatatgacttatgagggtcttcgttctgatataaattgatcaaattttatcctggtctatgcaattcattcaaagcacaacgtttcctcgttatggaatgaaaaggaagtgttctatgtcaccgttccagacaactataacaggttggtccttgtattctgtacatgtaaaactgcattagcagtatgtaaagttgtctggaatcatgttaaacattaccgacctaccatgctcttaactaagttactatactggaaaactgatttaagcttattttctagatgaactcataaagtttgaatccgaagtaaacagcaagaaggtggttaaacacacagagtagcaactagcaaacactaaaacatgaacaattaccatatcaatcacttgttgcacggcagcagaagagggaaacataagcaacagaaaaggcatataaaaagtaaattgtacatgtattgatcaatatctcagtatataaggagatctgtttgtagtatacatttgcacatctggacattttacttcaaattggaaggaaaaaaaatgattcgttcctgatgccattttttcctctttgccagacatgagcatgtagtaaaactgcacacgtgctttcagtttcagttcatcacactcttggccattgaggactaactacctgcagagttgaagttaaaaaccggtcagcaattagaatttttcattctgcttagtgtttgtcgattgagaatgcaatagggtacgaacctctaatgtactgaaaactaattgcatgcgactagctactactgatggctcctctgaactgcccgtgacagccatttgttccagctgcaaagttttcactggtaacctgcaacaacagttttgaccccatgcatatgatcataatcataaaacttgtaaataaaaagagaaacattgctaatttcaaattgtctcaccatgccattcctttggtatagtaagcgttcgctattaaggcacaaaatcctttccactgatgcaaaacgtcagctgacactggtggggtagtagaccatctgatgatcgttggttgtggtgtgcacaggattgtaatgaatactatactgagccacaggatgcattcacggacctaccaaaaaaaggggaaattctcgctaagacgaagaaatgaaagcacaggtcttatcaagtgtgtttgcatggtaaatgtgttctccagcagactacatgataccttacataaagcttcatatcttgccaatgcgacttagtggacttcatctatcgataatcattaacaaattaaaagaaaaagtaaagacatgatgatggaaaatgcacaccaaaactcttccacttgtgtataaagactaaagagcatattgtcaatgaaattagagtataaagcaaaggtaactgtaaactgagcactttatgttgtgctaacctcaaaggagtgaactttgaaggtcaagctggttcctcctccattggaccgcagagcttcaatctcaaggccagaatcttcaatatccataagttccttcctgagcccctcttcagtacagcctagagcatatgcattcaccccagcactaacaaactcctggcaggattgaaagcaccatattgaagaaaagttatgtccagaagagaggagaagaatttcagcgagaaacagtaccttcaggttatctccacctcctcggtcaatgacatttttatatcgcttgaataggctgattgctatattgcgtgatgagcggaagtcctcatccgacgaagcgttaacatgaaaccgatgctacacacagcacaatgattcagagaaaaaccaagagcagccgaattcatcaaaaggaaggactttgggacaaaatctgtaccagccaatgccttgtagttctttcacttaaacttctatagagataatggctcgccctggtaaagttaactttgcagctaggaacgatgtgcggcttctgcacatgatgcccttccactggattataaaacgcactgcaacctaataggttgttatgaggaactatggcatgctttggtgatgacttgacctcttggtaagcactcggcctaatgaacagagcggttccatgtagcgtcagcatgtctggatgctcatcagcctgcaagccgtccacacatttctccaataactggagagtccttcagaacttgccaacagttcaatctgcaacaaataaagctttcatgagtcattcgcaactattagttactccacagatcacacaacctcatattcagcccccgaagcatgtgtatatgtgtatacaagtgtgcaaaatgatcaataacagtgtttctttagggggtcaaaacggcaatgtttcccacacatggtatcaagatgtaaatagacacccaaaaaaaaaagaaaaagggtatgcaaagtgtatgttgcctcagtctgtatggtaccgaacaggccaaaattatgggaattttttttaggaaaaatagtgtagtacttgctatctacagttggtaacataagcaagatatgctaccaacaaatgcatcgcatggtatcagttgatcaaaattatgctctcgaaaccaaaaaaaaaaaaaaaagtgcacagaacaacccacaaggccaccatctcaggaagccaaaaccacacccatcttcctgtactgcctgaaggattgctacctgtatcattccactaattaattaatcgcagcttgttcatctcccataaactatgcggcatcatacatcatgaaatcagtactacctaattctgaaactatcgcttttcccccttccaagattatcggaaccggagaatctacctacaagatcgcgaccaaaacacgcaagaactcacatagcaccacgcggaatcaagaaaccgatcagaaacagcttgcagatgaggagcgggaggggaatacgagcggatctttacccgggaggggagaacagcagcagcagcagcggccggaatccggaggaggaagaaggggatgaagcggttgaagtggaaaatataaatacgtggaggggttccgtgcttaaaaaatataaccccactgtgtgagtgacggagggagaaatgtaattcgccggaaattcaggggccacaataaaaaacgactggatgagtggcgacgggggaacgcgaggagaggaaacgccggcccatcgctctcgctgaatctttgtgttaaatgggccggatgttggggctcgttagaatatgctgtttgggcttctttcttagttgggcctggcccatacacaaaatattatcatttttttggtttgtttatattaacaaaatggcggtgagtggatctagcattgaagccaattctcgacttcatttcggtgaaaagaacatgatttcgggttaaaatctcagccatgacagaaaattgtaagctcaagggtctttagaagaagggggacacttagaacacatgaattctacaagatttttattgatctttagttcagaattcagatcctttaaaattcctctgtatcaaaggtggcctaagcatagaatcggaacttttccctatggaacgaagtttttgaatgaatcaatgcatctaacgaaaccaaaaaaaaaaaaaggaaacctaaccctccttttatgcctgcattttgacccccatcttgaccaaatccctgcaggcgtgtgcaatgctaactcatccgcaaataattaatacaaatgtatcatccttgtacattcctatgatttagtcaaacgtgttaaggagcagaattggtctactggccaagctagattcagatatgaattaagctcaaaaacaaacactccatgacaattccataatcccactgctcctcttgattcccctggtgatatccataccttacaattcctccactactcccttcacacctcaccaatgctgcaatgcatgaaaatgccatgattgagctgtaccattgaatcattgttcttgttcattaggattgtgtttttttctagagaaattagaatgatggtggagtatttatcacctaggtctaatggcatgcatgtcatgtcatgtcatgtcatgtcatctttattttaactcaaaatatcatactccctttaagaaaaatattcacggaatgatgctattaaatgaattagtgaatgagctgattattgagaaatgcatctagtagttgtagatgagaaaagatgtcctgatgggattaattaggaggcttttatgacgccatcacaacaataacaacactgcaacgcccaaaatgcaaaaacatgggagaattgctagcaaacgtgtcaaccaggagattcatctctctcgcgtcgtactcatcaatcatcattcaccaaccagataatccacacagcacacgcacaatgtagaagctaccaacaacttccacctgtgtgatgttgcttgcattggagatgcatgtgcctgatcactgtgatcttacatccctgatgattaccctatctatatgaaggctccgtttggtcttaatttgttttcacctgatgttgtcttgatcattgaaagataaacttagtccaaagctatcttcaaagcaaccgattaagttactctagtttcataccaccatttcatgattaaccatcataatctgcaaaaaagaattcctcaaaaatcttatatttttaaacggataaagtagtgttctctcatcctttggttattagcggtagctgaaatttaaaattttaaaattaatttagaggatctatcgtcataatttatattttagcattaactttaaaccactaactaatggagtaccattttacctataaattgtttcatgatcatacaccctttatctccaaataagtttatttccaatctatctcacacatatcaatacaaaacaaataagccataatactctcgttttctcaaattccaatacaacttttttagaaacacaatacaaatcgtaatttaattttattttattttcaatgtatttttaaaaattttataagctataatctaataattaaaatgttgagaaaaaagaccagggtgtagcctcatagcgcttctgtcagggtaatcccaacccataaactattaattagttttcataatttctatgtcatatagacactatatatataaattatatacccaatggaaggtatctttaattaaattcttatctaatcaccgcttttctctctttttatctacatatcctttgttttaattcctgattcctgtatagagatagtttcttgtataagaaatagtttcatttatctttttacctctctttttattaattctcttataacatcaaatttttatttatgtggcagtggatttaatgctattcatactagctaagacggagggttgagattggccagagggacaccgtctcacaggcggtgctggttttggattgctaaatatgatgttgacttaatcctttgccatttagctgtctcgctttacgctccgcgactcccgctcttgtcctaagactttcccaccttctcccactgaagctgcatttctacatggttgatcgatgctagctagtgtaaaggagttcatcatcctagatggcttagctaatgatttattccacttgcattagttgtgggaccctgcaagcacaaagggatggtggattcaaccaccgttaacgtgtcttaactaaaaatagggactggtttatatgtactaacttatatattccctaaagaaaaactatatatttatgtatttatatatagcaggacatgcaggaaagctagatgctcatctacttgtttagagttgggactttggattctgatgggaacagttacaatattagattcaggtggttaatttaagatcatgtgtatggaggattgggattcggtgacattgccccgtgacattctcggtgacattgagtcactgacatgtgggtccagtcacatgtgggtcccatatgtcaatgactcaatgtcatcgagaatgtcacagggaatgtcactgaatctgtgttcgtgtatggataattttgtgttgattagtacaagagatggatgtcatccatggttttcatctgagattttttttcggttttaattgccgtgttaagccaacgaaagatgattcccgtcttgttttaaaaaaaaaaaaatctcgtttcttcttttgtctctgtcatatgaggtgtgcatagtaatgggaagcgggtacaaacaaaacttgcactgcgtagattggtgaaagaaaaatcatcatcgttgaaaattgttagttttcgtgaacacgaatgaatacaagtaattaagctgtttatttcaaaagttcgctatttcgagaggtttggggttaactcccagtcaaaatagtagtaggcactcaataatatagtaagacttggcctggtttgatttaagattgttgagcgggttattgtcatgtattatccacttaattactacctctgtttcagattatcggactttttagcattgtccacatctattatattatcttctattatattattaaaggaatagaaaaaggagcctccacattcgctctcatgccctagaaattctcacattaatcgaagaaaaagaaaaagcatagtccatatagatatacaatttagaaatagctgaaattcggaattaaaaaaaaggaatattagaagagaagactagagtccatatagaaatacaattaggaaataactgaaattcggaattaaaaataaggaatattagaagtagagtatagagtccatatagaaatacaattaggaaataactgaaattcggaattaaaaataaggaatattagaagtaaagtatagagttcatatagaaatacaattaggaaataatagaaatttggaattaaaaataaggaatattagaagtagagtatagagcccatatagaaatacaattaagaaaaaaaataaattcggaattaaaaaataaggaatattagaagtagagtatagagtccatataggaatttaaaactaactaaaatttggaaataaaattaaaagtagagtttagagtccatataaaaatataatttacgaataactaaaatttgaaattaagaaaaacatgggaagaagagtttaaagtcaatataggaatacaatttagaagtaactgaaattcaaaattaaaaattaaagaatattaaaagatgagtttagagtccacatagaaatgcaattagaaataataaaaattcagaaataaaaataaataatattggaagaagaacatagagtctatatagaaatacaatttatagaaaattcggaattaaacaaagaaatattaaaagatgagtctagagtccatataggaatatatataatttacaaataactaaaatttgatattaaaaataattaataactaacacgtatataaaatacaatatgaatattacacattagtagttttgcaaagttatttaaaaatttaaaattatgttatcattttaatatatttgaataatataatgagaaaacatatatgctattatatgagagaaaatataatgatgctacccgctcaatctgcgcgggctactatgctatttcatataaatgttaataaatctaggcacacatatatatctatatttattaagatatatatatgaatgtgggcaatgctagaaagtcttataatataaaatggaggaagtataaaaaatagattgataaataacatttttatgacggttgataaataaacttaataaatagcttcaaacaatgctctttttttttacaatgcaataaaaaatttttataaaaaatgtattgtcttaagtgtgaattgtgtaaagtaatgttaataatactgtctagtgaaaaaattaaaaataacatgagtcgatcatggaagggtaatttttgctcggcctcctctacatacaaccggatatatacaatatttttaattagaaacttagcgctttaaacagagaacttagctctcaaataacctagtctgaaactcactcctacagagatttgaaatcaggatattagggtgcttctcgggctagaaaaaatcattgggagcctaatgctgcgttattttcagctattgcaatttagctactactcgactttcgttagcacacttttcaaatggttaaacaatgtattttatgtaaaaactttatatatataaactgttttaaaaattctaataaatttattcatcaattttttatatattagtacttaatcaatcacatactaatctcgtttctcattttgcgtgtggctaattagctgtttcaaaccttcgaaaagaacgcagccttatatctcatattctcattgtacaatatatattgtggcttttccagcgttttggtcgtggctccgttataggaatactacttagggcttgtttggtacagctccaactcctaaatttagcttcagaaattaggtctagagtggagttatagagctgcctaaacccagctccacaactctagttcattttgtgagagagctccacccagctccactcccagttttggtagagctgaaactgtttagctgggtagagctaaagttggagctgtgctaaacagacctttaattatctggttcatgtgcgtttttatggtggctatgtcatgacattagcaccgttcaaattattgtgaggatacaagtccttgtgtgttgcgacctctgtaaagggaatgacatatcagttcataacctcgtgacagcttaactacaagctgcaggaattggtctatctatcctgcattccgctctctctgcccacatgggttgtgtgcatactcttcctcttttctctctgttttttttttttgacaggttctctccaaacgtgccaattactacaaggaattaatcgcggttggttcgatcgtatcgattctctcttcctttccctttcccctgattggatcaacccattgaccgatcgatcgacctcaaaaaaaaaaaaaaaaaaaacggtcgcacccacgcacgcgcccgcgcaagaaaatctcccggcgtccggcgacggtgacgaccgccacgagtatgatgggtctatttagaagtttaacattcggagtgtttatttgaggagcaattttacaatacctggtatcataagaataagtataaagataaagatcggtatggtctctacgttaattagaggctatcacgttacaatagttaagacaatattgtctttaaactaaaatactttcttactagtcatcttttctttattagactcaatgcaacgaaaaatttcctaataaatactaagagtcgactctatgccgttgtcatgcgtagcaactatctttctatttccttcttcctttctcttccacgtcaccaaatatacttgcatgataataaagagagaccactaataaagaccattatacatgccctaaggtaacactttttctattataaatttagtatctcttggtacctaagtactatgaagaactaaattttacactaattttttattatcttatggtatctcttcaaggaccgtagaattgctcttatttgagagtttaagattaaagcagctgttgatattccaaacaaactggtaaacccaggttctggctttttattcgttttatggattctacgattacataatctcaaaatcagggtagaaactacagccgctataatataggagaaactacagccgctataatctcttaaaaagggttttgagaaacagctgattagtagttaacttctaataacctgaagatattgagtttttagtctctggtttctaattcgttttctagattttacaattatagctttttaaaatctggatgaaataattgtgagagaaactgcagccgtgggaaactccacaaacaaacccgatgtcgagcggtgccgtgaggcgaacctcccaatcgcgcatgcgagatctcaccatctcgtcgccgtatcagcccgacgaaccggtccgtgcggcgcggtgtctctcgcgtgcttccgtggacgtcgtggtctcgcaagactatcgatttatttctacgtacacggtgctaccaatccatcgatgctgactgctcatcagcgtacatcgaaaattcgaacatatatactcccactactgacgacacagcatgttcttcgccgctgtgagcgcattttcatataggtcggtctgaaattgggattaagctaatcaagcgagcaatcgagacggatatcagcacatagtacagctttcagacagattaattatcaaatattagtataactggttttttattagtccatgatgacaattaatcagactagttcgtgtatatatatatggccatgcatgatcgatcagttgcttgattttctaggccggtttaatttggtcgagatggaacatggcatgcatgcattcgcgcctgacggagctagacacgctccgtgcatgcacgtactgcacgaaagctgcctttgctaaatccccttctgattaactaagattccatctcccattttttttcttgaagaaaatattcccaaacctaccaatcaaactaaggcacttaataagttcatccacattcgtcgacatttttatatatccttttggttccatcaccaatatattatatatgcgattcttgatttcgaccaacaaggtagaaatcttattggtccttcattgctcaatccctgtttaagagctactcccccctatcaaaatataagtatttttagaatagtgccaagtcaaattttttaaattttgcctattaatagtaaaaaagttaaaaatattaatcatgtaaatttgatcttactatatttatcattaaacgaaatatcataatatgcaactatttttatttaaaacattctacttttaaaaatatttttagtaaaagtagtatctcgaagaccatgtcaagataaaaaaatacttacattttgggacggagaatgtaccttattattattttctattttctgggtcaagtcatgacctgatcctgcaacctgcatgcatacataagcgtagaccatgtcaagagaactcgataaacgtagaccatgtacatgtaacttgatgagttgtttaatcatcgtgtgattaattatctttatatacactgtcacaatcgtcgacgataatgtcaatactccacctgcagccgcctgcatcaccgttcgctaagctgcgtgcactgcacaacgtgatttcacacggccattttcactttttggtccaagcttagttaggccccgtatagttcacaattttttttcctaaaaacatcacatcgaatctttggacacatacataaagtattaaatataaataaaaacaaaaactaattacgcaattagggagaaaatcgcgaaacgaatcttttaagcctaattagtccatgattagccataaatgctacaataacccacatatgctaatgacggattaattaggctcaaaaaattcgtctcacagttttcaggtgagttatgaaattagttttctcattcttgtccaaaaaccacttccgacattcggtcaaacgtccgatgtgacacccaaaaattttcttttcccaaactaaacagacccttagcttacggcttgaaattaattaactagctctcgtgatataggttttcaaatattttgtttagtactttcactagtccacgatcaattggccacacctaaaaaggttaaactgcgtggtaacttctccggcactgctaattatagccaccatgtgctcggtttaacattcgctaacttactctattaattctaacggacatcgagagtgggtatgtgtcaactgtgaaaagtacacacctcgaaaattagttagaaaataagctgtcaagtactgtaagctctcacgtcatgcctatgccgaaatggaaaaaaaaataaatcgtaaatcccataagcacaaaatactttagagttacatgctaatcacacatctgcttgagatttttgtttagacaagcaaatttgaatttacaagttggtgttatcgactggaatatattccaacgggacgtcaaacatctccatctccatttccctatctaatcccatagcctaaccggtttcggtttagtttaagtttaatttgaaaatttagcagcgcctttgtccctacgcctgctacgtcatcggggcggggatccgcatccgcatccgctgcgcggcgcagagcagcgaacgctcgcgcaccgaccgtcggatagccgcccgcgtgtgcatcgagattcgggctgaggcgctggttcgcggtggatcaggatttggtggggcccggccggccgaggcgcgggggcgtggggcccacctgtccgtgtccggaggcgcgaggcccgcacgtctgcccgggagctgccacgtaggagagagaaagtctgacgtggctcgggcctcatttgcggggaagccctcgtcagtcgtcaaaattgctcgttgtttgtaagcagacacgaaggttagtactaggagccaaagattaataaagaatacatttattagcattcgaagatgacagcaagatttttaataatttggttaattcaaagaatctgctggagttgtccaaatccggataataaatttgaccctatgtattgtacatctccttagttaatcttcatctaattcaggctcgaatgggaccattgttgctttaaaacttgttcggtatctcttaggcagtggtttttgttttacctaaactacacaattttatcctttgcttcctcttacgataaatatgattctttgctagtatatattcagtatgatagcatttcgataactttctttatgaatgaaattccaacgtatatacattttataaaagcctttcgatccctcttatagggacaaagatctaaccatttgattacaaatctaacgcctaatgatgctctcccgtcgtatttactctaaaaacgtcataccccatctatgtttattcggttatagcatcgtcttatcatttcttcaacctcaacatatccccatctcctcctaccttgtaatgctactcagatctacgtgtttagatctgctcattgattttatccacatctccttctcttctcttggtatttgtatcagccgccaccactagtataatcttgcttcactcatattctcatgtgccaaaaacaactttagggtttcgcctcgaagcaaatagagtcatcaaaagcttacttcatcaatatccatcggtgacgaatatagatgagtaggagttgattatgtcatcggattctctaacactcttgttttatccctacatccatcgagggcgcttctcttgattggccaaatggtatgtgtttggtgtttttgccaaataaaatattatacattttctctattaagttatattcctcactctaaatttattattattcctttaactgaatattcaccgaacatatatataaagtatcatactatttatattctctctctgtaacatgttaatttcctgataagtcttacattaaaaagtactccctctgtcttataaaaaaccaacctagtaataaatataacacatcctattacagaatctggatatacatctgtccaaattcattatactagaatatgtcatatccaatcctagatttttttttggacggatggaataggcaccatgctctctagaattttattttttaaaatctatttcaaatacacacatcaagcttgccactttcacaaaggaaaacaaaagataggtgagtcggaacaggcaaaacatttttctcccaattacggtagtgcgaagacgtcaagcaaaagtcacaaaagattttaaagtaaaacgcacacaaagtcagacgaggttagtaaagcctagttaacgatgttacccacaaggccattttcttttcacaataaaagaaaaaaacacaaaaatggacaaggaagctaagcaaccaaatcacccaccaaatcgcacagtacacacacaaattacaaaccaaacagagagagaaagacagaggggaaggaagagcgcgtcgtcgaggaagacgagatagcgaggaggcgcgtgggagaaaaggaggaaacaaaagggagagaaaaaggaaaaaaaataattattacaagcgagggagagaaaaaacacaagcaaaaataggggcaggaggaggaggagggaggcgaccagaggaggagggaggcaaaaggcccgcgcacccggggaggggaaggaggaggaggcgattttttgttgttgttggtgataggaactaggtgggtgggaggagaggaggagggggggggggggatcgcgtcggaattccggcgaatcggcgggatccggccgggatctgcgcggcggatgaggggtcggcaccatgaaatggtcgacattgctcagtaaggtcgtcttcgccggccagcaggagcaggagcagccgcctccgccgccgccgccgccgccggggtcgtcgtcgtccccgctcaaccgccagaagcagggcgaccccggccaagccaccccgcggctcagcgccgccgacgagggtgggtcggtcggaggtggcggcgtcgcggcggcgtccgggagctcgccctccgccgtctccgcgtcccctgccaggtaggccacgccacgccacgccacgccacgccacgccgtggagtcaaatactgtccctcgcctgaatccgtcgtggtgtaggcagctccgatgcgatcctgtcgcgtgcgttttttcggattgagcaatggcaatcggatttggatttcgagagcgttcgatcgtagatgctttaccttttttttttcctcgttctctgcgtgctttttttccccgtgtttggagatttgataggtagatgcgggattaggcgtttgatatacgctttgacctttgctggttgatacacctgatattgtttttagctcaagcttcccagtaagttccaaatttttttggttttactcatacggttccggggagaaatgatgttggaataagacggtggttggagatgcgttagctgtgtggtcagctcatggatttcaattcgtctgtacgctgcctattgcctgtttcttttggttttgttatgcgtttgcattagaagcgaaatttgtatgagctcttctagagatggtgggagttttacttgtcacggttgatgccaaattggtggagaacttgatgaatctgttgattcagcattcatgtttgcattggctgtgctttagtaataagattggtgcatgccattttaagacactgtttaactttgatagtgttcctgtattgttgcctctgagaagttgcttgctaaatttgtatatccacttagtgaaatttgattgtattactaggattatattcatgtccctattggaaacaagtaagtagtagtaattttatgtgttggaaattttgacatatttaaattcaatggcattattgtttatgttatacatctgagcacaatgtctataataaatgctaattgagcacgcatgttattgttctttatattgataccatgacgtgcctagagtgattaccagtgttagcattctctgtgtcctcttctgttccatggtaataatattgactgtacaaccgttgtaattaaggttcctattgtaatcgatgccatatatgaagaatacgttctatattttactgtagaatggagatttatgagctgttttcatttgtatatgcttgatacctggttctttattcagatgttctcttgtcatttcttcagcattcaataaatatcattaacctaccaagaaagaatagtgacttttgcaattgcattactaatgagatatcgtgagtctcatcctttattcctttgtggctttgtctggactctggactaccactagatattatgttgttaaagttggtaacttcgttgtgtgcgttgtttcaaggtgttctgtaacttaaacttgtattgtatggtaactggcactgggaaagggataatattagagcctgtataatgttatagttctctctcgtacttgttagttggctagttgcccttccaatccttgcatggcagttcatgtatttgtaggtgtcatgtcaggcattcacattatatatgcatcacatggttctgatgcatggattgtactaagaatgacaaaacgaggcatttgatccctttgcttcaattattctccagaattttatctgctgtttcaagtgaatttcctgcaaaaatttctcagtttgtactcccattgttaaataaatgttcttaaccttgtatttgcaggggaaaaaatgagttggagttggacttcaggaggttctgggaagaattccgttcttccagctctgaaaaggtaccatcgcacttggttcaccttgtcaccatggaacatagcacttgcatgtccgttcttatcctaacactgtgccttttattttccctgcacaggagaaagaaagggccttaaatttggcagtagatgtcttctgtaggctagtgaaggagcactctagtgtagctgaattagttacaaagtatgccttgttaactttcatacattcgctacattgttttagtttattctaaaatcatatctgtttatcatgacataaatctttatccaggtcgagttttgttaacattcttgtgattactacaggttagtagaagcacatgtttttgcttttgttattggaagagctttcgttacagatgtggaaaaactaagaattcacagtaagggaagatctttgcgtgttgctgatgttattggtttcttttcggagatcacagaggtcagcctttataataatgcctataatgcagtttccaaatttcatgtgaccatacattctctgctaacttctattccattatccagcttggcatatgtccaggttcaaatttgttatatgcagttgaagttcttgtgacacaggttcgtgcagtttctcttgttaatatcaaatcattctgttttctgttatatttaatctcccttattatcttatcaggtgttaaatatatataatcgtaaagtcaacaaaactgtggtattcaagttttttgtgattgtgtttgtgtaaatttttactaattataatatgatgaggagggcacatcattgtgataaaagctatacataggccatatatatactccaggtgttatttgaaattccttttgccttcaaagctattatgaacattggactagtgtgttatatttacctctgtaatactgttttcatctttatatttatatccaccttgtcctctctgtaagtatacagtatgagccatctggaggacaaaaatgattctaaacatctgaacaagagcagtatttctactacaaaccttgtcaaaacaatgttagttcttagtgtactatatataatcttgcatatttgtgaatagatgatgattgtcaatgaatgttgcaaagagaatctgtatatcgaagcaattagccattaagtgtttggtgttaattttgggctggttttgcaaccgctaagtcaagttatggtatgaaaaccaattttagttccctgttctttcctttgcaacctttttgcattgacaatgacacatgtaataagacaaaaaaagagaggcatctgctttctgataaaaaaacaaagcttagatatagtaaggaatgtgcaactgacatatggtgtttcaaatcggctaaaacaacatttgccaaatgctcagagtaacatgcttttcatgtttaatttcttggttacagactatcgataagcagcctctgttggattctggtattttgtgctgccttatatatatcctcaattccctattgagtcctgatgaatcctcccaaaaatcctctcctgttggtcaagaagtttcaaccagtgagaagagtaaagattggggtcctatgctatcacggcgccttgaggtaataccagtctcgtggttcttatataaagaggatttcctttgcattattttttaaagaactcgacgcaaggggagagaatcccgaaggcattgcatttaaggtcgagaaaaggccctgaaagctggcacttacctgtatgggaacattgttgtcacaggctgtcttaacacttacttttggggaatacacagagaggtaccttttttttgggtgagaaccaggttttgagccctggttggtagcctcacaactggaggacttaccaccgtccactgtgcataagcacgttctcacctttgcaatatcatatactacctccttttttaataaatagcgccgttgatttttggcatatcgtttgaccattcgtctcatttaaaaattgagtataaatatgcagaaatacaagtcatgcttaagttttctttaatgataaaacaggtcataacaaaataaatgacattgaataagatgaaaggttgaatgtcatgccaaaagtcaatggcatcatctactgaaaaacagagggaggagttgttaacttattctgatgcaaaatcacaacttgttaatactttatccgctgaacttcacatagtgccatgctggagtatccatctgaactaatacaaggcattcgttttatgccaaacctgcattatgtgatatgttaaaccttcttaatttctttgcctggttaatttgagttttgatttttttccccttgttttttgctctatggagatcgaggcaagtgtagtacatacaatgaaggcactagcgagccatccatctgctgcaccaagcctaattgaagatgatgctctacaagttctattccacatggttgcaaatggttccctgaccgtgttctctcaatttagggagggtcttgttccaattcacacaattcagcttcatcgccacgcaatgcaggtaagttgatatgatgcaacattttttgtggatacctgacttcctgccacaccgtaagttcctaatatatttattccttaactgagcaggttcttggtctccttcttgcgaatgacaatgggacttcagcaaactatataaggaagcatcagttggtacattctttatctcttcttcattgtgggttgaaatattttgatcttgttcttctgtttttagcaattgtatcttagtagttattagggctccttgacaccatactcaatgtaaaaatgtgtctgtactgagctttcttggcaaataatagaactcctgtagagcaattaatacctttttattgaattatctagagtatttcattttggtatagttatctctctctctctctctctctctctctctctctctctctctcttttgtgtgtttggaacatctactcttttgcactattgctaataagtcctatgccttttagattaaagttctccttatggccgtgaaagatttcaatccgcagaatggtgatgctgcttacaccatgggcattgtggatctcttacttgaatgtgttgagctatcttacaggcctggtaaacatggacagacttttgccattcagatacatttcatcttgatattttttcaatgtgtacataattcatggtcagctactcagctatagcgtttgctaatatttcaatatatggttaatattgcagaagctggatccgttaggctcagggaagatatacataatgctcatggctatcagttccttgttcagtttgctcttacactatgtagcttacataagaaccaggttctccaatcttcgcccaagttagcatctgaggatggagtgaatcctcctcacagatcagaacaagatacattcacatccgatctttcaccacagctatcaagattgcttgatgttcttgtaaatttgtcgcaaactggactgtctgaaaattatgttggtaaaagtatgaaatcttctcatgggaagggaacaggccacaacagaagccggactccatctgttgacaagttcgcagatgagattttggagattaacagtcccaaagtaaaagatcttgaggccattcagatgctacaggatatatttctgaaggcagacaacttggaagtgcaagctgaagttttaaatagaatgttcaagattttctcaagtcatcttgagaattacaagctatgtcaacaactgcgaactgtgcctctttttatcctaaacatgggtggcttccctccagcacttcaagaggtcatcttaaaaattttagaatatgcggtcactgttgtaaactgcatcccagagcaggagttgttatcactctgttgcttactgcagcaaccaatttctaccagtcttaagcatacaatactctctttctttgtgaagctcctttcctttgatcagcagtacaaaaaggttctcagggaagtaggtgtacttggagcgttgttagatgacctgaaacagaacaagcttttttttggagaggagccacaaaacaggacccctaagtctgcacagaggatgtccagtgcaagtagttttcgaaaaaccatggataacaaagatgcgattctttctccgaagctaatggcttctggttccaccaaatttcccatgtttgaagatgaagggacaataactgttgcttgggattgtcttttttatctgctgaagagagctgagcctaatcaacaaactttcagatcttctaatggcgttaatacgattcttcctttcttggtatctgaaagccacagatctggggtattacggctattgtcttgcctgataatcgaagattctcttcaggtttgtgttagaacctgactcccatgaaatacatagtcatttttaatcacgaatcatcttagtttagggcataaaatgccaagttcatgggagtgaatgacttgtaaaaaccttaagggtctatttcccctatgatttgttaattttaatgatgcttaaaaattgaatttcacgagcaccatgtgagctatgactcctttgacattgttttcaggctcatccagaggaaatagggtccctgatagaaatcttgaagagtgggatggtatcaacttcgtcaggttctcaacagaaacttgacaatgatgcgaagtgtgacacttttggcgctttgtggcgtattcttggggcaaacagttcagctcaaagaatttttggagaagccactgggttttccctgctactaacaacgcttcacagtttccagaatgacagtgaaaacgaggagactgaatcatctttgcttactcatatgaagatctttggttttctaatgcgagctatgacagctgcagtatacagcaatcctgttaataggataagactgcatacaatcctgtcttccaacactttctatgatcttctgtctgaatctgggttgctctgtgtggattgtgagaagcatgttatcttgcttttgcttgagcttgcacttgaggttgttcttcctcccactagtaacctgcaggtagagagcatttcatctgaaaacccagaggatgaatcaggtttcttgtctgcaacctcatttggactatcaaggcttgacaaggagcgtatatataatgctagtgctgtagttgttttgatccgctctttgctagtatttacacctaaagttcaactcgagctgctgagattcattgagaagctagcaaatgctggtcccttcaaccaggagaatttaacttctgtaggtatggacagcaattgttttgtcacctctgtttcctttactttagctggcgagtttgccttatgttattcttgccctttttgttatacaggatgtgttggtcttctacttgagacaatcaacccatttttggagggctcatctcctatccttaatcacgctttgagaattgttgaagttctgggtgcttataggttagttatatttgatggttaattttatatagaagcttgccttgttagttgtggtacatgttatgttttttctttgtcaggctgtcttcttctgaactaagacttctggtgaggtatatacttcagctgaaagtgaagtgttctggtcatctttttgttaatatgatggacaagttaatccaaattgaagatgtcagacaaggaagtatttctctagcccctttcattgagttggacatgagcaaagctggtcattcatctattcaagtttcattaggagagaggacatggccacctgtttctggatactctttcgtttgctggttccaatttcagaacttctttagaagccatcctaaagaagcagaaaaaacatcaaaagggtcttatagtaaaaggaatggacaagttatgcgcatcttttctgtaggtgcagttgatgatgccaacactctgtatgcagaactttatctccatgacaatggtgtttttaccattgcaacaagcaattcaagttcattatcatttccaggcattgagatggaagaagggaaatggcatcatcttgcagttgtacatagcaaaccaaatgcattagctggcctctttcaatcaagtgtggccagtctatatcttgatggaaagttgaggcacaccggcaaacttggatactctccatccccatttggtaaatccttgcaagtaacacttggtacacctgctatccgagccaaagtttcagacctatcatggcggcttcggtgttgttatctttttgaggaagtcttaacacctggcagcatttgcttcatgtatattcttggacaaggttacaggggattgttccaggacactgatcttctgagatttgtccctaactgggcctgtggtggggaggtgatggcaattcttgattcattggaattggaagtaattgcaccttcaggcagccagcgtgttgatagcgcaatgaaacaagggaactctagacttgagagcagtggaatcgtttgggatatggaaaggttaagaaatctttccttacaactgtccgggaagaagctaatatttgcatttgatgggacttcatcagatgcttttcgagcatctgggactttgtccttgctgaaccttgttgatccaacttctgctgctgcatccccaataggaggtgattgaacttctagctatttttatttaaacttttttctcttggaagatgtcaatattcactatgttctttgaaatgacaggtataccgcggtatgggcgcctaagtggggatgtttatgtgtgtaaccagtgcacaattggtgacactgttcaaacagttggtgggattcctgttgttcttgctcttgtggaagccgctgaaactagggatatgctgcacatggcactagaactgcttgcactatctcttcaacagagccatcaaaatgtgaaggacatgcagtccttgaggggttatcatcttcttgcactttttctgcataggagaatgtcattatttgacatgcagtctcttgatatctttttccgtattgctgcttgtggagcttcatttcctgagccacaaaagtcaaatatgaaccgaacagcaagctatgcatctggaatctccccagagtccagtcttgatgatcttacattacccaagtttggtgatgatatgtcttctattggatcacatggagatctagatgatttttcagcacaaaaggattcttttagccatctgtctgagcttgagaatgccgacttagctggggagacttctgagtttatagtcttgtcaaatgctgatatggtcgaacatgttctattggattggaccatttgggttactgctcctatatcagtacaaataactctccttggatttcttgagaggatggtatcaatgcattggtttagaaatcataacctcacaatactgcggcgaattaatcttgtacaacatcttcttgtcactttacaacgtggtgatgttgaaattcctgtcctggaaaagctagttgttctgcttggtgtcatcttggaggatggttttctagcttctgagttggagcttgttgtaagattcgtaatcatgacatttgatcctccagaacttacaccaaaccgccagattgttcgggaggccatgggaaagcatgtcattgtgaggaacatgttactagaaatgcttattgatctacaagtaaccataaatgctgaagatatgctggagcaatggcacaaagttgtttcgtccagattagtcacatatttccttgatgaagctgtgcacccaacaagtatgagatggatcatgactctcttaggagtttgccttacatcctctgccacttttgctctaaagttccgtacaagtggaggtttccaagggttgaatcatgtgcttccaagcttctatgattcccctgaaatatattatatactcttctgtctgatttttggaaagcctgtttttcctcgagtaccagaggtccgcatgcttgatttccattctcttatgcctagtgatgaaaactgcggagaattgaagtttgtagatctattggatactatcattgcaatggcaaaagctacatttgattcattgattatgaagtctatgcttgcacatcagaataataatctttcacaccttaatggcaccttagttgcggatcttgtggaatcgacaccagacatgggaggtgatcttcagggagaagccttgatgcataagacatatgcagctaggttaatgggtggtgaagctgcagcacctgctgttgctacttcaatactgcggttcatggttgatttgacaaaaatgtgcccaccattctctgctgtttgcaggcggcatgatttcctagagagctgtgttgacctatatttctcttgtgtaaggttcgtatggtgtgcatatgttaagttatgtgatgctctagatgtttaggctaaaacctttttattctgcaggtctgattgtgccgtgaagatggcgaaggacctaacatctgcggcaacagatgagaagtgtatgcatgatgatgacaacgaaagtctaaaagatactttttcgaatttgccacaggatcaggaacaatctgccaaaacttttagtattgcaagttttccccaggagcagaaaagttcgagctcaggaagtagtggcatgcataactctttcgaaactgctgaagtaaaagcagacgactcttccaatcaggcatcgagcaccacgtttttgaatggacaagcaaaccaagtggttcagagtgctcatgatcaaggacagatgtcagccccaagttcaaatggcattgctgattcccaccaaccagctgattcacccacttcagcttctatgaacaatattgggtctcctgttttatctgagagatcagctcacaaagcagcaagtacccctactgcatctccgatggctccatttgcatcttggcctggcagtgcaggatcatacagcgatggtaggcagctaacagcctctccatccatgtcttcaactatatctgggattgacctcgattcatcccctgatctgaagacaaacattcaggggtcacctgcagtgaacacacttttcccaattaattcgaagcttttgcttgacatagatgatttaggttatgggggtggtccttgctctgcaggagctactgctgttcttgatttcattgctcaaatccttgctgatattatctcagaacagctcaaagcaacactctttattgagagcatcctggagtgtgtgcctctgtttgtagatatcgattctgctttggtttttcaaggtttgtgtctaagcagactgatgaacttccttgaaagaaaactcttacttgatgatgaagaagatgggaagaaacttgacaagagccgctggtctgcaaatttggacccactttgctggatgattgttgatcgtgtatacatgggctgctttccaaccccagtcggtgtgctacgtacgctagaatttttaatgtccatgttgcagctttctaataaagatggccgtattgaagatgcagtaccttcaggtaaaggtattctatccattgctcgaggaggcaggcaacttgatccttacatccacgccatattgaagaacactaaccggatggtaatgtattgtttcttgccaacattccttaagaatatgggggaggatgacttgcttgcaaatctggctttcctaacagaaactggaagaagtttaggtatttttaaaccttcccaggaagattatactgttgatatctgtactgttcttcagcttctgattgccaacaagaggctggtgctgtgtccaagcaatgttgataatgatctaatgtgttgtttctgcataaatttaatggcacttcttcgtgacaagaggttaactgcacaaaatttagcagtggatttacttaaatacttggtagtgcatcggcgtccgtctcttgaggacctcctagttagtaagcctaaccaagggcaacagatggatatcttgcatggagggctcgacaaactactgactggaagtacaacagcgttttttgaatggctccagagttctcagcaaacaataagtaaagtgttagaccagtgcgctttaataatgtgggttcaatatattactggctcagcaaaatttcctggggtgagaataaaaggcatggaggtcaggcgcaagaaagatatgggacgaaaattacgtgaaattgcaaaactagattcaaggcactgggagcagataaatgaacggaggtacaatcttgatttggttcgtgatgtaatgtctacagagctaagagcgattcgtcaagacaaatatggatggatactgcatggagaaagtgagtggcaaagccagctccaacagcttgtacatgaaagaggcattttccctgtgcggcaattatcgacagagcctgcatggcagctgtgcgctgttgaaggaccgtatagaatgcggaagaaacttgaaccgtccaaatttaagatagatactattcataatgttctagccagcaaccttgggttagatgatgttaagattaccaagaaagaggatgggcacatggtgatgacatctggatcagatacaatgtcaggcttgaatcttttgacctatgacacagaacggaaggatcttgatgctgctgattttgcatcgttcaaagatgaagatgacatattcaaaggaggaagcacagtgtcacctccaattggctggactgatgataaaagcagcattaacgaacaaagtcttcactctgcaacagaacatggagcgaaatcaagttccttttcttatcacatgacagagagtgtccacggtaaatctgaatttaattcacctagacgggcaccttcagttaagggcaccgatacaagaacctcagaggataaatcggaaaaggagttgcttgacaatggagagtatcttatcagaccttatctggaaccttccgaaaaaataaggcataagtacaattgtgaacgggttgctggtcttgacaagcatgatggaatatttttaattggagaacttagcttatacatcattgagaacttctacattgatgattccaattgcatttacgaaaaaggcaatgaagatgagctctctgtcatcgatcaagctttaggtgtaaaaaaggatgtattgggaagctgcgattctcaccaaaaatcaccatctacgtggggtgcaacagcaaaagttttgcttggtggcagagcatgggcatacaatggaggtgcttggggtaaggagaagctttgcagtagcagcaatttgcctcatccatggcatatgtggaagcttgatagcgtccatgagctcctaaagcgtgattatcagcttcgccctgttgcaattgagattttcagtatggacgggtgtaacgagcttttagttttccacaaaaaggagagggaggatgttttcaaaaatctgaccgccatgaacctcccacgaaatagcatgtttgtattcttaactctttgcaaatacatacactcagtaattaccatgcatgttcagtcatttctttagtataagatctgaatgtcaggtcctactatcaaggctatgtagttttcagagttgaaaccatctagatatgatcccttggcataggttcacaacaggtttatgtgtttctttgtctatcctgataggtttatcacaaccgctgaacaagattagactggaaactgtctgcttacgtccatcgagtaccgctcaatgtcatttttttaaagaaaaatcttagcaacaaaatagagtagtttttttttggactaacaccacaagaaacgggcataattctgttaaaactagcgaaactgccagaaatatatgtaaatttgcaatatctttgtttttttttattagtcaattctcacccttccctacttaatctggtaattagcaagttctaagtgatttatcatctatggtgggaacatattgtgagtgcaagtatgaattgatagacagacacatgaaattaagtcctaaggcctttattgtatgctggaggtttctaattgctctcatgttcttcctgcacatgcacagtcaaattttaagttgcacaactaggcattattttttaatgatttttacaatacactttttttgacattgaagtatacttttacctatcattaacaggttggacacaacaatatcagcatcctcaaaacaggatagcggtgaggggagccgtcttttcaaaataatggcaaaatcattttctaaaagatggcagagtggagaaattaccaacttccaatatctcatgcatctaaatacacttgctggtcgaggatacagtgaccttacgcaatacccagtatttccatgggttcttgcagattatgagagtgatactttagatctgagaaacccacagacgttccgtaagcttgacaaaccaatgggatgtcaaactgaagggggagaagaggaattccgtaagaggttcgttcatctaacatcaatggatatacttattttgtttatttcttaatataaaagactatgcctttaggctgtagtattgctgtacataagataagaatttgtgcatctaacattatctgaaataccttcttctgtttacttcagatatgatagctgggatgaccctgaagtaccaaagttccattatggttctcattattcaagtgctgggattgtccttttctatcttttaagactgcctccctttagtatggaaaatcagaaattacagggtggacaatttgaccatgcagaccgtttattcaatagtgttaaagatacatgggtaagtgctgctggcaagagcaacacatcagatgtcaaagaattgattccggagttctattatttgcctgaatttttggagaaccaatttaatctggacttgggggagaaacagtccggagagaaggtatgctacttacacaaaagtgcactgaacttttaactggatgtaaatatgtaatggcaatactcttaaccaaacctattcaagctgcatgtaatctgtaaaataatgatttcaggttggtgatgttgttttgccgccttgggctaaaggtagctccagagagttcatcaggaagcatcgagaagccttggagtcagactatgtatccgagaatctgcatcactggatagatcttatttttggatataagcagagaggaaaggtataggccatctcatgtttgtgcattctttattgttcctaatggtggtgatattgccgtcatcatgacaacataaatatgtttgtcttaaaaacaagggtgttatcttctgttatagattcgtattccttcatttctgtggtcctagtggtggtgacgttgccatcgtcatgagtccatgacaattcagacatgtttgtagttttttacaaaggaaaatgaattgtgtttttttatagattgataaattttgtcctttatagcatcttacccattcaaaacctctcaatagttttttctaggtcttgttcagcatgctaaatttgtatcattttttactttctcatggtctttcaactctgagcattgatttctacactgttagccagaagtattttacatttgtgaatgtaaaccagagtgacttgtaaaattgtgacacgaaacaggggaagttttctgctaatcatatttattaacttgttctaattgttatttcttttgtatatggcaggcagctgaagatgctgtaaatgtcttctatcactacacgtatgaaggcaatgttgacatagattccgtatcagatcctaccatgaaagcttcgatactggcacaaatcaatcattttggtcagacccccaaacaattattccaaaaaccacatcctcagagacggactgacaggaaggtccttcctcatcctctacggtacagcgcgtatcttacacatcaagagattcggaagacaacatcatcagtttcccagattgtgacctacaatgataagatcctaattgctgcagcgaacagctttctcaagccagtaaattatagtgaatatatttcctggggatttcctgaccgcagtttgagaatattgacctatgatcaggataaacttgtatcaacacatgaaaaccttcatggtggtagtcagattcagtgcactggagttagccatgacggcaacattctcacaacaggtggtgatgatggtgtagttgcagtatggagatttttcaaagatggcactcgtcgtctcctgagaatggagaaagctctgtgcgctcacactgccaagataacatgtatctatgtgagccagccttactcattaattgtctctggctccgatgactgttcagtgatcttgtgggacctgacaagcctggcctttgtgaagcagctgccaaggttcccagcatcagtgtctgcgttacatgtgaacaatctcactggtgagatcctgactggtgccggtgttctttttgctgtttggagcgtcaacggagactgtcttgctgtggttaatacctctcagcttccttcggatctcatcttgtctgtggcaagcactacaaactcggactggcaggacacaaactggtacgtgacaggtcatcaaagcggtgctgtgaaggtatggaagatggtgcactacacgtctgatgaggcagcaaacagcaagagcaaatctccaccgtccacccttggagggatgagcttgaatggccagactcaggagtacaggctacttcttcagaaggtgctcaaggctcacaagcacccggtcactgccctttgtcttccacccgacctgaagcagcttctgagcggggatgccagtggccacttgttctcatggtcactaaaagatgatagctttaaggtttcatagcaacagctcaacagaggatagtcaggattcacctgcacatatagagagccttagttaagttatatacctctggttcctttctcacccagaatctgacaagcacctgcttgtgctgccaaagaaagaactcagagttggcctcggcatgcagaaacattctacaatatggttggcccaggccccagcccattcagcaaaatctggggtgaagacacagtacaacagaaacacactggaagggataaaatggagatggcgttgtgctgacattacaatcttattatactgtgaattatctaccggttctacctcatcttcttgttttttcatgagaggattcgtgcggggtagcaaccagcgtgtgtaaagtttgtataggatgcttttggttagtagtggtgaggggacgatggtgatgatgttgtacggtgaagatgttatttttcgtcttggggatgtaaggaaaggggtg

SEQ ID NO: 9847 - DNA, 29325 bp, Oryza sativa
agcgtgtcacgccgcatgtaacgcagtgcagtgcactcgtttatccggtctgtgaccagtcacagaccggtcagatcgcgggttaggtggcgacaggcgatctgacgcacgcctcgccccatcccgtcaggacgagggcttctaggcgctcgtccccagctggagctagcgtgttacctcccagagatggcacgttagtcctggtcagatatatgccaggcttcatcctaaccattacaggcaagatgttgtgtgaagaaggacgagcatgtagattgctaagctgacgcgtggtggacaagaatgaccgacgtgactggtctgataccggtcatgtcgtcagcagacagccacgattccacgtcgcgcctgcttccggcggaagtggaggtaggtatgggccgtcccatcagaaggtcattcggacggcaaccatacaagtctccgtctgtttatgaaaaggtggggtaagtccccacaaaaaaagagagaaatggtgcatgtggtatccccttaagatataaaaggaggaccttgcccactgagaaggggactggacttttcgagattagaaacccagaacaagggagaggctggctcatactttgtagctccttcatacacagatctcccacaaaacacaggagtagggtattacgcttctcagcggcccgaacctgtatacatcgcccgtgtcatgtgtgtttcctgtctcgcgagccttccacatacagagagcttagaatctctccctgagtccccggccgaaccggcaaaggggggcctgcgcggtctcccggtgaggagccccacgctccgtcagatatcttgacatagagtagtatcggagtattagccgatacatgctagatctatcttatcggctatgctataaacacatataatcctgttattaatatatatttcgatctaagtgatttatactgtctcggcatggcgaccgatctatcccaatcacttgatttaattatatatcgatataagaactatatatcgttaatatgtacagccgatcgaatagatttagttccttattgtttatttataaccgccgatcgattcttatatgacatcggctcaaagataaatgatatgtcatcggcacctagccgatcggttatgatttatagatttaaccacgatctctttgtctctatttcttgttgattgcaggatcaaatcaactggcacgctaacacactcgaaggcgagctttggacctgcactggagttaagcagatataggcctcgtgttttacgtcaacactggtattgcggtttaaggatatgaatcaaattcggtcactggttaagggacttaaagtggacttattccagcgtacgtgcgtgccgaccggaacgcgagtgtcgctacgtttgggccccgttttgctacttgtgctgttgttcatgggccggaacgcgattgttcggctattgggcttggcgtttgaggcggggcgcacgcgcgatcgcgacgtgccggccggggacgtttaccgcatcggctgaacgagtgaacgtgtgcgtgtggtgccgctgcttttcccagcaacctatacaagtcacccaggtttccgtttctgacttccggttcgtagcttgcaataccacaaaaggattacgttgggtagatctggtgactcagctttatgtgatgcaatcgtgatttgatatgtcccagtataataagtttatccttggctcattatccgcctttttacacgaaagtgactacaagaaaacgcaacggtaggtgctcacctgctgaaaattagtgccaaaaaacgtcagcatcccacgagaccgttggttatctagatcgtgtgcgtcctgaatttggacggtacccactccatgcatatcccttcaggggttaggccgttctctactagtactacagtcttgtagctttggagaattggagcacaacccttggtacatatgtacagctagcgtacatgtactgtgacatgttattactactggagtatacatatatctgccgcctcactgtacagtacggaagcgaggcggcagtggacccgggcggcacacatgcagacgtcctacctcacggaagatatccggcgaagaaaggcatcatataggagtaccagccatcataccatcgatggtccatggttatataggacgccggcgagatcacgttgttttgccgggatatgtatagtatagggtccggatctgtccgagccgggtcgctgtcttccgtgttccctctccagcgttagagcatccacaatgtacatgaaaaccagtacatagaaaataaaaaattccattcagctaccttaacacattgtacaactagtctatagcaaagaaataatgaaagttgtccatagcattatgggtagtccatagacaataaaaaattatagttatgccaggtgcatgcgtgctgcagcctgcaacttctgttccggctaatttttttttgcctttagtgtgacccaccttaattacacacattgtggtgatttctaaaactatggactcctaggtgtgggtcccacatctatgaactagtttgccaaatacattgatgttgctcttcgtgcatgaacgcagatgacgcggcacgagatggatgattccatgggcctcgctcggtggctagctaagttcacgtgacacggcgcaacgagaaacggccgtgttttcctttttttttttggaccatctaaagtaacttgcgcaagaaaatcggtacctaaatcttacgaattctcaattgttggactaacgaacgaattaaagaccggccaatgtagactcacagctcatccaatcgggcagtgctgatggtcggctgacctcgtgcagttgccaaccccttaaatccttccgtgtgtgtatacataagatcttttttttcctaatttcttgtccaatgttagttagtaaattttcttttactgcctaacaatcagttgatagactacctcccccttgcaatttttggaccatttgttcactttgagattcataaaagtatcatcattattcccttctctccatttccatcgctcacttgctctagcctactctctccgtcccataaaaaactaacataactatacgtgacacattttaatactacgaatctagacatacatctgtccagattcattgtcctagaatatatcacatctagtcatagattcgtttttttcggacggagggagtatgccattgctaactccaagttcttgcccgcccccgtatgccacacttcccccctcctagcctcgcagatgccaaaagacactaaggttgtgttcgttttaggaggatgggaactaatccatcctgcacagaaaacggaatagtcaattagcacgtgattaattaagtattagccattttttttaaaaaagtatcaatataattttttaagcaactttcttatagaaactttttttgcaaaaaaacacaccgtttagcagtttgaaaatcgtgcgcgcggaaaacaagaggggggagttgggaacccctggaaatgaacgcagtctaagggcccctttgaatgaaaggatttatgtaggaatttcatagtattcaaatcctataggaaattttcctatttggccctttgattcaaaggattgaagctttccaaatcctatgaaattcctatggaatggcacattgcatgtggattttggaggaaatttagcaagagctccaacctcttggaaaatttcctttgagtctatctctctcatccgattcctgcgttttttctgcgctccaatcaaatgaccattcctgtgtttttcatgtggtttgcaatcctttgttttacacttcaattcctgtcagaatcctatatttttcctattcctctgttttttctaccctatgatttaaaggggccctaaaggtgctagtgagactcattagaccaaactgatcctccccttaccatactcccttcggtccttctccttcccaagctgggtagtgataaggtgttccattccaccatctagcttgtctttggcgggacaccaacactaacacagactcctaacgggttagaatcccacaccctgtttgctacaccggcccatcattcgcatccgatctcatagcctcgacaaagtagtagccgttccgtcatctcccaagggcatttaagcatagtgaacatcctcccactccctgccctcagcctatcttcatgccgatgtctaaacccaaactcgttagatcaccgccagtggcggagacagcgtgggggcagggggtctcaagcccccactaccccctaacgaaccattagagcccacataataccccctacaattttaatcccaaagggggtctaaaataaactttgttctgagattttagaaggcccaacaggctgggaaggcccaaaatatcccacaaccctacccaaccggccaaccctaatcttttttccccagccgaagagaggcggagactagtggcggcggcggcacacgagtgcactcggcgcgcgatggcttccagctccaagcgccggtgaggcggacgggggccggcgatgggacccgacgcgcggagggggcgcgccggcactgcagcagccagggcacgcggctcaccggccactggccgctggggcatgggggcgccgggcggcagcaaggcagccaggcagggcgcggcgcgcgggcggtctggcggggggacccggcggcgcgccgacacagcagcagccaaagaggcaacaaggcaagcaggcagcagcgccgggcagcaacaaggcaagcgggcaagccggacagcaccaaccaggcaaccaccaaggcagcaaggcaagcaacagcgccaagaggcaaggcaacaactcaacaattgaggatttgagcaagtgaggtatataaaatttctgatttgtcatttaaaatcaatttcaattgtcatgtctagttgttattgatagttcaagtcttcaaaaaatcatagattgtgattcctagtttgctactttgttatattgctagattgtgaagatggctaaatgactcgatgatatgctatactgagatagtgagaagcaaatttttaaaagtattagtaatgaaaaaattatccaaaggtttgaagatatgaaagcaagtcggatgttactactccatgcctccattccctactttaaattatttgaagctattgtttgttaattgtcattattcattaatttgacatttcttttgtatagattacccctgatgaagaataattggcgatagggtgtgctagtgtcgcacatcgtgtcatcatctattggatatttcaagattgttttggtatggataatacttatttctcgttaattctatatatttacactttgtattagatatatagtcaatttacataagacatgtctcgatttttgtcggccaattttagttcagcccccactataatgtaattctggctccaccactgatcaccgttgactgcctaagatcgttggatcttgctgtagctagaggaggaggacgggtatgaattgccgagcagatcctaagatcaaaatttgtaagattttgctcataatttcccgtccaatgcgatttagcaatttttcctttttttttattttaactgcgtgccatgtgatacgagaggcgagctagcgtacacgtcggggcagccgttgattgaacgatgttttccacgcgtgaacctgccgggtctcgcagcaacggtgtgtatagcaatcacgtccgcgacggggtttgcacgtatggagcgtcgcgtcgcgtgcacgcgaagcgatggagagcgtacgcacatacacaccgtgggctgtggagtcatctcagtccgtggttggcggccgtttcatctggtcttgtatctgtttagacagccgccgtcgttgtcgccaaagcttaatcatggtgtggtactgcgagtgtgagtgtgcgtgcgatgcatcgcatcatgtgaggagaagcatgctcccggttaaattattgtcatcacttctctgcagcatcatttgttccccactagtactgcacacagtacattagccagtggagtactccatttatttggttgcgttcatttcagcgcaaaatttagattttggttaaaattgaagatgatgtgactgaaaagttatgtgtatatgacaagttgatgtgataaaaaataactgaagtttgaatccaaactttagatcctttcttattataagtcgtttgatatttttttagttaagtttaactaagtttataaagaaatatattactagttttaacataaaacaaatatattattattttgatattcaatgttagattttataaaattagtttgttattttagatgttgataaatttttttataaatttgattaaacttgattaagaaaaaaagttaccatcgtagctagcaccatctaaagttaccatcgtagctaatactccgtactatcgtcgttgtattaatagctatagcaccaacaactttcattaagtaccgtgcggtagctgatatgccacctctctgcttgattgctctgatacgcaccttagatagtcatgtcccaccgaagctaatgcatgcagtgttcttttcatataattgatgggccaaactgatgttcttaatgttaaggatgaataaatatccatctatcctgatattactacaaatctgaacaaatctgaccagttacattctgtgatataagagtattgtatattataataaactgaataaatagcttataatatattttaaaaaattgtttgtcggtgacatgggaccgggggtatcgtgactagaggcttgggcagccgcggtcacccacgtggccggaccccctcgggggggtcgggcccgagggtgacgtggccacccctccctctgtctccccgaggggtcgggccgctcccgtttcggcctcgagggctggggcgccccgacccctgtggtattggcgccacgtgtgtgggttaggtgagcacagtggcgctcacctaaccgcatttattgcgggttggacgagcgcgccacgccgcatttaatacggcgcagcgtgcgctcgtccggtccgtgaccggtcgcagtgtgtgaccggtcatagaccggtcagatcgcgggttaggtggcaacaggcggcctgtcacacgcctcgccccgtcccgtcggaatgatgagagcctccaggcactcgtccctagccggagccgacgtgctaactcctggaattagcacgtcagtcccggccagattcataccaggcttcatcgcaaccatggcaaggaagtcattgtatgaagaagggcagacgtgcagcatgctaaactgacacgtggtggacaagaatgaccggtttgtgactggtctgacgccggtcatgtcatcggcagacaaccgtgctcccacgttgcatctgcttccggcggagtggaggtaggtatgacccatcccatcggagggtcattcggatagcggccattgcaaatctcaacccattaatgaaggaatgacagggatatcccctgtgccaggcgaaggcgcgagccaagttttggtcaagatagggtgggtccccacccaaaagaagagtaggtagacgtggtgcatgtggtatccccttgagatataaaaggtggatcttgcccaccaaagaaagggaaaaaaagaaaaaaaagggggggacgactctgggaatacctgagctcgtagaggaaagaaagaggaagaagggttctagagcctgaactctcttgctctccagctctctgtaactccttcacacacagatccaccagaacacaggagtagagtattacgcttctcagcggcccgaacctgtctacatcgcccgtgtcttgtgcatttgctctctcgcgaacattccacagatcgagggtgaagaacctcacttagcgcccccggccgaaccggcaaagggggggcctgcgcggtctcccggggaggagccccacgctccgtcattgttgaagagagaaaataatccgatagacaatctaaaaagaaaagagcttaacttataggtttttttgagaacttagggcaacatcaatgcttaaggtcttgatagaaataaggtagatcccactatactctatgtctatggccacaatgttgaaggcaagaataggtgttaagatggatcccacatctatgtaaacaaattctactttaaagtaggtctcaccatacaataatctattctcatcctctttagcatgcatctgtgctttatctttttattttattttttaaggttgagccataagcttatggctatttttagcatttaatgtcttatggctagtgcatataatgtatatgactagtcataagctcttatggctcattcttatggcacattgtagatgctcttatactagttttccattgtgtacctcaaggtggcaaaggcttgggtatttgatgacgagaatatcgacagatcctggagtacacattgggcaaccacaatgtggttctgttcagtacagcatgtgcaagtttgaatggcaagagttgagctgagctgagcatgtacttgctctgggccctcggattgaccggcgacacaagacgatcttcggatcgtcaaaaaaacgtacggattgggaagttcatgcaaatctcttgctaaaatacggaagcaaaaatgtttcgaagttcggtaaagcatgaagcctgaagttaaattactaagagcaagtttaatagtatagcccactactaacttcaattcatctataaccaatctaatagccaattcatacaatagttgcttactatactattaatatacggtcccacctgtcatacacacattgcgtcttagagtccgtgctgcaactagctatagatttgtagcccgctgttcttctctcttaacttttatctcattaaaatatatttgtagccggctaataatctgctagtattgtacctgctataaggattacatgtaataggagatatatactgcttccgattttaaaaatatgatgctactaactgccttgtaaacgtgacatgatgtttggtcattttgtcctagtaagaaaaactatattagttttatttattttattctgacttgttttattttaattgtgattttatttcttatatttgcactagacgaatttttaaatgccatatctaaaagtaaatagcattattatatatttagaaacaaagggagatatagcctatatcctagatccgcatcaaacatttggtatatcacgttggatctagaatatagagttgtgctaaacaacacctaaataaagcaatacatctgctgccgctgatgaaacctgctcgtggagcacgagataggagaaacatttggtactacaaaacataaggggatttttaatattccctccgtactcgtaaagaaagtcgtttaggacagctacacggtctacaaaacacaattttgactatttgtttctataaaaatatttattgaaaagtgatatatgtatatttttatgaaagtatttttcaagacaaatctattcatataatttttccatcttaaaactcaacaaattaagaattattcatgatttatattcccaaggtttgacttaaacattgtcctaaacgacttcctttatgagtacggagggagtattttcttttctaagataaacatttcattgtggacaaacgtgagagcacacgcaatagcaacatagcatgtcctgaataaagtgaccactaaattcaataaatatggtatacatcaatgcattatcttggtcctggtatccttcaatcatgttccttcacgagatcctccttttgatctgcttttgtcattgttgcttgcatgcccatagatttttttttcttaagatagtataaggattaactcgttaattagttcccgcatatcaaagagatacgcaaccaaagtcgagtttacagggaaatttcaaagcaaagacaaaccttcaataaaatgcataataaaaggacatggctacatcaatcacccgtcactaacttaatttgttccttgtacgtgatccaaactttgttccattagccaagcgtacattaactccaatacttctactactaataactactactgtcatgtgtgtgtcagatttatgctcttaagaaaagatttcagattattttttcttcaccggaacccttacgtacataagtacattgtatacgtatatgtatggtctgtatcagtatcactgcccacgtcttcttttctactaaaatgatagttgccaagtcttcgaatgatccttttaacagatggatcattttcaacgatataatcatactataagaggagggagaagatgttactccaaggacatcatttcttttttgtttttgttttaggaaatatcaaggacatcatcttgtataaattaagttgaaaaacataagaaaagaacacaattaatcttaatccacgcggtttacagattgttgagagagtctacatcaacaattgctcacgacttactcccttcgtcctaaaaaaaaaagacaaactctggtttctgtgtccaacatttgaccgttcgtcttatttgaaaaaattatgaaaaaaaattaaaaagacaagtcacgcataaaatattaatcatgttttatcatctaacaataatgaaaatacgaattataaaaaattttatataagacggacagttaaagttggacacggaaacccagagtttctctttttttttttgacggagggagtaattatgaactactcacagtttgcacctgcatcctgttgctagtttcctctgggcatgcatttgcgtgaaaagcactcgtttacgttaaaaaggatgcatgccaatttactctctagcttcattgcttttgatttgtagcatctctttgttcttagattttattttttttagataaagcttattttcttagattttagcatctctttgttccaagcttttgaagtgagggtgtgtttagttaatgccaaaattagaagtttgatttaaattagaatgatgtgacgaaaaaattaaaagtttatgtgtgtagaaaagtttcgatgtgataaaaaagttggcaactaaaccaggtctaaatgaagtttgggaatacattgattgcgtcccggtttcgcagcctgaaaacaggttttgtcacggaagagattgaaaactactcttcctactccagaacagaacaaaagtatggaatcaactgcatctcgtgaagcgagcaaaaagaaatccagatgcaatgaccaacaagcatagagatctgcatcaccaggagtaataaacgtctcgatgggattgagttgagctagccgttggctttctcgtgggaaaaagcgtcgttgaaacagaaaagaaaaaggaaaaaaaccaggcaatctcacgttccaagtacctaacccccccaaccccggcgccacctccagagcgttctcggccgtcggatcgactcgaacgttgggatttattgctaatctaatgccagggtggtctgcgcctgcgcgcttttcctgcccggctgccactcatcatccgtgtccgtttcttcgtctcatgatcagttcgtgttcgtgcttctgccgcgctataaaaatcactgcgtcgattgggcggttcacccatctcatcatcaccccatacctagccgtttggcccgtttcatcctcctcttcttcttcctcctgccatttcttggcatattgcgagttcttggctgccattttctgggcagtggatcggaggaggagattggggattgggcaagaattatcctggtattgtggatataagatttgcagaggaacagtgggtgggtttgtgctttcgtggtggtgggtgagtgaggcgtcgctttccggcgaggttcgtacgtgtggagtctcgcggccgcgcccgtcgccgtcagtcctcgccacgcaaccgcgccgtcgcttctaaactccggtaagtaatcgcctcatcggcaaggcaccgtcaccaccgcgctcgacgggtggtttttatactcttctccctctctttctttggtggtagatgtagctaggtctcctctctgccgccattgccggcctcgtgttcgtccgttccctcacgctctgtctctgtctctgcatcgtcctcctcctcccatggagatcaagaagctgcagcagagagtgagtttttttgcgtcatttgtgtgcttgcttgattgacggcatggcacggttttcacagtttcacatttgctctggtcgccgtcgtcgtcttcctcgagtaaactgtagtaaactcttgtagagggagggttcacgtgagttcggtaactcacgcgcagctttttttgctctttctctcgctttctgtctcatgccgttgttttcgccgtggcggaagccaacaattccgccgcactgtcgagaggaggaagaagatgatatttttcggcgggaggattggaccgcattgtggcggccttcatgaggccatgcctctccatagcccttgctgctccaaccactcctcgatccttatctcatttcctggctttattatataaagaagccatcgccgggagacggagtacaagagagcaggaagcacgcctcttcttcttcttctccatcttctcacccaccatagccaccttcttccttcctgcaactcggctttctggtaagaccaagagaccatccttccacccatggaggtttctttctccctaatagtagtaattagtaaataaactacagtagtaacgcacacgcacacgcggtgaacactgcactgcttggcgtttactgcgtgtcagggctcgccgtctatctagccgttgctcatgcatacagtgagctttaggaaggcaaaaatggtggctttgggtttggggtttgggtgtggggcgagagattccagtcggttgcaacaaacgcattgaatttgcttgccttttctctcatgggaattgtgcagtgcaagaacagagaaatgcagctgtgctgaactgctgctgatataagcttggctccttcctcttcttgcaaaggctccacaatttgcagcagtgcaaattcgcaactgcaagaggagcactctgcttctgcttctggtgatttgtttgccttcatggatggcatagcttatttctgttttgcttggttattcataccaaacttcagtttttgtgttagtttgcaaagtaaaattttagttcttgttactgtttgagaatttagacaccttgccaaatgtttttggtactatttttttcaagtacaaaagcacagcaactctacagtagagtggccagttaatctctttgttaggagtaaatcattctgttaaaatgtccattagagaatgctaataaactattgttaacatctgctagagatctgcaatgacagtggaaaaacagtgtctttttctttcacagttgcgaataaattaaaaatagctctgatgattttgacccagtagtttgttaggacgtcatggtttcctcttgccgcgtttcctctctgcattcttggctcctctcgccgttgaccgaccgcccgcaatggccggcaacggcggcggcggcggcggccggagacactgctccggcgttctcgagtcgctggagggttgcttcacggggtttctcatcgtgctcctggaatggcacgcgcaggtccggaggcggctgctcccgctccttcgccggcagaggatggcggtgctcgcggcgccggtggtcgccgccgtgctgctgctcacctgggcggcgtacggcgaggcccaatacgtgctgtacaaggacgccaccaagccggtggaggcgcgcgtcaccgacctcctggcgcggatgacgctcgcggagaagatcggccagatgacgcagatcgagcggcaggtcgcgtcgccgcaggtcctcaaggactacttcatcggtgagcattgttcttcttcagagacacagccgtcggccatggcggcggcggcggcggcgagctgaggtgtttgttttgcgggtggcgtggcagggagcttgcttagcggcggcgggagcgtgccgaggaagcaggcgacggcggcggagtgggtgagcatggtgagcgacttccagaaggggtcgctctcgacgcggctcggcatcccgatgatctacggcatcgacgccgtgcacggacacaacaacgtctacggcgccaccatcttcccccacaacgtcgcgctcggcgccacaaggcaagcagctctcctctccccaagatttgcaaagctgcttccatttttcactaaccgagagatccggttttgtttgatgtttttgagcagggatccgaacctggtgaagaggatcggcgccgcgacggcgctggaggtgagggcgaccggcatccagtacgcgttcgcgccgtgcatcgcggtaggtcaccaccagccacagtgctagctttgcttcaactctcattggcgatggatcgggggatctcatggcgttgacgttgatcaaacaacaacaggtgtgcagggatccgaggtgggggaggtgctacgagagctacagcgaggaccaccgcatcgtgcaagccatgacggagctcatccccggcctgcagggcgacgtcccggccaacttcaccagcggcatgccctacgtcgccggaaagtaagtcctattcaagaacacctcgtgacacacagtgccactcaagtgtctctttgtgtgttcgtccgcctgatgaacgctgggtgttcgacgaaatgccaggaacaacgtggcggcgtgcgccaagcacttcgtgggcgacggcggcacgcagaatggtgtcaacgaggacaacaccatcatcgaccgccgagggctgatgaccatccacatgccggcgtacctcaacgcgctccagaagggcgtctccaccgtcatgatctcctactcgagctggaacggcatcaagatgcacgccaaccacgacctcgtcacccgctacctcaaggacaggctcaatttcaaggtgagacatcaacccaaaccacttgtttcagattctcattgatgtgataatgtagtttttcagatgttcatcatcttgagttttgtttgtgtttgtgttgctttcagggcttcacaatctcggattgggagggaattgacaggatcacaacaccagcaggttcaaactactcctactctgtccaggctggagttcttgccggcattgacatggtgagaacacaaactttcttgtcactcttagtacaagtgtgcttgctgttttagattcaagcgtatttgatttcaagatgattaattaattgtgatgttacttgtagatcatggtgccgaacaactaccagtcgttcatcagcatcctgaccagccatgtcaacaacggcatcattccgatgagcagaatcgacgacgcagtgactaggattctgcgcgtcaagttcaccatgggactcttcgagaaccccatgcccgattcgagcatggctgatcagctggggaagaaggtaactagtgacacaatctgatgcaatcaaatcataatgttgcttcaatttatttcaggagattattgacggtgaattgtgaatttgtgatccaggaacacagagatttggcgagggaggcagtgaggaagtcgctggtgctcctgaagaacggcaagacaagtgacaagccgatgctgccgctgtccaagaaggcgcccaagatcctcgtcgccggcagccacgccgacaacctgggctaccagtgcggcggctggacgatcgagtggcagggcgacaccggccgcatcaccgtcggcatgaccatcctcgacgccgtgaaggcggcggtggacccgtcgacgacggtggtgttcgccgagaaccccgacgccgacttcgtcaagaacggcggcttctcctacgccatcgtggtggtcggcgagcacccgtacacggagaccaagggtgacagcttgaacctgaccatcccggaccccgggccgagcacggtggcgacggtatgcggcgccgcgcagtgcgccacggtgctcatcagcggccggccggtggtggtgcagccgttcttgggcgccatggacgcgctcgtcgccgcgtggctgccggggaccgaggggcagggcgtcaccgacgtgctgttcggcgactacgggttcaccggcaagctgccgcggacgtggttcaagtcggtggaccagctgccgatgaactacggcgacgcgcactacgacccgctgttcccgctcggattcggcctcaccacccagcctaggacctactagctagcttagctgcagtgataaggagatataggaaagatgaaaatttcactaaatgggaattcgtactccctgccattgtttcccttgatactatttttctctgttttggtgtatgctcgatcctcattggcgagcataatgaggatcaatttgattatgagaaattccatttacaccaaaaatggcttcgtctcgatgcaccataaattgcgtttaaaatgtccaaacctttctaaagaataatggagtaaagatattaataagcggaataagtccactttgactcccttaaaagcgacccgaatctaattcatgaccttgcactgcaaaaccagatatcttgacccctaaactgttaaaaccggtgcaatttgactccctcagcagttttggagagcggttttgctgacgtggcgcctacgtggcgatattgaccgaattttcgttccacatggcgttgacgtggcacttatgtgacattaaaattaaaaaatatacgtgggacccattagtcattcacacaaaaagaaatgtgggccactgccatgtggggcccacatgtcagtcctccctgtctcattgcttcttcctccatctctgccttctctctctttctctccccttcttctttcccttcggccggtggtggcggtggtagagaaagcggcggcatcaagccgcgagtagggaaggaggtgggcggcgcggctcaccgcgactagcagggtgggcgacatcagggtggtgccggcagagcgatgtggccgcggcggggggatcccggcgaaccgccacaaccttgcgcatgctgctgggaaccgaccgataagtgcttcgatttttcccctcgccggagttcatttctcgctgccgcggccgcatcccgaagcctccgtcggtttcacggttgcgaaggcgaagccgcggagggtgggaggagagcgagaggaggaagaatagtcggcctggtttgcgtttccgcttccgctgggtgtcaccaatccaatccctaatcccgtgcttcttactctccgccatctccatgctacgttccctatgttccaagtgattgtcgatggggctttctatgatttttggttaatctgtatgttacttgttcggctgtgatatccatctcttttgcaaattataccactatatcatgtaacgcttaatcacattcgtgagctaacttacatctcacggtggtaatatggattgtgcatctcctcatataagttgttcttctactcattgagcttgcttcttccacttcaggtgtgcagagaaggggcaagcaacatctgcacaaactctgctggaggcattgtctatgattgctgattcctcatcctcttcttagccaaaggcattagcggtagctcaggataccattgagttctccgaaccatcaggacgctgcctttccttgtctcctgtctcacgcatttggtcccgactgatgcgtcaatggggatggcggcgggcaggagcaagccgatggcggcatcaagtagcgagcgggggaggaggtggtcggcgcggctcactgcgaggagcaaggtgggcgacatcagggcggcgccggcagagcgatgtggtcgtggcggcggggatcccggtgagccgccacgcccttgcgcatgtccgacttggaaggggagagagagggaagggagagaaggaggaagggagacacggaggactgacatgtggccccacatgttagtgggcccacatttctttgtgtgaatgactaatgggtcccacgcatattttttaattctaatgccacgtaaatgccacgtcaacgccacgtggaacaaagactctgtcaatatcgccacgtaggcgccacatcagcaaaaccaccctccaaaaccgctgagggagtcaaattgcatcggttttaacagtttagagatcaacatatctggttttggagttcagggtcacgaattagattcgggtcacttttgagggagtcaaagtgaacttattctttaataagcagatgcacacatataggggtaccgacctggcccgttgatcttctatgagaggcagcatgggcgtgaaggcggcagcgacggcggagaatcttcagaccgacgcggcagcgcgatagaaagaagcgatgcgcgcggttgcacaaaggagaggggggcgaattcgtgcctggcctttctcgggcatgttgtgggccgtccaagtctctgatcgtctgccatgccgaagcaaacccacagcatcccgaattgatgtattgctcctcaagtccaaattgaatccacacagaaatgacaagagtaccacattgtgcaaccaaaaaagtttttttttttctgagaaaatttcttctgaggtgaattttgagggttcatctatttttcatgaacggtaatttggcagaccttgccgacgaacaacctcgtaaacaacccatttttaacagaacaactgggcaccagccaaagtcgtcacattacgcgtgcgagcatcaagaagtagcaaaagagcatggcccgttcaaaaattaacgcctaatctacctcctctagattaaagaggaggttcacttgccgttctagtcattgctgttatgggcacaagtgatatttacaaatatacagtaacacccttcgggatattcttgagctttgccagattcttaccatttgctggtgcccatccccgtccaaaataaatatgttccggggttcttgcgcgagcggctgccgatccaaaatcttgtcctgcactctttcggagtgactacctctttgcataagacagataaggttcttgagcgatggttagaacgtctggtctttctgcttggttgtatgtcaagcagcgacgaatcagttcctgcgagttttcaggtgatgcagggtcaaacttttgccaaactatgtgcaatgttatttaaactagtgtgttgagggacaaaagtttaaaccaaacggacagcctcaaaggcacaacatggaaaatatagtaaaagggatcaatctaactgatgactctgaaatcagagataacagtaaacatacctttgcctcatttgatacagctggctttgaagggaattccactctgcgtgcgttgatgattgtatcttcccgaagtattctctcctgggtctggtcatggccaaaaggacgccttccgaagagcatttggtaaaacattacacccgctgaccaaacatccacctgcaggaatgcaaacatcaattttaccaccaatcagaacaaagatgaagttgcccataagtggtttaaattgattactcagggggttcacaaatgactctaactgaaataagggttaagaaggaatcgcgtaacattttgagtaaaaattgcatatccacatggccattgcctgcataccactaagcccaaccagtattccccatccccatcaacagcagatcaattcaccacctgtgacctgcaccttcctgctcttgcacctccttctgaaaactaaccatctgcacggccatttcccctggatctgtccaatgggaactactatcagactgatctatttggcacataattgtctcgatattgacacaatttaagctgtgcatgtgagtttcttgatagttttccctgattttcctcattcgccacctctttcctgttctgtattaagtaacactctcatgatgttgatcttcttcctattttccatagtgcaagaattggactggacggtggtaaaactagaaatgatctgaaccagtgaatggtctggtttggcttagaagaatgtcggtccatgtatacgaactacgataaaaccatatccagtcctaccagctcacagcctaaatgcaaaaaaataaaaataaaaaatgttatgtatgctgggaattgaaccctgcaactaggacaggccttgcaaagtactcccacaatgcatctaagtacctaaccaactggataatggtgatttcctcgctttaatgacaaacgagtatattcagcctgttattttacttaccaaactggcaaaactattattttctcaaatcagcatttggaccggtgaagtgcagtccaactggcaaaaagcagaaccaaggagctcactaactcaatcaatggtccaggtttttgtactacgaagtatattctttctgaggttttcaagtatggatagaaagctcatcttctctacttatctccacgtagtgtcatagcgttctcaatgcccgtcaaaatacatcttataatttgtaccagagggagtaatgctaatatcatattaacatactagggattactacttaatgaatgctgaaaatttggcaagtgagcatgatttgcgcatgactgcggtctctgtttatgacaaacaaacgccacaagaatccctaacatccttatagaaggatcttattgatgcatgtttttgtcaaattgctttaacacactaagatatgaaagatttattaacattaaaaggaaaacatgttgccaaatataccttcgatgagataaatggcgttttgctaagatcaaagcattccggtggcaggtacctggaagaaaaagaagaacattaggaaacaaatgattgacatgccaaaagaacaatggttctaaatgggaaacagcaacactaacataaataaaaactaaatttatgacatcatttgttctatcccacctgtttacataagacactagagaaaaaaaatatttcattggtagatagtagcatgaaaatggttgtacttcatgcaataactattaattcccttaggttctagaatgatgcatcaaatgtgtgcaactctactacacagtgcaggcattgttgcaccatgtataccaatttaatgccagcagataaaagattccataagaggtagtcagatagagtattttatcaatttagtacacagaaatcaaccggaaaagtgagcacgctcaccaataggttccagctccctgagaagtcagttccattccctgagacccaacatcatcctccactatcttgctgaggccaaagtctgtaacttttgcaacaccaacctcatcgaagagaacattgcctggtttgagatcatagtgaatgatcttttgagttctcttgttaagataaactaggccttgaaatatttggacaattatgattctcgcttccttttctggaagaatcggtgttgctttaaggactgcatcaagatctttgcctgcataaaaggtagcaattgatgtagcattattacatgccaaggtctcatgaacaattaaagatactacagcatgccacttaaaaacaacctcaaagggcctattcaggtgtatgcctattcgaagatagcaacaaaaaagtaagaaacctctatcattaaccaattagagccaattaagcttcattaatttttatgttcaccgccttaaataatgacctcattatccatcagatatcagtcaaatattcatgccccatcctggctatgtgcgtgcttcttacgtaagtgattgaacatggtgggtttgcttatgtgtcccacatgataatgtgccatgaatgcacaaactgatcctatggtaaatgattctaaaagacaactaaatgagtgtggaagttataaatgtaacaaacagctactgaatctacagaactattataaatgctctttcatgtcaacattcaggcaaaatttatctactctcttcaccaagaacaacctaattaagattcctactaataatgaaatgaaatgcagctctcctgcgttttcgagaaaaaaaaaagattcctactaaaagaacagaacagttccgcaaagagattgaatgtttgacacagaagagtgcctggagaacatcaatatatatctggcataaaaacaacacccatgcagccttatctatacaatgaagccaatgggagatatttataaaagaggccgcacgatctacattgtcatgtcaaagaaatttggaaggtcgttgcgaaaataaatttgttgtaccactgcaatattctaggacagtgcagaatgtgttgtgatcaatctcaaatatgtcccatagcctgacaatgtttggatgcaccaaagtcttatggatgttatattcacgaatggcgtggcgtatgtagctttgctttttctcctcactccactgagcattcaaaccatgaagcttacatgccacatacttgtactccaccaaatcaaatgcctgcagaaagaaactgtctcacgtaaatgctggtgataccaaaattgaatcctctatgaaacagataaagatactatatcaataaacattgaggtaacttcaccaaatgaagctcaaaacactagttaaatgctttaacatgaatatataagtaccaaagctattatcgaaaactttacaaatcttgacagaggaagtgtacgggtcaaggaacatttgatgagaaaactgtaatactacatgtgtgttatcagttgttctactcaatgtttaattccaaacaccaagtttcagatatttgtttcaatatatctaatttcctccactttgtttcatttttttatgacttcttcctacatttctaccttttaggccatttcgggtgggacccactgcagcccaccgataggggcttaccttctttatgttacattaataattgtgtgtatcaaagtcataaacaaataatcataaagttcgatgtttcttctttataagcaaagaagcagttggtatttaaagaggtcatgactgaccttagttgaatagtttttgaaaagtaaagctgaagcaagggcataccttataaacctcactaaaccctccctttccaagaagatttaacagagcgtagcgattgtgaagaatctgaaagttattaaagcgtgatccatcttcgtctctgagacgcttcatttcacgtataagcctacccttttccaattcataccgatctctttctctcaagtactgttcttcctcctaaaatacagttcaggggaattagattaaggaaggaggatgcttaatagccaaaaacaataatcagcaaagtattttacccgctttatacttgttaaccgtgatttacatatctcatcctgcaacaggacatcttcctcagacatgctagtttcagcatcactgccatcacccttatctacaatacaaaagtggctagcaaaaataagtgccagcaagaatcctaacttgcatacttaagctgctatgcgttgctagtttctgcttgtgtaaatgcggggagttttcctttgcactaagaagaatgaaatggagtaacatatgcgcaaaactacatagattgtaatggcatttataatcttccttttcatggaataaaaggtcatgcactggagttttcgcctaaccaatggaagctaattcaagtggtaccttgtaaagcaattaagccgggagatgacaacacttttaaaaaagaagaaactttaccggattgtcttttctttagtgattttctatgtctctcgatagtttctttagtctccagcagagatttctacataaaagtccaccatacatgagggattcagcaaaaggtccaccatacatcaagaataaaggttaaaggcacataaaatatatgaatagcaataacactataacagttcacaagagaaaaaaaactgtgcctgataaacaaatgcacaactataggaaatctaaaatcagttgcattaatagcaagcatttgtcttcatggatacatggcttctaaagttgcaaaacaggaactgtgccttaatggatgaagctttatagaaagtggtactgcatgtccacgactccacgttacatcagtagactcagcctgatccagacatgtaatatttttcatgccagcttggtgcttaactgcttaattgaatagatagatatatcttataatctttttggactttattgacctaaggctgctagtaatgtgtggctgtgctcaaaattgtacaaaaagcttatggaacaaagatgtgtccattattagtatctggtagttttaaaactaatcgccttataggggggaaaagacctagacaggttatccagatcaaagtatatgtgatccaattttacggcggaacacagttaaggcatatacacagatctgcagaacttacaaggtgagaattaagatcctttattgcctggccatcctcccatgtttcagatatgacagttccagctctgagttatgacagagagcagtcaaaaaaaaggtagcaatagatagtcaataaccagaacataaaactgaaagtgactagttctgtcctgcaatcaaaattttagtagtcgatactagaaggtacactgcataatacataaactgaaggctcaagctaccacagctgtttctggaagaaaattgggtatcgtacaggctatcatagatgtatagcactccaatgctatagttaacaagaaccacatagcaaagaaatacagtacaagcaaaaggagctttaaatctatcattatacattttcaaatcaattaatatataaatttttactctttaaattaagtgatggatgtatggaaatgttggagattacctcataacaccaacgttaccaagtcggaaagattcctgctttattcgaatccgtgcttcttgccgctctgcttttgacacagctatcagcagatcagatagaaccttcaattgctgcaatagtggaaatcaccatatgagcataaatattacatagtcagggagtagttattattccatgaatagcatgtaggactaagtcctctgagctgtgctgatgaaagagaacaaatagtacacaatatggtcagcctgacctcactatgcacccatctcagcctccaaaggtacacacacaaagcaaaaccaactatcacattgcacatgctcatatgtacacaatcacataacagttcacaaggatcccatatgcaacaatgtgcataaccttctctaccaatgtaatcaggaaaaaagttcttgcatatatgaaatttgacaggttctggtattcaagatccaatgcaaatagaagaatgcaaatcgtttcccaaattattcaacaatgataagcttgagtggtgaactctaatttttttggtaaatttgtctaatttatacaaaggaaagaacaaaaagtaagtaaacaaatatggttagataaaagataataagaatctgccactatagcatctgagtttcttaggatgaaacctttgatttcttttgttgatcttgttctttgagatccttcaattcctggaagaatgaggcaaaaccaacaagtcagagacctggataagtcgagatcacattagggtgtgcattgaataactccataccttcgctagcctatcactaagttgacggtattccgtggactcttgacgcgatttagaaagctcttcttccaaaatagcaactttaccacgcagcaatgacaactcttcctgttgaaatattgaatggatttgctttagatttacatttgagaaagaaaagactcttaacatatttatctggtatattatacattattagtatctataacaacctatatgatatggcatgctccagtacaatatttcacataaatatgttcatgctttctgtagaagattacttaatggaattaagatgcacagtttaaacaaacaaatgaaagcaaataaaaaaggtcatctcaaagaagaagggtcaagagggatagacataatctatcagagaacatctatgttactataataaagatcagaagagggatattcacagtgcacctcacagaaaatgatgtaaagaaagtgtcacctgtaaggcagccttatcatcattgccaagcacagcactggatcgggattcctgatggaaagatactaacaatttagaagatgaggatggatcatcatgtagtaggttgccatcatacacctgatctgcgtaagatatttcttttgcatataatggaagacgggacggtgcaaacagaagaagtgtgtccccataaggattcaattggtactgtacaataaatatatgtgcaagaggcaaacataatgcaccgtaactacctagaatctgagttgctgcaaatgaattcttcaaaagtatcagagataatttgccctaaaatagaaaagccccagagataaccatatcttgatcacataatgcatgatcctttggggatcatcataataagattgttaaaatcaaatcagtccaaacttatcttcaaactatttcaccattttcatctacaaaggaatttcaccatttaattcttttcccagtcaacaaaactctaaattcaatcatgctattcctgctctacacgcatttgtacgtgctctggatgatcacttcttatatatatatatatatatatatatatatatatatatgtaatttgcaccggtttgaaaactaattcttctagtgctcatatttgctacaagatctaattcaggcattcagcattatccaaatgaccaagatatatccataaacatgtgcactttatcgtaataaaatcctatgtatctaaaaatattgaaaggtagcaaactaagatatatcaatttccgttcgctttcatgtctctcttatatggttgtaaggccttaatacccatctgagaacaaaaggttaagaatatcaactgaggtcttgagaataaaatacacagcataccatgttggttaaaatatcatgtcgaccatttgctacaacagcagatgaagttgaagttgctcttgtttgatctacagtttttgaaccacgccctcggcctgctccaccgcgcccccttccacggccttgcttttttctgtttgagatgtctatggatggccgtgtgtccatgacttctgaatgctttaccgcctcattagctgatccctagcattttcaatgaaagagtgcaccaaacagaagaatgacaagagtgagccataagcaagtacaacaaagactatcccatactatttaattctatcgatttcatattgcatacctcaaaatttccaacagctaggccgtgatcaccatctggcgatctcgggcgcttcagtatgttcttctgtatcaagaactcctcgccattctgatttacggaatgcaagtagcattagcaggtataagcaaaaaaaaaaaacaaacaaactagaggtgaaaatattggcaaatctgtagctagaaacaattaatcaagctaatcatacaggtttaccacagtatacactataaatggctccaagcactaaaaagcacaatcatcgcatcactgtcgaaaagtaatgtgcaagtaaggaaatcgatggagataaatatgacactgtactgtagttgagggggaaaggaaaatagcaggttggagttcgaggtttagggctgacatcatcgtcggaagaggaggactcgggcagctcctcctggtccatgaacgtggtggcgggggcagaaggaaccaccagatggtgcggcggcggcggtgatggcaccggagcggccttgccagccatccgtgcctccagcttggcgagcttggacgaggacgggttggaattagacgagaggtgctgcactatatcctcccccgccgccgacgatcccgacattgccgccgctgattgcacccaaaccggatcggccgcccacgaagcttccagaacaagcaaaccaaccgccgcacgcacgcgccaactctcactacgcccccgctccccccgagcacaccctcctcaacgcggccacgcgaaccaccggatggatctacccgcggctgctcgacgaacaggcgatgggcggcggcgccgcctcgggcggaggaacgagcgaatgagaccgaccaaaacggagccgcggcgggcagtcgctgcctccgcctcctcccctcctcccgcctgttgttgactcctcccccgcgtgcggcgacggctagggtttaccggcggcgaggtggtggccctggggcggcggcgccgccgaccagaggacgcaggattcggaggcgagttggaattcacaggattttacacaggcgcaggcatctctctcctctccttttcctctctccgctcttcctgttcttcccccgtactcctacgccgcgacgccactacgcgcagcggaataacgggaactcagcccgcctcggcccacctaggcccatttattccagcccattgaggcccatgggctcgtcgtgtcgtggtggaaagttccttacaagcgccgcctctatcggagaggaaggcgaagagtggggagtgggagacaacaatggcgagcggtgtggaggagagagtgaggggcgaggtgagaggggaggaggatgaccggccgcagctgagcgcggcggcggcggaggcgctgcgggagtttcttctggaacaggggcgggacggtggggaggaaggggaggaaggcggcggcggggtggagctggtggcggaggactggcggctgagccagttctggtacgacgagcgcacggcgcgggcgctcgccgaggaggtcgcccgcctcgtctccctctccggcccggcctcctccgcagcggtggcctgcgtcgcgtgcccgacgctctacacctacctcaagacgagcagccctgatgtgaccgcgcagctgctggagtacgacgtgcggttcgggcagtacggcggcgacttcaccttctacgactacaaccagccggaggagcttccggcggcgatgaagcacgcctaccggatcgtcgtcgccgaccctccctacctggtatgcagagagagattctccctcttcttcttcttgatttatattcgattggactaaaatgttagaagaaattgcgattggttgttcgtgcagagtaaggagtgcttggagaaggttgccaagacggtatctttcctcgcacatcctgaaggctcattcctgctgttactgacaggtaactg

SEQ ID NO: 9848 - DNA, 38610 bp, Oryza sativa
  unsure (1)..(38610): unsure at all n locations
cttactaattattccatcctgatctcctcagctccatccatcgatcatttccaacctaattcctctaagagaaagtacaagctagctggttagtcatattgttaattttggtctcaattatgtctagaattaatcaagacacaacctagctgcactgtctagcgtgtcgagggcggttgcgcggcgccgatgcgcggaggcagggcggttgcgcggcactgatgcgcgggaccgagccggtcacgctggaccgtgccggtcacgcagcgccgtgatgcgggaccgccctctagcgagggaccgccggtcccgtagaatggaagagcggcacagagcggcaccgtctcagtcccgcattcctaatatgcggagaaggtatatttgtgaaaatatttttcatgcatgtatataaacataaaatagtgaaaaaaaggtatattttcaaatttaattctacagttacgtagaattccctatttgctaactgccaatgaattataatgcgcgcaagtaaacatggatcatcgtgtgggagtgcagtactcctaattactcctatgaactaagataagcacgcttaacatgttctttaattttgtactagctttgcttggacttgtgcaagattaattgctggagattgattagttagtgctccgattagctggagaaagttttcgactgctcaagtaattaaacgggctgaatggataaatggtggatatattatttattttatgacaatatttaagggtataaacaaatatcctacgcaacttatgaatagaattttctttccaaaaagttacggagcttggaaagcgtgcccacaataatttataatatgtaggaaaacaacgtgctaagcctctttggaatgaaagaatttgaaggatttatgtagaatttggcataactccacatcttatatcatgctaatctagaatttgcaagttgcatagcattggtttaaaatattattatatatattatttttctaaataagaacaatatgaataatccgtatatatggatttctaaagctaggaatacatgccttcaaaatattttagtttgaaataggaatacatcctaaattctatgaccattttataaattttttgtgttccagaggagcccatttttttttcataaaactccacagatttggcacatactactgtactacacaataggtttacaacatgagtttcataagaatgaacctggaaattttcataaagttccgtagatttgacccatatggcctcctttgatttgatggaaaatcatatgaatatttactaggatttcaatgctatagttttttttctcctaaatgccgtttggaacaaaggatttgacattattgaatcctataaaggctctttggatcgcagaattctagaacacgaaaatatgaaaaacgagcgattggaatgtcatggtccaatgaatcctcgagaacatgttgtctggttgcttcaaagggaaatatcaaaggaatttggagagagctaacacacaagtgtgatctccatgagattagacttcatgttaaaaatcctcgaaattacaatgaaatgagataacccaaaaggagtttcaaaggatttttggtggctcaatccctatgatcacaatccttcaaaattcctcaaaatatcatttgttccaaaagagaaattttttttcttggaatatcttaatccatacaggttagagcaaatttaacatggattaaacctaatgaaaagtttccttggtctttctcttcttaaaattttatgtttttccagcggtctacccaaacaatcatactatatatatatatatatatatatatatatatatatatatatatatatatgttatatatatatatatatatatatatatatgtttatcaactacatacgtttaaaaaaatctctaatagtggattggtaacatactaaaacttgttcgattaatcccacccgcaagagaaataaggaggatttgaagggctgttgtggaattatttcccccatatttatggtgtaaaattatttttcctcagtctcctttaaatccttcctcttaggaattaacgaaagtatcacgtcttttttagatgggataaaagcaggtgcatgcgtgcatttttagcgtgcgcgcttacatgctgcgtacatttgaaaagaaaaatgatatgagttttgagatataatgataaacagccagtataacatcatttaaaagttttttgggataacatttcaaagagttaaaaaaacacttaggccatatttggataatgggtttgggatatgattttcaacccctcaaaaggtaagtttcaatcttgggcttattcggtttgtaggattttcaaaccgtaggaatacagaaaacgtgtaatataggaatgcatgtgcaaacctatggattagaaaacataggaaatttttatatggttgggttgcaaacagtccaaaaggattaaaaacattgggttagagtggattatttttttcctttgttttccccctaaaagtggagggataggaatttttcctttcatgcattcctttaaaacgaatgatagtatagtgctcattccaaaggattgaatattcctgtaatttccctttacaaatcctctaaaacgaataagctagccatttattctactcactcatttcatcatattcctccactcatttctatttctcaatcccagctctcctaatccattattcaaacacatcattatagataaagcgttccggtatagtattagagaaaagaaaaagggtgatttttgagagatgtaataatgataaacatatgaagtaacattacaaagagttaatgcgttccgatccggttctttcttaggatggcaagcagttcagtggatcacattacacgtcgccctgatttctcaatcaacagccgttcattcacccaccgaacaatcaccagccgttcgatcgcgttcctgacgtccacggtcaaactcaaaaacagaaaaaatcaccgcgggcgtgcgggtttaatttatctccctcttacgccaacgacgatcgaacagagataagatcgatctaaccaccctaacaaaccgtagatgcaaccgtaataacagcctaaccccaaggaatgcgagatttatccgcccctgcaatgcgctataaatttacttcgaactcacggtgaaaaagtaattagcatcacctcccttcttgcttatcaacacgtacgttgcgtttcttggcaatgcgtgctgcaccgacgacgatgtggcgttcgccggcggagccggtgtgtatcctcgtcgccgccgttctcctgtcggcggtggcggcggcgacagcgggggaggagtacgtgaagtacaaggacccaaagaagccgatcggcgagcgcgtcgacgacctccttagccggatgacgctcgcggagaaaatctggccagatgtatgcagatcgagcgcgccaacagcgagccgtccgccgttatcagagaagtgacttcgtcggtaagccctctataggcgccgggcgtcgccgccgttgcgcgcgttcgatcgttgtacactgacattgtgttttgttttgtgtttgcaagggagcgtgctgagcggcggcgggagcgtgccgtcggagaaggcgaccgcgaaggagtggcagcagatggtggccaagatgcacaaggcggcgctcaagacgcgcctcggcatcccgatcatatacggcatcgacgccgtgcacggccacaacaacgtccacaacgccaccatcttcccccacaacgtcggcctcggcgccacccgcgaccccaagctcgtcaagcggatcggccagtccaccgcccacgaggcccgcgccaccggcatcccctacaccttcgccccatgcgtcgccgtaagccgcccaaaccggacgaacacatcgttgccagtgaaaatttacgtaatgttcaaggtgttcgaccgatcgatcgcatgtgtgtgtgcaggtttgccgcgacccgagatggggacggtgctacgagagctacagcgaggacacgaagctggtgcagctgatgacgtcggcaatggtgcccgggctgcagggcgacgcgccggcgaggtaccccaaggggacgccgttcgtggcgggggggatgaacgtggccggctgcgccaagcacttcgtcggcgacggcgggacgcgggacggcatcaacgagaacaacacggtgctcagcttccacgacctgatgcgcatccacatgccgccctacgacgacgccgtcatcaagggcgtcgcctccgtcatgatctcctactccagctggaacggcgtcaagatgcatgagaaccgcttcctcatcaccgacatcctcaagaacaagttgaaattcagggtaaccaatgctaaaacctctcaaattctcctcaaaattcaactgaacttttaaaaaatgtgcagggatttgtgatcacggactggcaagcggtggacaggatcacgacgccgccgcacaagcactactaccactcgatccaggagacgatccacgcgggcattgacatggtgatgatcccgtacgactacccggagttcgtcgccgacctgacgacgcaggtgtcgaacgggtcgatcaagctggacaggatcaacgacgccgtgagccgcatcctccgcgtcaagttcgccatgggcctcttcgagaacccgctcccggacccgcgcctcgccggcgagctcggcgacaaggagcaccggcagatcgcgcgcgaggccgtgcgcaggtcgctcgtcctgctcaagaacggcaagcacggggagaagcccgtgctgccgctgtccaagaaggccgacaagatcctcgtcgccggcagccacgcccacaacctcggcttccagtgcggcggctggaccgtgtcctggcaaggccagggcggcaacaacgtcaccgccggtaaatcaagcacgattccgatctcgatcgacactcgccgtcgcgtttgccactaatgtgaatcgtgatgcagggacgacgatcctggaggcgatcaaggcggcggtggacgagagcacggtgatcgactacacggagcacccggacaagagctcgatcgccgagagcgccaaggagtacgactacgcggtggtggtggtgggggaggagccgtacgcggagacggagggggacaacctgaacctgaccatcccgtcgccggggccgaaggtgatcaaggacgtgtgcgggctcgtcaagtgcgtggtggtgctcgtctccgggcgtccgctcgtggtggagccgtacatcggcgccatggacgcgttcgtcgccgcctggctccccggcacggagggccacggcgtcgccgacgtgctgttcggggatcacggcttcaccggcaagctgccacgtacttggttcaaatcggtggaccagctgccgatgaatttcggcgacaagcattacaacccgctgttcccatttgggttcggactaaccaccaagccaagccatagccaaagttagaggtcaaaacattttatctcaatgtgtagccagagccggagttaggggttaaacattgcatctgatggactattatattgttcggttaaaagtaaaatgagtgtgagggtatggtattttaaaaataaatattagtaggattttattggtgagtgattctcgtaccattttttttctacattattcgctacgcatcttaaatatttcctcctccaactataaaccccccctccctttccttccctctcctccaatggcggcggcgcgggccacagtggtcgtgtcggcacgggccacggcgtcggttgtgaagaatgttctcgcaaaatcgagagggtaagtcgtgtgcgctcgctctgcttctcgcttcccttactcatctgctagtgtgcgtttatatgtgttgtgttctttttgtgcgttgtgttgttcatctgcattgtgttcattcatctgcgttgtgttcatcttcttcttgcttgcgttcgcgcgtgttgtgtgcgttcgtgcgtgcgttgtttgcgttcatacgtgcgtcggtgcgtgtgtttgtgttgctcatcgtagtctcatgatgatgtgtgcgtgtgtttctccttatcgtagcgtgcgtgtgtttcttctcaacttatcgtagcgtgcttgtgttcgcgcgttgtgtgcgttcgtgcgtgcgttgtttgcgttcatacgtgcgtcggtgcgtgtgtttgtgctgctcatcgtagtctcatgatgatgtgtgcgtgtgtttctcctcaacgttctgctgctcatcgcttctcttgctcgagtggacgtccacccatttattgcatgtcatctaaatagttataaaaaaattgaaaaaatatgaactaagatagatatattacaaccacaaacatggaagttaaaattcaacttctacaacttgtaacaaaaataacaaacaaaactcaaattactatatgtatttttacaattaaatttgttatttttgttacaacttgtagaagttgaatttgaacttgtttgtttgtggagtgatatattacatattaatctatcttgtcaatttttttgaaaatttttcgtaaccatctacttgacatgcaataaacggatggatgttcaatcgagctattagaatccatctcccttgcgtgtgcgggaagtgtttgtgtgcttgttgcaaccattgcagacgctgttccgatttagttggtgtgcatcgtgttcgtgtgcttgttgcaaacgcttttcactctagttggatttagttggtgtgcgtgtgcgggtagtgtttgtgtgcttgttgcaaccgttgcagacgctgttccgatttagttggtgtgcgtcgtgtttgtgtgcttgctacaaaatatgtttcaattccaatcatgtttcatctaatatttttttggattttgtcagttgtttgacaaatcatttaaaaaactaaccgagctcttaaaaaaaaagatacgcaatataaaagacgaagatatgattggaaaaatcactaacacatgagacattatgacccgctggatgcaaacactgtttcaattccatttttgttctatgtttcaatcagttcatctaatattttcttggattttgtatattttttgacagatcatttgaaaaactaatcgagctcttaaagcaaaagatacacaatgtaaagggcccgctggatgcaaacgttgtttcaattctatgtttcaatcagttagtatctaatattttcttggattttgtctattgtttgacatatcatttcaaaaactaaccaagctctaaaagaaaaagatacgcaatgtaaagggcaaagatgtaattggaaaaaccacttacttatgagacattctgacccactggatgaatttcggaaaacacgtcaacgacaccaccgacaagactttcgtcgtcgctaacccccaccccgtcatccacaccttgcaaaaatcactcacttatgagatattctgacccgctggatgaattttggagaacacgtcaacgacaccaccgacaagactttcgttgtcgccgacccttaccctggatgaattttggaggatacgctggttacatcggcagcagaggaggcacgggcagcggtccggcggtcccacttgtcctcatgtgagcggtggcggtggctgctgattgcgggaggaggcacgggcagcggagacggcggtccggcgggaggaggcgctggcagcggtcccactagtcctcctgtgagtagcgacgccggcgacggctataaaggtgctcaggcagtgagagtcaagcatttgcgacaacccccacttggcatatcattctttccttttatttttttgcgtggacctttattggatagatcttgatactaatatgtttcttctgttttttcagacaaaagagggtcgtggttaactagaagtttcgatggtcatccagtgaaaaaataaaagttgagaaaaattcacggttagtaaagtagcgtggcacatgagcagtactactttttctaaattgtatttatactcgaatttttattttattttattttctaattttggattttattttattttttattttgattattagttaatctcgtattgggttcttatagggactcttctttcaatattgcttatttttaatttcgaatttcagttatttttaaattgtatctctagttggactctcattttatttttctccaattaatgtggtaatttctagctcctacagtgaacgtggtacctcctttcaaagctgatataatagatagaagattgaggtctgcagagctttttaaactcggtttacatcggttttaaatattgaggagacttatatcggttctaaggttaaggttaagggatgttgtgatacaaccaggagcttacataagaaacaaaatagatttattctaaaaaaaagaacggagtaagcttttttttctcaagatttattccaaatttttgcttaataattttgggtttactatatattctatagttatatgagtagtatcgagtaggcgtaggatatttaaagaagggaaatgaatgtaaatttgttgttatagatttattttttgcttaataattttgggtttctatatattttagagttataggagtagtgtcgtgtaggcgtggtatatttatagaaagcaaaggagtagaagttcatgtggctggaaagggaagatagttttggaagcctctagaatctatatgtgatatttttctctagatttttcctcacatatgattgttaggtgttttttctctagtataaatttatgatttttctttaaagaatgaggtgccaagtgggccaatcaaaaactagcaaaataaattgtatttatactcgaactcttattttctttttttcctttttgctaatttcagattttattttatttttttatttcaaatattaattaatctcgtattgggttcttatatggactcttctttcaatagtgcttatttttaattccgaattttagttatttttaaattgtatctctagttagactcttattttctttttctccgattaacgtgggaatttctagctcccacagcgaacgtggtgactcctttcaaagctgtcttaataataataactagcatggtggcccgcgcagattgcgcggctagcatctttatattttttctcatataatagcttaaatattttcacattttattattaaaatatattaaaatggtaacataattttaaattcttggttgaactaacaaacgtgtgatatttttaatgtattgtatatacgtgataattatttataaattgtatttgtatatggactcaagactcatatttcaatattccttattttctaaatttcgaatttcctttattcataagttctattcctatatggattctagactactcttccaatattcatttttcttagctttgaattttagttatttataaatagtatttatatatggactctaaactcttctttcaatattttttttaaaaaaattttgaatttcaattattggtaaattgtattcctatattgactgtagacattttttccaatatttctttttttttaatttcagtaatttataaattgtattcctatatggactcttttttcccaatattccttatttgttaatttcgaatttcagttatttataaattgtatttctagggtctcatcttttcgcttatgcttattagccaaaatttgaattttaacctattttgaggtttttttcattgaagtttattttcagcctttacttttagatcgctaagaacaggtatataaaagttttattcacaaattacttttcatttgtaaatgtgtcgtttcgcttattccgcgaataagcgaaacgatggctccactatatggacgctagactcttctcccaaatctttcttattttttcaatttttaatttttgtaattataaattcaacttctatatggagtctaaactctacttttagttttcttttttttagattcgacattcagctagttctaaattcctgtctggaccgtagactttttttcccaatatttctacttttctaattcccaatctgttatttctaattgtatttctatatggactctgaattcatttttcaatattttgtttttttttaatttcgaatttaagttatttataaattgtattactatatggactctagacttttttttctaatatttcttattttaaattccgaattttagttattgataaattgtatttatatatggactctagacttctctcccaatcttgtttttttttcattttcaattttagttatttctaaattatatttttatatggactctaacttctacttttagttttcctatttttttaattccgaatttcagttaattctaaattgtatacttgtatggactctagtctcctctttcaatatttcttattttaaattccaaatttcagctatttttaaattgtattcctatatggactctacttttctttttctctgattaatatgaaaatttctaggccgtgagagaaaacgtggaggctttcttttttattactttaataagataatagatagatgatataatagatggaagattgaggtctgcagagcgttttaaactcggtttacatcggttttaaagtttgaggagacgttatatccggttttaaggttaagggatgttctgatacaatcgggagcaagagataagaaacaaaatagatttattctaaagaaaaaagaacggagggagctttttttcttactagatttattctaaattggactctttagagccttcacgagctagtgagaaaaaaagaacgtagagtctgagtgcatcgaagacatcagcgtccgacgatgcataattattatacatcttattaaaatatcttataacttacatgttgggcaagtattccattcgattactaattaaagataggatccgttacagatagcatatcctgtgtaatatcatttgacgtaatatatttagttgagaaaactctcctcccgatgacttagttaaaaaaaacagaaaggatccgttaccggctggtaatgagatcaacatggtggctatgtggatccggtcacggcataaatatttacggcccgccgcctctacacgacagcgtggcgttcgcccaccgccgtgtgctgaatttcgtccggcgcgagctccttggtttcgtcgacgattcaccgccaattatcgctgatttactttttattattatatgccaagaccggccggtacgcaccttgctactcaattctttctttctttatgtataatatatgtttctgtccagccctaaaattgaagttgtagcttatacactatgagagtattagatgtactactatgttttattatcactgcgcccctccaatagtatagtctggttcgaaaatcctcaaatctttataaattattaataaattgtacaaatatgcgatacaacagttacgttttggtggcctccgattattgctttgtatgggattaaactagctagctcgatataatagcacattgttataaagttttattttctcatatagtagctactttcacacttttttacgaaatgaaaacattggaagtggtgatataatattgagttacggcatagctcgatcaatcttttgtgcaaggtgctctgatcagcatgataattcctatgctcataaagcaaaataattacagcaaaccaaagatataaaaagttaatagtaacctcccaattcgtataaaaggatatagcaaatgtgatatatggcttttattttcccttttcctcctatttgcttgagtcgatgcattgtatgttgcaccttcgcagtgactcttgtctttcctagtccttttctcttcttcccccctccgttttagtactacatgtttttggtttgtcttaaatcattttttatttgatcaaatttatagaaagaaatagcaacatctataattttaaattaccacggaatatatttgttttggtgttaaaattgtcgctacagtttttacaaacttagttaatttgaaaaaaaaactcagaatatactcaaaatgacttataacatggggaacaaagggagagagtatacgagtagtagtaactttatcgactagctcattcaagttaaggtgaggagccatcagcaacggttaagattggtgtgtccatccgtaacggcgccgtccgctgcctgtcatcgtccggccgtcgcggggtcggacctcgcccgccgccgcaccaggcgccgccgaccgtcgcgagaagtagtcccttgccacttccccgccagatcccagatccaggatcggatctggcagtcacttcaccgctgccatcacctccacgcgccgccgccacccccaccaaacgccaccgcccctccacacaaccccgccgccgtcatctcccccaccagatccggccaaatgacacggatctgtgttagagtttgtgtcgaatatgtgtacatagtcggttacagtttaagacttggagttgtaataggtattaggactagagtatgagtcggactctatcctaggatctctcataaataggggcatgtctgttgtaaccgcatagcgacttagcatagcgagagggagcggctgccggcgtcgaccagccgtgagtcgttgtaactctaatacgttgtatatgctggatcggggaggagtgcccgtaatcagtgccccgaagatgtaggctacggctgaactctgttaccaaatatcgtgtcttggtgccgtcatcgttttagatctcctatagcgttttcttccgcgtttagctaccgatgtcaatttcggggctggttttataacaatctgggcgccgtcccaaatgccgagcagcgccccccttgcccctgcgtggtgagagcgaagcggagggagggagaggcgggcaacgacggcctagtcaccacccgtgtcacccggggagagggcgacgcgaaggcttgcttcgtctacttcttagttttttgccgtgtagtagtagtattccgcctcatcttatcaaccaaaatttaaatttttaactttaaatctagagttgattttgaggttttttttcattgaagtttgtttttcagcatttgcttttatatcactaagaacacgtatataaaaaatatatttataaattatttttttggtttataaatttgttgtttggcttattcccctaataagcaaaacgacgtggcctttcgtgcaggaagaacctgctttgggacggccatcaccgtctcttctcctccattccccagatggtcctcccgaactcgctcactcgctggccttcgttttttttagagagagagagagaatggcgacactctattcattaagttgcataatgacagagcatctcccggatatactccggggtcacagagcgaaagatattactccctccgtttcgaaatgtttgacaccgttaactttttagcacatatttaaccgttcgtcttattaaaaacttgtgtgagatatgtaaaattatatgcccacataaaaatgtatttaccaatgaatcaaatgataggaaaagaattaataattatttaaattttttgaataagacgaacggtcaaacatatgataaaaagtacatagtaagtgctcagaacgacgagccaaagtgtgtgtcctacattggataaacggttcacatgtatgaaggaacatgcaaggaatgaactcttgactttcttgatgtcgctcaccacgcaaccagcagcagaacgatctcgttggagactggaagcgttggatgaatgagaggcagtccgaggccatgataacctgctggtatccctcctccccgtgccaggatcagcgcacgtctaatcgccaaggcttcagctatttcagggacaacaacttcgggcttattcattttaaaggaattgtaaagaaaaagcatagaaataggaatgggttttaaactaccattcgtttcataggaatgtaccataggaaaactataggaaagttttccattcctccatttttaaaggaaaagcataggaaaaaataattcactccaacctaatatttgtatttttttggttggcttgctcaacaacatagaaaaaattcatgtgttttttaatctataggtttgcacatatatttctgtagtattcctacgttttgaaaatcctgtgaaaagaacgagcccttcttgaattcgctcgtttcacgtgaaaaaacgattcacggactcgccgtgagcggcagcacgcacgcccacgcgcaacaatggcgcacgacccaggccgtttttggtgtcacgtcgccgcattattacgtgtgatttcggcggcacgcgggcgtgtgctggtgccctcggctgcgacgcgtctggttggcccgtcccctttacatgtgtggcaccagccggagatggaccaacgcgtgcacgctaaagtttagggcctttgcaacctggaaccttctcatcctcaccatcccattccgcggcggctaccatcgccccggcccagtggcccacaccccccagctgtggcggcacaaatcgacgatgccaatatgcccattcatgctggaaagtggaaaggtgtactctactcctacgtatagcagcagcacacagtgaagacagactgcaatctttcagtcatcagtgaccgtagtagtttcaggcagcattcagatgcatgggaaggctgcaatggtcactccagtgcgtgacaaagcttaatgcgcggctttcacggatccggtgattggtcggccgatctacccgagtcaattccatgtagctaattaacaatcctgcactactagtatagtgcaccagtgctgctgctgctgccgacttgagtcctaacccataatgcagcgtcgtgcgtgcattgtctccctttatattgctgcagcatagatgcagtttaagcacaaggatggttagtagtaacacggcactaattcgtggaaacaattggtagaacccacgctgttcggttagcttaaacccttcgtaaacctgctctaatggcaccgacacgcaaaggcactgcatgtccccgccctaatgacgggcattaatccacgacagcagcagcagccgcagccgcaacggagacgttgtgaattgtgatcgtggaattggatttggattcgctgtgagcctcctgttttttgcagatctttccaactgaaaaaaaaaaaggaggaaaaggctctcttgtgatttagcaactcaccaatgggccagcgataacgggtctagtacgtaggagtactagtgctgctacagcgaagtgcgaggaaaggttggccattaaaactgcccaacctttgctgtgcgctgttccgtggcgccctgcattttcctcacctgccatagctgtccgggggccttcactgcatgtgcagctgttacactttagtactccgcttaattcacctaccaaatgtactgacagtaatgtgacactctagtaaatgctaatggtggagtaatgcgctactatgaaaataattaactactatttgtcacccttacgagttgttctagagaatttaacacttaatacatagtttctccatcccaaaatataataatattaagccctcaggatttgtcttaaaatatacttcctctgttttagattataagattttctagcattgcccacattcatatagatgttaatgaatctagatatatatagtgtttaaattcattaacattaatatgaatgtggacaatgctaaaaaatcttataaactgaaacgaagggagtaacaatttctccaccaacattctcttcccaaccaatcacaaccctccaccatttattttttccacctacctccactattcatccaattacaaccctccatcactcacttctacctactttcttaataaccgtgttcaaccctaaaacttcatatattctgggacagagggagtatgtcataggcagcgaatgacaaattattagttgctatatcttgaaaatttcaagtaggagtacgttaaatgtcccgctacggagggagtatgtactgatccacgtcctcgctgatattcctatcgtgtgtgacagatttctttttagacagcgtctggttggttggatcgtagtactactactgttgctgcatgagcgtgaacaacgcgtgatcccatcatgctttatcctaacttctctgacgagcatgtagtagacgcctcgttgtcctgccattattctctgacgagctgagccactctggtttaatttactctgctctctggtttaacttactcctactctgcttggatcgatcccgtgatccgtggaacatttgttaatctaagacgcgatctggatctttcaattagtggtagcccaaaccctgacgcgatctgaaggaaattttgtcaacgacgcagccacgagaacgagcctgacgacaaagggcgcggacggacgagcagagcagtgccgggacagcgtatacgtgctgtgcctgtgtggcgccaaccccctccgttccaaaataattacagttttgtactatttacgttcaatgtttgactgtttattttatttattttttttattaatatttttattgctattagataataaaacatgaataataatttatgtgtgactaaatatttttatttttttacaaaatttttaaataagatggacgtttaaacgttgagcacggatatccacggctgcacttattttgggatggaggtagtattattctttctcattagagcaggtacaatagcaggctattagccagctacaatcatattttaatgagataaacaatgagagagaagagtagcgggctacatatctgtagccagctgcagcacggactccaagacgcaatgtgcgtatgacatgtgggaccatatattaatagtatagtaagccactattatatgaattggctgttagattgactatagatgaattgaagataatagtgggctatactattaaacttgctcttacaaaccggaacacggagtatctagatttatagttatagttagaagtttgctttatttttctaaatggagagagtatatctatagtctccatttcaaaataaatttacttttatatatgaatataaatatagactaagatcatatttatatataaaagtaacttatatatgaatataaatatagactgaggtcatatttatatatataattaaatttatttttaaacggagagtgtatctactatccacaaaactaattttgaatctgatcaaacatatgtacaaatttatttttataaattgattttttttcttggaaggaacactatctactcccatgcgtcgccggctgtatctgatctgcaggcacactaaaataagagtgaaaagaaactgcacgatgctttgacgatttctgtatttgcatttgtgtgattgggatttaataggggagatgcgaatagtagagaagtcctttttcttagcatgcctggctggaaggataaggaaaggtgatgatggtccatgactccatggatgatatagaagaagcagaagaataaaagtcatacatagagaagtttctgacacctgtagcttcttttggattcagaagcttcctcagcaatttaacttttcattcgaattatgagaagttgtagttgtagaattcaacaaataaactataggtaagaagctgtaaaactcggcttctccagtttatcaaaaactgtctactaatcaactatctctcacagaattttaagctttcctgaacaaacctaagatcactccccttgtggggaaaagatgagagaacatcacatgcatgcatcgctctgtctactgtctcactttgaactttccatctgttttcgtttttctaagagaaggctgcaagattttgatttcttttcccttgcatcatcatttggctatgaaagctttattcatcctaaaataaaaatcaactttttaagaatgaatataggctggtgcttatctagatattacatccttacttatccatattcattcgtataagtgagtacttttcttgatagaatgaatactggatcaaagcagctgtaataacaccccagcacatgaattctttctagtactagagcagtcgaaaaaggcaagcgatgccagaagtagcaacgaacgtgtgttgacgccgaagttaatgacgacattaaaaccttggagtaacacctcattgatctactaccttgtctgtcttctttccatttttttttccgttggaacggtcggtcctggataagttcaaaaaatgggacatttgatttgaaaggaaacggctcaaattgaacttttttctacttctacggagtgtactgcccccaacgtctctacgttaggtgcaaaccattaattaaaagcgtaaacagtgtcgcgttacacggacctgccacttgatcagggtacaaacactgttctttagttagaggataaatagttgaatacggttaaaaatacagtatagtccactggcgagacttatgccggggaaagcaacaaaaaggttgcctgtcacaactcccgagcagagatcccacgtccactaggaactaaaaaaaattaaacaaaaagacgatgacgaatgcaactgacatgtgggcaggaaccgaaacagctgcatgtgggccccactggacagtgagagttggcctttttgacaccgtggcatggcccgacatccgcacggtcaaaattaccgtcgccgtcgcgtagattctcggagataaaaagagagagagagagagagagaaaaagcgcaggaaaaaaagttgcaagtgaaaaaaaaatctgagagcaagcagttggttgtcaataaagcctcgcgttattgtcgtctgcctcccctgccccgccgcgccaaccccgtccgccgccgccgcacgtcgccatcgccggatctccggccggtattccggtgagcacaaggtacccgccccctcgcctccaccgtgtctccttgacctcttcctctccggcaacttctgtgtcggcggtgcgccggaacacgcgcgccacgccaccgcgaatctatcgcgtccaaaaaaaaacaaaaaaaaaatctcgcctgagaagacggtgatctgcgagctaccctcgcgttgtctccgcgtggtggcgagcgcctcgtgcgctctagccatcgcccaatcgcgtcgtcgtactggtatagtggccgacgacgacggtggattggtgattagttcccatccatggcgatcgctagcaagctagcttgctagatggatagatacgccacaatacataacaaatacatggggcttgggcgtttgtggagtagtggagagtgaccaccagctcaccaccacctcctcctcttttggctcgttgctccgctggttcgatcgattgcccgcacgccaacctcgcatgattttcttttccctccccatttgtgacacactaattaagcaattctggttggactcactcactaatctgccttggctctctttgagatagagagaaaaagaagagaagattttttttttatgggttaagatgcttgtgctgtttcttttttcagacaacggagcaaaattatttcaggctctaatattaaaaagaatatattatatatgtgatatacataatgtggagatgcttgcactatactgtattttgtattactagaggtggttagtgacctgtgttagtgagcctgctcgtgcgagtccaaaattttctcctaatttaattgagctaatctcctatatggaggaggttaagctgtctcaatctgcagcctctgacccggcaaagcagagtgcacacaagctccctcccgtgtcgaagccgccgtcgcatgattagacaaacgattcgtttatagctctcatgtccctttcacccggaggagcttgacaaaaagactcgccgccgcggcacagctcgccggtgatgagacgatgcaaaaataaaatgggggaacgaatctctcgcggtcgagccgcgagcgacctcacacaagcggccgcgtggagcgtgcagtgactgcagctctcacgcggcctgtagaagcagtttgtggagttttgtggccggcgtgtgagaagagaatttcaacagcaataatcaaagattagtctcttggctgatcttatccacagcgacattgcaccagattggatggatggatgcatatcatccctcttgcgggcgatgtggaggtcgccgttcttgattggcttggctggctttggcttccctgttcgatattgatttggtttgtactagtagaatactgctggtattagctaggcgttgatagtggccggggcttagcgtcaggtccactgaccactggggcactaatcaaagttgctgatttctttcgctttcttttttcgttgcaatgcgatcctcatgtcggcgcgggtatcgcgggggagatcaaagttcgtagcttcgttagccgcttagcctactagtgctctcattagtctataagagagaataggtcttttgctttgctttcaggacatggtcacctttctcaggcagcaagcgtaagcaaggcagaggagagggaaagaacctctctgcagtgctgctgctgctagcttgcagaaaaaaaaaactctcatcttttgcaggaagagacatcactgtttctgcattcgtgtgcatttggattaagctttgcttatccctttttagtggagattgttgagtatatcaggtaaacacatgtgcagtcttgctgtgctgtatgtatgtgtgtgcatgattttgtcgtttgttttatgcatgctgcgttatctgctcttattcaaactcttgttatgtgctggctggctgattcaattaatcaggttaggtacatgattgtttcccctgtaagtcatgttggttttcagcaacttgatgcgattggataaacaagtttgaaaaaccgaccatgttttgagtatgctgttcccttgtttctgttttgattgcaacctaagagactcttgagtcttgactattctaatgtttgaagatgttgttgttcaagcaagagacgtgcactactatgctcctatgtagttaccctcatactagcctgaaaagcttacactcatagatatgcttctctcacaggtctatatattggcagctctggttggagatagacactcacactgagccaagatggggagtttgcacaagttcagtgttattctcctcatgttatgttttgctacgttggggagcgctcagtatgtcaagtataaggatccgaagcagcccgtctctgttcgtgtcaaggatctgctcggccggatgactctcgctgagaagattggccagatgacccaaatcgagagggagaatgccacggcggagcagattgccaagtacttcataggtgtgtcatggtttactactcatgctcaagtaatgtgaacgatgaaatgctggatactatatgttttgtgttttgacattggtgtgctgtgatgcaggtagtgtactgagtggtggaggcagtgtgcctgctcctcaggcatcagctcaggcttgggcttcaatggtgaatgaaatgcaaaagggtgccctttcgacccgactaggtattccgatgatctacggtattgatgccgtgcatgggcacaataacgtctacaaggctacaatcttcccccataatgtcgggctcggcgctaccaggtatgaagtgattttacttttgatatgataattacctcttacacaacaatacgtggatacttttttatgtttgactacaagactgcaacatcttaaggtgataacacagttgtgatgcacacagtgcttgttctaaaaaacagggtgcttatgacgcatttggtggtctgtatttaaaaaaatcttgattcttgatttgccgtgttgcagggaccccgacctagtaaagaggataggagaagcaactgctcttgaagttagagctactggaattccctacgtctttgctccttgcgttgcggtaattaatactagatgatacctcttctatagtgggtgatctcaatctggttagggtgcgtgttcccttttcatcagcactatgaactcactgttgtgtttacatgatacctctcaggtttgcagagacccaagatggggacgctgctacgaaagctatagcgaagacccaaaggttgtccagtcattgaccacactcatctctggcttgcaaggcgatgttccatcaaatgatgtaggaagaccatatgttggtggaaggtatacctctgatactgtatagctttaaaatcatctttgtggcttgtacctttctgcctataattgacaggtgaaattggcgtatcactgcaatatactactatatgactaactttggtactacttgcttactgtgcagtaagaaagttgctgcatgcgcaaagcactatgttggtgatggtggaacggtcaagggaatcaacgagaacaatacaatcatcgatactcacgggctgttgaccattcacatgcctccttattataattctatcattagaggagtctccactgtcatggtttcatactctagctggaatggagtaaaaatgcacgcgaaccatcacctaatcactgattttctcaagaacaagctccgcttcagggttagtttttctaaaaaaacaaaatagttatcttgatttattttcttcaatgtatatttggagatattgcaggcgtatttaattgctttggatcttgtgcaaacagggttttgtgatttctgactggcaaggcattgaccggatcacttctcctccgcataagaactattcttactcaatcgaggctggaattggtgccggcattgacatggtgagatatgcagaccatgtgcattaacttcttcccttttttttaggaagattgaattatatccctagcctctatgtcaaggacgcataaagtcatagttaatttctcttttgaaaatccaataaagcatttgatttgttagtctgtccaactttagtttgtgggataaaaggtggattcaacaattaaaacatacatcatgttagaagagtggtcttgtcttgttattacgagtttatgacacatcattgatgagccttttttctactatactaatacagatgcgatgctttattccctttcttatcaatttatcatgcctaatgtatatgtgctgtttgcagatcatggttccttatacctacacagaattcattgatgacctgacagagcaagttaacaacaaaattatccccatgagcagaattgacgatgctgtctacaggattctccgagtcaagttcaccatgggtctatttgagagcccttttgctgactctagcctcgccgatgaacttggaaagcaagtcagtgctgaacacctcaatcctcctattactcacacttcatatatcaagaatttttactgaccaattccatctgaaccaccataggagcaccgtgagctcgcgcgcgaagcggtcaggaagtccttggtgctgctgaagaacggaaaatcctcctactctccggtgcttcccctcccgaagaaagccggtaaaattctcgtcgcgggaagccatgctgatgatttgggcagacagtgtggaggatggaccatcacctggcaaggacagcccggcaacaacatcactgctggtaaactattcatgatcaaaatgtttcaatgcttgtaacttcatctgagttttggtgggtggcaagaattaaaatccacggacaatgtgcaggcacgacgatcctgtcggcgatcaaggccaccgttgatcccagcacgacggtggtgtactcggagaacccggacagcagcgtggtcaccggcgacaagtacgactacgcgatcgtggtggtcggcgagccgccgtacgcggaggggttcggcgacaacctgaacctgacgatcccggagcccgggccgacggtgatccagacggtgtgcaagagcatcaagtgcgtcgtggtgctcatctccgggcggccgctggtggtggagccgtacatcggcggcatcgacgcgttcgtggcggcgtggctgccggggacggaggggcagggcgtggccgacgtgctgttcggcgactacgggttcaccgggaagctgtcgcggacgtggttcaagtccgtggaccagctgccgatgaacgtcggcgacgcgcactacgacccgctcttccccttcggctacggcctcaccacgcaggcgcacagcagctgatgcggcggcgatgtcggtggagagtgacgttggttgggacgtgacgccgtcgtgacgagagagatggcgatcatgtagtactacatacacatgttgttggggtggatttgtttgtggtgggggaatgcaataacgatgagagtgagtgatgtgctcaattcttgaggctgtggctgttgttagtgtcatagtgttgggttgtggaataataaaaaatcagatgcgcttttgccttctttctctcggcactcagcttgtgttgcgtcattcttttatgatgaaaggtagttcatgaaaacttagtactattagtcgaaaataaggttaaataaataaaatctactaccgagtagctccccactttgagaagaaagcgaaatggcacaaaagctatcacctgaagaatccttcttggctatcactatcagcgctgtcatccgagccaacccggtgccatcgcgacaagcaaatcgcgcccccgctgctcatcgagagattctgcaatgcactcagatcgtcgcggaggcgatggttccttgggagttgggacaagtgtagtcccagatttttcctgcattgaatcgatgcgtggcggagccctcttctcccggcgacatcctcgccgttctccgttgagcgccgcacacgatcaggctcccgccgcctcagtggccgggaggacggggaggggaatggaattgcggcgtgagtgcggcccaattatatttgggccgaaacggcattgcggtctacgtgcgacctgtcatacacgggccggaaatcgactgtggccactttgagtcccttatgtcagtggccccacaattttttttttgaatgacgaataggtcccatatatatgttttaaattctaatgtcgcctaagtctgggagatatagaatgaaagaaatcgtaggaccttctaacaaaagaagctcctagcaaccagcttgctagccaagattaaggaggaagcaaagacatgggttctagcggacacaaaatttttttggcaactgtcttctatatagttagcacggtccaaaggccctgagcttgtacatttctttctttctgccatcttgtgtagtttactcctttctctattcaatgaaattggcggctcgacgattcgttaaaagaaaagtcacctaagcgtcatatcaccgccacaaatcagaacaacactgccatgtcagcaaaatcgtcaagggagtaaaattgtaccggttttaatagttgatagtttgagatatctggttgttatcgaccaaatttggtaatatcagcatcagaaaaggagattagatcgaagtggagtcggaggcagagatcgattcaagaacagagcaagaatcggctggagtccagatcggctacaattaggattggctgggtctgagtcggactaggtaagccgatgcagccgattccgacagtataacttggtgtatgccatcgggttgaattgaggtgcttcaagatcattgccacacatggatagagtcctgagaatgcaattgtatctattaattaggatgttttatgtaattttcttagagatatgtttgggcaaaagtctgccgcaaagacttatggtatcttagaatttgttagagataatggtcgtgtccggtatggacatatcttgtaattctcgggtataaatagacctcgagccctatgttatttttaacacacacgttcaatacaatttcggcgcatcatcaccttttgctttagttttatttcgacgagttcttactttcgggttgagctgcatcggtttcgatctttaacaagaggtaaaacttgttatgacggcttgtgttctcgggattagtgcttccatctttatgatactctaatcctgtttatataattcgtcgagttatcatatatcttacataatctctagcaatatcgccatctaacttacgatcggctaacatctgtcagtggagggcagccgattaggttagattccgatgttgatttagattatgtaagatatctaccactctatgaaacttccagcggcttgattgtctagatattgttcttcttttcatacttaatgctgcatcagttgagtttgatccattaaatcgtgcttagaatatcaatctctagcctgccttctggttgccgattagggtagtatcggagtttcagccgatcttatctgatttaaccatattcgctctatatgcttcagtgacatgttaaatccgccctttatgttaagatcttattgcatttaagtatattaggcttttatttgatatattatacttgttttgatattgtcggtgacatgggatcaggagtatcatgactagaggtttgaggcagacacaatcgcacacatggcctggtacccccgagggacgtcgggcccgagggtgatgtgttcgccctcctcttagtccccccgagggggtcgggcagcacccccttcggccagaagggcaaaggcgccccgacccctagtgggtttntgctnngggtgtatgggttaggtgagnacagtggggctcacctaaccacatttattgcggttgggctgagcgtgtcacgccacatgtaacgcagtgcagtgcactcgtttatccggtctgtgaccagtcacagaccggtcagatcgcgggttaggtggcgacaggcgatctgacgcacgcctcgccccatcccgtcaggacgagggcttctaggcgctcgtccccagctggagctagcgtgttacctcccagagatggcacgttagtcctggtcagatatatgccaggcttcatcctaaccattacaggcaagatgttgtgtgaagaagggcgagcatgtagattgctaagctgacgcgtggtggacaagaatgaccgacgtgactggtctgataccggtcatgtcgtcagcagacagccacgattccacgtcgcgcctgcttccggcggaagtggaggtaggtatgggccgtcccatcagaaggtcattcggacggcaaccatacaagtctccgtctgtttatgaaaaggtggggtaagtccccacaaaaaaagagagaaatggtgcatgtggtatccccttaagatataaaaggaggaccttgcccactgagaaggggactggacttttcgagattagaaacccagaacaagggagaggctggctcatactttgtagctccttcatacacagatctcccacaaaacacaggagtagggtattacgcttctcagcggcccgaacctgtatacatcgcccgtgtcttgtgtgtttcctgtctcgcgagccttccacatacagagagcttagaatctctccctgagtccccggccgaaccggcaaaggggggcctgcgcggtctcccggtgaggagccccacgctccgtcatctggcgcgccaggtagggggctctgcgagggattttctgagctctcgcactctttcgtgtgcgccaagcttttcctgttcagcccaatggccgagccagcaaaggcgcacgacctctccccgagtatgagcggtgacgacggggagccaaacccacgccgtcgagctcgtactccaccgccccctccacgccaaagtcctaggcgggagaaggcgctcgagagggccgaaggatccgcgacttcgacatccacaggaggtggagaagggcggcgagatggggagcgtcgcctcctcgtctacggcgacggcagcacgccccagggcgtgctccaagctgcgggcgcgctcctacgtcacccgcccgtcgcccatgacccggagtctccagcccaacgttggctggacgatgtggccaaattggtcatgactgcacggcagcgcctagatgctggtgggcggtcctccgccaccaaggcctctggtgctgctaccaccggctccgcgtcatcaagacggagggcgcggcgagcggcagccgctgttcgccattcggccgccactccttcgtcaacgcctccgacccgggaagatctgcgtggggaaccggatgctcgcaccagtatcgagcgccggcgtaatggccgacgtgctccccacgcaacggagggcgcctcctcgtccggagtgtcacctcaccacggacgcggggatcagccctccgtgcccctggttggtggtgtcggttgtagggcctttgtggcgagccttcggaatgtccgttggcccccaaggttccggcccaccatctccgaaaaatatgacgggagcgtcaaccccgccgagtttctccaggtctacacgaccgggatcgaggccgccgggggtgacgacagggttatggcgaatttctttcccatggccctgaaaggacaagcgcggggttggctaatgaacttgccacccgcgtctgtttactcttgggaggatttgtgccaacagttcaccatgaacttccaaggcacatatccgcgcccaggtgaggaagcggacttgcacgcagtacagcgaagggatgatgagtcacttcgcttgtacattcagcggttctgtcaagtccgcaacaccataccatgcatccctgcgcacgcggtgatttacgcgttcagggggggtgtgcggcacaaccgcatgcttgaaaagatcgcctccaaggagccccagactaccgcggagctttttcagctcgcggaccgagtggctcgtaaggaggcatggacctggaacccctccggttccggtgtggcagcttcggccgcccccggatccgccgctcagatagggcggcgtgacaggaggaggaagaagaggtcagcccataccgacgacgagggtcatgtcctcgccgtcgagggcgcttcgcgggccacccgaaaggggaggcctgcgggaggcaaaaagaacgaggccggcgctcccaacagggagcgcctaaccggcaagtggtgcaccgtccacaatacttcccttcacgacctcgcggactgccgtgcagtcaaaagtttggctgagcggacgaggaagtgggaggaggagaggaggcaggagcgccgagagggcaaatccccggcggttccttccggtaatcggcgaagtgaggccaagcagaaggcccccgccgaggacatcgatgacggcaatgatgacctaggtttccaagagcctggggccaccattgccaccgtcgatgggggagcgtgtgctcacgtttctcgccggagcttcaaggccatgaagcgagagcttctggccgcggcccctactcatgaggcgacgtgtcgggcgcggtggtcggaggttgccctcaccttcgaccagaccgaccacccaccgtgcgttgcccggggagggcagattgcgatggtggtttctcccaccgtttgcaacgtgaagttggggcgtgtcctcattgatgggggagcggccctcaacatcctttcccctgcggcctttgacgccatcaaggccccggggatggtgctccggccgtcccagccaattatcggtgtgacgccggggcacacgtggccgttaggtcacatcgacctaccggtcaccttcggtggatccgccaacttccgcacggagcgggtgaacttcgatgtggcggacctcagtctgccctacaacgcggtcctggggaggcccgcgttggtgaagttcatggcggcggtccactacgcctacctacagatgaagatgccgggccccggtggccccatctctgtccatggcgacctcaaagtcgcgctcgcttgtctggagcagcgcgcggaccacctcgccgctgtatccaagcccgagggtggcgacgagaggcttggcgcttccgcccccgccaccccgaggcaacggatgatcacaggcgacgaggtcccggtcaaggaggttaccctgggcgacggcccgtccaagaccacacggatcggtggtcttctggacggcaaataggaagacgcgctcgtctccttcctgtgggcaaacgctgacgtcttcgcatggagaccggcggatatgcccggggtccccagggaggtgattgagcaccgtctcgccgtgcggccgggcgcaaggccggtccggcagaaagtgcggcggcaggccccggaacgtcaagccttcatccgtgaggaagtggcgcgacttctggaggccggattcatccgtgaggtcatccatccggagtggctggcgaacccggtggtcgttcccaaggcgaacggcaagcttcggatgtgcatcgactataccgaccttaacaaggcatgtcctaaggatccttaccccctgcctcgcatagatcagattgtcgactccactgcggggtgcgaccttttgtgttttcttgatgcatactctggttaccatcagattcgcatggctagggaggatgaggaaaaaactgcgttcattacccccataggaacctattgttatacgacaatgcccttcgggttaaagaatgcaggtcctacttttcaacgtactactcgaatttctttgggtaaccaattaggacgtaatgttgaggcttatgtcgatgacttggttgtaaagacgcgcaaccaggaaatgttactctcagatctagcggaaacttttgagagtctccgctcagcccgcataaaactaaaccccgataagtgtgtgttcggtgtacctgcgggcaagcttctagggttcttggtctctgcccgaggcattgaggccaaccctgagaagatacgggctatagagcggatgcgcccccccagcaaacttagggatgtgcaatgcgtcaccggttgcatggccgccctaagtcggttcatatcgaggctgggagagaaggcgttacccttatttaagcttctcaaacgctccggaccgtttacctggacggaggaagccgaaaatgccctcacccagttgaaggtgtatctaagctctcccccagttctggtcgccccggagccagacgagcccttgttactctacttagcggcgaccccgcaagtagttagtgcggcattggttgtggagcgcgatgagaacaattctcatttcacgcttccccaccctgtgccgacttggcccgggagagagcagggaggagaggctcccgagccgaacggtggcccaaggcccccgacgaccggagttggccctctgcccgcttgtcagacggtgctaggagcccccgacccccaggaaggccctgaggccactgtgggaaggccgcacctatcgcccttcgaccccgaggctaaccctgtgctgacccgacctgggaaagagcagggagaagaggcccccgagccaaacggaggcctaaggcccctgacgaccggagttggccctttgcccgcttgtccgacgacgccaggagcccccgacccccaggacggccccgaagccaccgtgggaaggccgcccctgttatcctccgaccccgaggtcatcagcacagaagataagtgcgccccgtgaggctgctgggacgaagagtgcaccagggatgcggcccctagcgaagaggatcggccccaccgaaaggtgcagcggcccgtctactttgttagtgaggccctccgggacgccaaaacccgataccctcaggcccagaagatgctttacgctattctgatggcctcgaggaaactgcgccattatttccaggcgcatcgggtcacagtagttacgtcttaccccctcggtcaaatcttgcataatcgagagggtacaggacgggtggtgaaatgggcaatcgaactttctgagttcgatttgcactttgaaccacgccacgctatcaagagccaggccctcgccgattttgtggcagagtggaccccggctcccgagcccgtctcgatccccgaggccagcacggacccctcgcagctgcctcacaccgcccactgggtgatgcagttcgacggctccctgtctcttcagggcgccggtgcgggggtcacgttgacctctccaagcggagacgtcctcagatacttggtccgcctcgactttcgagcgaccaataacatggcagaatacgagggactccttgccggactaagagtggcagctggactggggatccgccgcctcctggtgttaggcaactcccagctggtcgttaaccaagtctgtaaggagtaccggtgctctgacccgcagatggacgcctacgtgcgccaaatacggcgtatggagcgccattttgacgggattgagcttcggcatgtgcccagacgggataacatgattgccgacgaactctcacggctcgcgtcctcgcgagcccagaccccaccgggcgcctttgaagaaaggcttgcccagccgtcggcgcgacccgaccccttaggggagacggatgcgcctgaccgacccccgaggcccgtcggagtccaggcctcgggacccgaggggagtgctcccaactcccttagattgattgcttggatcgccgagatccaagcatacctcacagataagactctacccgaggaccgcgaagggagtgaacgcgtccattgcatctccaaacgctacgtgctggtagaagggaccctctatcggcgcgcggctaatggaatcctcctgaagtgcattcctcgggaacaaggcgttgtgcttcttgccgatatccatgaaggcgaatgcggagcccactccgcctcgcgcaccttggttggtaaagcttttcgccagggtttctattggccgacagctcttaatgatgcggtcgacctggtccggcgatgtagagcgtgtcaattccacgccaagcaaatccatcagccggcccaggccctgcagaccataccactttcgtggccatttgctgtctggggactcgatatcctgggaccgtttaggcgggccccaggcgggtttgagtatctgtatgtcgcgatcgacaggttcactaagtggcccgaggcttatccggtcgtcaagatcgataagcactccgcacttaaattcattaagggcatcacggcccggtttggagtgcctaaccgtattattacggataatggcacccaattcactagtgaactcttcggcgactactgcgaagacatgggcatcaagctctgcttcgcctcacctgcccaccccagaagcaaaggccaagtggagcgcgccaatgcggaaatcctcaaaggccttaaaaccaagaccttcaacatactcaagaagcacggtgattcatggatcgaggagttgccagcggtgctctgggcaaaccgaactacaccaagccgagcaaccggggaaacgcctttcttcctcgtctacggcgcggaagcggttctcccatccgagctcaccctgaggtctcctcgggctaccatgtattgcgaggctgatcaaaatcagcttcgcagagatgacctcgactacttggaagagcgaaggcggcgcgcggccctccgagccgcgcgctaccagcagagcctgcggcgctaccatcagcgccatgtccgggcccgatcactctgcgtcgacgacctcgtcctacgccgcgtccaaacgcgtgctggattgagcaagctttcaccaatgtgggagggtccatatcgagtggtcggcgtcccccggccgggctccatacggctggccacgggcgacggcactgagctgcctaacccgtggaacatcgaacaccttcgtcgcttctacccctgaggggggggtcgggtgtcaggttttgggctcgggccaaccccgcacccccctcgggcgtgcagggttggccgggggctacaacatatgcatattcttatttctcttatatctgaatttctataaaagcagtttcaatttcctaaaggctgtatctgtgctgttttttccttttgaagaatcttgacttgaaataggtcactcgtgctcaatcctgccctcgggggctcgggtcggctaaaatcgccaaacggggcccagaaccgagccgtgccccgaggcgtggtgaactccggggggaatcggcaaaaacccacaatcgggtcacccataaccctcggtcaccacgttcccggcctggccagtctcgacatgtggatctccccaggcactagccccgacccgcgccttttgaggaccagaacctgggcacaagcccttattcaagctaagacacaaaaggaccacggcacagatcatcctcatctcatactcacagcaagatgaaattaacacaaaaatttcttcatttttgattacagattaagttgatctatacaaaaaagaggcccgaaggccttagaagaaagaaaagaagaaaaaactgaagaatggcgggggtctgggggctcaatccgatgcgcccggatcgccggcctcgacgtcactgtcgtctgcaccaccggcattgccctcctcgtcggagttgggggcgaacgcaagccgaggggccgagccctcgaagctgtcgacgatatggtcggcggcatcccggacctgcgcgcgcgcgcggtcctcggtcccaggagggaactcatccagcgccatccatggagagaaattggggtccctggcctggtaactcgccaggacgagctccaccgctccttgggcgaggtccctcgaggatgacttaattgtcttctcgagctcctcggggagccgttggagagccccggccatcttcgagaggcgctgggcgaggcctccctggttggcggcgtactttacggtccgccctctccagaggcccacttgccgaccggcgcaatctaggcgggagacggcgtcccaaagcatgccgggccctacctcgcctgccaagcggagggcttcgacctccccggcggacgagtccagcgcgccctgcagatcggcgatggtgcgttcggcagctgcgaggcgggcggctaagtcgctttcgcccgtggccgccccgccgctgcgcgccctcgcgttcagctccttcgcccgcgcctcgagctcagcggcccgttggttcagtacggccctctcggcgcgggcaccttccagattgcggcgtgcctgctcctcctgcgctgcctcgcggagggacaggctaaccgccagctgttgcgccgcggcctcggccccctcgagagctcgctcccgctcgatgagcgcgtcctcgcggaggcggagcgtgaattcttcttcggcgcaagcagcctcgtgcaccgccagcgttgcttcccggatggtgacggcggcctcgcggtccgccagatccctctccacgacgcaggtgcgctcttccagcgccatggcgcgcgcctcaagggcctcttcacgctgccgggacgccgcttcggtctccgccgcccgctgttctcgggcagcggcagcgtcaagcaccccctgggcggcgtcgagcttcttccttagctccgcctcccagctcccgtattgaaggcggagggtgtcctgcgcctcgttcatcacggtggtggcaatgagggcagccccccgctcctcctccacttccttggcgatctccgccagcaccttcttacaggtctcaagctccgagacgtgccggcggtgagccttacggcccacctccaccatggcctccaccgagcgtcgcccctcttcgacatgcgcccacgcggcgtcgagctccgcccgctctgcctgcaggacctccacctgggcacttaacccatccaacaccgtggtgtttgcggcggccaaggcctgcagaaggggctctgcgttcagtggggcgatagaaggcgtggggaagagccgccttggagaggatgccacgcggctcgggccgctgatggaagtgccggactcggggatgtcccccggacccggttggtcctgagcgtcgcccgagggagtgggcccaagcgacgcgcccgcagcctcgttgccagctgccccagaagttgtcgcctgagcgtcgcccgagggagtgggcccaagcgacgcgcccgcggcctcgtcgcgagctgcctcggaagtcgccatcgcctcgtcctggcgaaatccgacttcctcccgagtggcttccccggcctggcgggctcgggcggcctcctcccgagcggtttcctcggcctggcgagcccgggcggcctcctgggcggcctcctcggcttcccgtaggcgatccgcggcctctcgccggtcagattctcgcctgagggcctctgcggccgccggatcctcggcctcagactggccggacttggaatggcgggagggacgcgacgggatctcgctgaaacaaaagaaaaaaccagaagacgaacaagatgggtgagtgaaaactcgcgttaagagaatacagtcacgatgggtgagagacgaacctgcgggggggtcggttaaacgaccactttggaggggaaatgaggtttccccgagatggttctgtctcccccatcttgcggggccgcttcttcttgcgctccccctcgggctgcgatgttggcgcggccccctccgggcgcctgctgctggcacgcgccgccccgccccctcggggaggagatgggggaggtgttcctccctgcttcctcttcccccgggcgtcggcagggcggctgctccccggacccctgtcgcgggacccagaagcacgaccccctctcagggtagattgttcccccctgcggctcccgcctgcgccgtcgtgaccctttggagctcgctcctctgaggccccgaccgccatcataatggtcaggatggaggcgcggtctggatcgctgcagagggggaggattccttggggaatgagggccgcctctacggagttgagattcagcacccgttggaccaatatcttgaagtcctcaggagcccagtcccatctcactccctggtgggtcctcgtgaagtcttcggacccggtgtactcccaggcgccccgagcgcgtcgctggagcggcgcaatctgacgacggagatagtcgccgtacaccatggcccctgtgagcccctgggatcgcaggcccgccaggcggtcgaggacggcgtcatagccatcccccagatctaccgacgcccgccagctagaggcctgcgccgggggctggctcggaagtcggaggcgcgcttcgtcggcgaggggagtgtagaaccagtcgctcttccagtcgtcccacttcttgcggagggcgcaggggatgtagcggttcagcaccggcccccgtggctggaagtagcagccaccgactaccgatggcggcgacaccgactgcacggtgaagaaccaccggaatagccgaagagatgggcgcaccccaatgaacatctcgcacagatgcgcgaagatggccaatgtcatcaccgcgttgggggtgaggtgcgccatctggaggtcgtagaactccagaacatccatgaagaaagaagaaaatggcggaatcagccctgccattgcaaagggaagaaagaagacggaccgccccgggtagtctggcgccgggcgtccctcgcccagcgtgactgtctcccggccggtggcagattccggcatgaagcggcgcgacagcccagcctgcctctcgctcacgatccggaaaggcggcagcacgctaccatcgagcagagcggaaccccgtgccatggcgccggaggaagagaagattaagagcgagcgcgtgtggcgaaggtagggcacaggaaagaaggagttagggcgcaagcggcgaagacaagaggaataatggcgaaaggaaggaaacagatcccttcctcagtgcctttatactcttgccagtgctgtgcccggctcctcgcttctcgcgcccactatttcgccccctcgtttatcgcgcccacgcttccactaatcccattcgcccgcttgcggcgcatgaggtggatatgcggttgtggcagtcgagatagatcatatcgtgcgcgcgttaattacgctcgccgaccgaagcgacgttaccatatctccagacgaaacgaatcgccatgtccagattcgtgtgctactcaagtaatgtggcagtcttgaagagaccgctcattgttgacagccgagttaccattgccgatgtgcgtggtttgtgaccgttgggtttctgcccagttgtggagaccggtcccacctgtcaccaggtcttaggagtggcgtcacgcccgaccgtttcccttaaagagggcgatcgccctggcataacgccgggggctactgtcggtgacatgggatcaggagtatcatgactagaggtttgaggcagacacaatcgcacacgtggcctggtacccccgagggacgtcgggcccgagggtgatgtgttcgccctcctcttagtccccccgagggggt
